United States Patent Application Publication US 2011/0183924 A1 - sequence listing, part 10

SEQ ID NO: 23710 - DNA, 4598 bp, Homo sapiens
tctgatgttgttaaaggtgtctacaaagaaaaggataatgaagagttgacaattagttgcccagtgcctgcagatgagcagacagaatgcacttctgcccagcaactcaatatgagtaccagttctccatgtgctgctgagcttactgcattaagcacaactcagcaagaaaaggatctaatagaagattcctctgttcagaaggatggtctcaatcagacaactataccagtttctcctccaagtactacaaagccatcgagggcaagtactgcttcaccatgtaataataacataaatgcagctacagctgtggctctacaggaaccccgaaagttaagttatgctgaagtgtgccagaagccccctaaagagccatcttcagttcttgtgcagccactacgggaacttcgctccaatgtggtgtctcccaccaaaaatgaagacaatggagctcctgagaactccgttgagaaaccacatgagaagccagaagcaagggctagtaaggattattctggcttccgaggcaatataatccccaggggagcagcaggaaaaatcagggaacagagacgccagtttagccatagggctatacctcagggagtgactcgacgtaatggcaaagagcaatatgtgccacccagatcaccaaagtaaaaaacaacaaaactattcaaaaacttcactctcttcccattaaacttgaactgtggctatattgaactgttttggaggggagggggtagccaggaaggaaacaagagaaagtacgtccatttcattatggattttggagttgtgagtgataggatcccaaaattcatctctaatgtggtttttaaatgctggaggattccaatcaatataaatatatatatatatatacacacacatatataaaaagtataatttttctatttttgtttttggttttaatttgcagagatttgctgccaggaatcaattttgagggttcagatttagcttggaagaaaaaaaagaaacatacatccttcagtataggagatgagggaatgagagaaaatattttttgaagaagcatttctgtaaaattagaaattactttttttaatctatttaaagtttggcttgaagaatgccatctctgactatatggccttgtattgcaaagcagatcagtggctggggtgcctgttgtgggtgtgagtgtgtacaagagcgattgaagccaaatctgttgtcatgttagtaaatgatttgaaaactgaatgtaatacttgagtagatttttttttctagtttgaaatttagtctgtctttttgaccttactaatatttcatttaacaagttgtaaaactctgattgtacttagagatgtgactaccaatcagtttgatactcaaggaaagggggttattcaagaaattgaaaatttcatcttggacctcagtgcatcggtcaaatggatttcagaggtttaaacttccctgtgattccccctgaatacccccaaaatgagaaacaaaattttttttcttactccatttgttactctctgttctttgactgcccacccacagaaaagcaaaataaccaactacctactcaattgtgtgtttgtaattgctttgagcagtctagtcaaatcatataaattgttctaaatttcagaattgaacattgaagtattaactcttctgttcacacatttagaattttagctcccaagatggtagggcagactgaccgtacagtaatttatttgtcgttagtgttaaagattaagcatagtaactgactcttaagtgttaaataatgtagaagtaaaaaaatttttttaaaggcttaatttgggaggggggacttatttctgtttacagtgtattaccttccttccctcctcttctccccccacacccaacaaaatacagtttggaattcactgaaacagtaccagcaagtcatgagattttttagtaaagatgagaaagatggttgaagaaaattagtgcataatttctcagtgaataaagttgtagctctcatatactaaatagacaagtttacatgctgttatttagaaaatgactaaaatattaaaaaccgtgttgtgttaatctgttttaagtcataccatgttcagagttctatgtaaggtgggttttatttttcttttaagggatagtttgtaatagtaagaactgtcccatatgttagtaaattacatatgtacaaattgaaactgtaaattgtgaacactggaaagcaccattgtgacatagagtaaacatcttagtaatatattaaagtgaatgtaaatggtggttaaaattacattactgtgaaattcatcttccaactctaagttaagctttggagatacatgttagtggttaactgttaagagctttgaaaacactgcacatatctgtacaagccagaattactatttctttgacttattattagcttggcagttgcttttgatttgattgttttatgacatggtatactactatatttactcagtttgaaactattcatttctacacactatttttaaaaattgcctactaggtgaaacataacaataaaactacctgtgctgaaatttgggggaagtttaggtcctttaaaaaaacatattaatcattgactacatctatgataaaagtgcttattttggtttactaagataatgcagttggtggaaatgataaacgttttaagtgttaacatcctttgaatgcgttggatttcagagaataaacattttgtaaaaatcacttggtaaggattataaacttaattactgcacttaaaatgaaacattactttttttaaacaatgtgtcacaaatgtaggtctgtattacttgtatgcttgtgtgacttactgttagtccagctctaaaaatttaaaggttgtaattgaaatacaagaaaagagccttcttttagaagaaagcaagtatatttttgcttttacttcaaatgttatttaaagtagaaatttaatttgtagatataacctttaaaaattttctcattaagacaatgtttttaatttaatttgcctcattacatctaatagttcccatttgatggcatgtatagggaagagtgagagagtgtgtgtgtgtgtatgtgtgtgtaatatttatatatattcacagtatgtatttagcatttattttattacagcagatttaaagtttgtatctaaataatgcctatgagttgtgtgaagctcttggctttttttccaacgttactttgtaactaatgagggtggatgttcattgtagtttatttatttggttctttagatggaggaatttaaaaaatcaaatttttctcttcacctttatgacttgacatttccttgatctgttggaggctaaaagtaggtataaatgatattgaatgttgggtatagtgatactctgccatagttcttactgcatgaagagaacaagagtcacacaagttcaccactttgcacttcatagagaaggtacatagagacattgcaaaacctgtctccatttgctatcctgataattaaggttttcataatacctagggcctgtctctgagtaattttaattttgccaaatacactgacatttaaaatagtgatccatctaaatttttttcagctgggttttgaggaatataagagctttcaatgataaaggtttgttgtagttgtcttatgtgctgaatttgcagatgatcagatgctgtgcagaattctgatttatttttgtttcctaaaattaagatagcttgaatattatttcacattcctttttcttttttaaataaacaggtttgctttggaaaggcttaatgatggaatgttagcatcttcactagggtaaagaagaacaaaaagaatgttgctggaacgtaaaatagtatttaaaagttaatgaacacttctctagttttcttagttatggccttaataattagtctcttggcttaaatgtccactggttttactttgacacagttgaacaacactggggttaagtctctggtatttaggctggcaatatatatattaaccatattttaaaagtaccaattttgtttttacagaaaagataaaactcaaaagagaacagtgtattccttctgaggggcttttataaattattaactataatatatgatggattttttcctaattttttatatttccttacaattttggtggccattaatttaactttaggcttttgggcatatgctagtctgagcttccgaaaagatacatatatgtttcccttttcattagctgaatgaggatattttaagaagttgaaagagaatttattttcaagttgtgagtaaatcctcctttgaaattcacctgattattagataacttaaagtttatttttaaaagctgacaactttttatgaatcttcgagttgacagttcctaaaagcgtaactcagatattaatgggctgtgtattaaatggttttattttcagttttgcagcacagaacactgttgatatggatattataaccatctgttatctaggctgtccatttaccggttggacactgatactctgtcaaattccttt

SEQ ID NO: 23711 - DNA, 435 bp, Homo sapiens
gttataaatgtaaggagatggatatttgctgcttaacttcggaactgtcttaataagcataaacataagacttatattatacctcagaaaaccacttgaggcaccaaagaatagtttattgcttccctgtactaaatgtccttaatataaagagcaaattcaccttatggaaaggcaactatcttcccaaggagtcccttagttgtttgtaaggtaatgctgaagctatcaacccgtgcgttgagtttaaatgcctatcctaaatagaccatgtctgacttagtcatgtatggaggcaccatccatcagtagttgaaggcagttgaaaaggagtggttgggggattcttctagtgggttgaacaaggtcatttggcatcagaggtctgcacagaggggtgctgagtagaactggagtggtcagacagccttctgg

SEQ ID NO: 23712 - DNA, 4890 bp, Homo sapiens
agcgggggcatcgccgcccgcgcccctctaagtgccgggccgcaagctccaccgcagccgcctgcaagcagcggcgcctcggccctcgacctgcgcgcaaagcctgtgctggagccgtcctcccgcggcggggaccgggaccggggacccaagccaatcgaaagctccaaccatggccatggggctcttccgcgtgtgtctggtggtggtgacggccatcatcaaccacccgctgctgttcccgcgggagaacgccacagtccccgagaacgaggaggagatcatccgcaagatgcaggcgcaccaggagaagctgcagctggagcagttgcgcctggaggaggaggtggctcggctggcggccgaaaaggaggcactggagcaggtggcggaggagggcaggcagcagaacgagacacgcgtggcctgggacctctggagcaccctctgcatgatcctcttcctgatgatcgaggtgtggcggcaggaccaccaggaggggccctcacctgagtgcctgggcggtgaggaggatgagctgcctgggctggggggcgcccccttgcagggcctcaccctgcccaacaaggccacgcttggccacttttatgagcgctgcatccggggggccacggccgatgcagcccgtacccgggagttcctggaaggcttcgtggatgacttgctggaagccctgaggagcctctgcaaccgggacaccgacatggaggtggaggacttcattggcgtggacagcatgtacgagaactggcaggtggacaggccactgctgtgccaccttttcgtgcccttcacaccccccgagccctaccgcttccacccagagctctggtgctccggccgctcagtgcccctggatcgccagggctacggccagatcaaggtggtccgcgccgatggggacacattgagctgcatctgcggcaagaccaagctcggggaagacatgctgtgtctcctgcacggcaggaacagcatggcgcctccctgcggcgacatggagaacctgctgtgtgccacagattccctgtacctggacacgatgcaggtcatgaagtggttccagacggccctcaccagagcctggaagggcatcgcccacaagtacgagttcgacctggcctttggccagctggacagcccggggtccctgaagatcaagttccgttcagggaagttcatgcccttcaacctgattcctgtgatccagtgtgatgactcggacctgtactttgtctcccaccttcccagggagccctctgagggcaccccagcctccagcacagactggctcctgtcctttgctgtctatgagcgacacttcctcaggacgacactaaaggcactgcccgagggcgcctgccacctcagctgcctgcagatagcatccttcctgctctccaagcagagccgcctgaccggtcccagcgggctcagcagctaccacctgaagacggccctactgcacctcctactcctccggcaggccgccgactggaaggcggggcagctggacgctcgtctgcacgagttgctgtgcttcctggagaagagcttgctccagaagaagctccaccacttcttcatcggcaaccgcaaggtgcctgaggccatgggactccctgaggccgtgctcagggccgagcccctcaacctcttccggcccttcgtcctgcagcgaagcctttaccgtaagacactggactccttctatgagatgctcaagaatgccccagcgctcattagcgagtattccctacatgtcccctcagaccagcctaccccaaaaagctgacgtcttttacagaatgtgggatcctcgagctaagatgagggcatccctcacgttcacacccctggtggcatctgccagccctgttctggggacaaggcgggctttcgtgggagccgtgctcagcctgccaggaagccaagccctacagtgcagaggaaacagaatttcaacgggaagctggtttgcttcataccattgggatctgctggtaaagctgttatttgggtttagggactgatcccttgcagtttacttctggatcaccatgaatggccaagatggtggcagaacacgctgtggaccctgagttagagacaatgcaaatgttggattgggtgtaattctttttgaatcccagatccagtctgtacttgaatatgagcagaggatctacaagaatgctgacagggaaccgtgttaagacccagcacccctattcccaggagcttctggcctgaccatctgcagccaaagcactaacagggacagatatgggaatgtccacctttgatccgcatcctgcacaatagtggtcccaccatggctgccacttttttatactatttggagaaaagaccttgtataaattcgaggcccgagtgactaacgtctctgtcacacggaaatgggtacttggtggcatagagaaacacaattagccactttttcagctacacttctcactcagctgcaccctacacttctcactcaggtgcacccccttctgctgtcctttccccaacgtactgggtcccgagcgtggtgggtatttgccacactgggtgccagctcagcagccccccacctctctttattctctccaaagctggtctttctgactatcattgtggtagggggaggacagatgctaaaggtggaagctgacctggagaaagagacacacggggtgactgtggcaaaggacagctggaaaagaaactctatcacttcttcattggcaaccacaaggcacctgaggccatggcactcccagaggctgtgcgcagagccaagcctctcaacctcttctggccctgcgtcctgcagcgaagtctctgctgtaagacagtagactccttcgatgaggtgctcaaaaatgctacccggggtggtggtgtctggcttgcagtctggcccagttcagagaaagttgcagagatcaggggccaaggatgtcatagccccaggttgtcctcagggtcccaatcctagggcagggtgtgcatggaagcaagaactatggaaacctagctccagtctgcaggctctgagcccctagttcctcactccagcggggctccctcactgcacagaacccaccccttctgtgtgggcactgctgaccacacagatgacccagacccaaagagcctggcagaagctctgtggttggagctgggctccgtctccaggtctggttcagggggatcaggaaggctcttttccacctgtggcttcactggccctttgagatttcctatctcaccgttacttcagttacccttgcagggggccagggagtcaagaatataccgtgttcctccagggtttaagccggccatgccttcccgagagcataaccaacttgacaggggtgcccagttaccccacaaactgaaggaaggagatccttcccccatccccaggagtgctctcaaccagcctcagaaagcttgagaagatggaccctttgcccaccagggttaattcctggtggggcagctcggctgtgatcagggcaaccaaacctataggaagccttccagtgtgagctggaattagactgaacatgtgcttgggcctgcctctccctagacgcagttgcggggcactccagggaatgaaccagctcaagtgtgtccctaacagcagcctggagctacccccaatccctcacagcctgaccctcctcattccatcagatgcatttgtagaatcggggcaaatttccttatttatttatggcccatgcctttccccctcttcatcctgatcccgttttgctttgaagagaccccagtaaccaaaaaacagcctccagaagccaaaaccatgcctggatctcccatagcttctcctttgcttccaggagaaagttcactgaaaaaaaaatatcttctggcttcttgtgtgtacagagacaacagaactcggtggggaaacgggaatcttttctgcaccaaagctgcttctaaagcagaaagcagtggggctcttggtgtttcatgctgccttatttatattaaaggaagaattaaatcttgcaaggagtagaaatggtcactgtttgtttttaacttcaggaaatctgtgaggctcccagggcagagttggggacaggggggtggatttcctattgacaaagcagaagctttcactccctttttattcttacactttcaggagactttaaaaaataacaaaacagaacatttctaccctgtctttgaggcaacttgtgtgctgcccgcagggctccagaaagggcctttgaaagctggctgtagggtggattccagcctaagaccttatttcacagagctaatgtcagcgagaaatataggagctggaactaacaggaagcttttgggttttaaagaaagagattgtattttaaatagaggattttgagtcctctagggcactttggcctttccactaaggacaaccctgccctctttccccagagtctctttcccaaggatgcttgactttccccagcaactgctcacttgctttgcaaaataacaagggtgaaatgaatagagttggcccctaggccaagaggctggttatgttggggaagggccttatatcctcaaaagctctagcccctctgcatgcctggctgaagcacagcccccgttgagaacctgggggtggagctctggttcatcatcaagggtgtcatccgaatcacccagacaacctggtccattgccccgaccccgccttgaacctacatggtgctcagaatccagtctggagtggtcaggctaggctcgatttttaaagatttcccccaagtgactgatgtacccctagctgaggaagagctcagctttctttcttaa

SEQ ID NO: 23713 - DNA, 4270 bp, Homo sapiens
agtctcggtaacatcatcagtaaaatggggatgaccctcagggctgtggggagggttgacccagacgatgcacagaaggctctgagcaccgtgcctggtgcagactggaaacctggccagtgtgcgctcttcaggacagcagaggtcggttggaggtctgcattctctgccgacttgggccccaacttccccatcaggtcactgctccctcctctgaggtctggacaaaggacaaggctgtagggacctagactgtcctagacggggaggacatctatcctcagtggtctttccagcagtttgtttggagctgctcatcctgatcttttggctgactctggcagagggaaagtcagatttgaggcctgagctctaacaggcatccagagaggaaggaagggcccaccccgtgacatcagtgaaacggaagcaccctgcaggtgacatcactgttgctcagggcaacgcctccaccctaaggcggacggggaggtgaaaaatcggcctcaagtgtgagacgcatgttgaagggaagggacatagaaggtgtaacgttcacaggaaagctccaaccatggccatggggctcttccgcgtgtgtctggtggtggtgacggccatcatcaaccacccgctgctgttcccgcgggagaacgccacagtccccgagaacgaggaggagatcatccgcaagatgcaggcgcaccaggagaagctgcagctggagcagttgcgcctggaggaggaggtggctcggctggcggccgaaaaggaggcactggagcaggtggcggaggagggcaggcagcagaacgagacacgcgtggcctgggacctctggagcaccctctgcatgatcctcttcctgatgatcgaggtgtggcggcaggaccaccaggaggggccctcacctgagtgcctgggcggtgaggaggatgagctgcctgggctggggggcgcccccttgcagggcctcaccctgcccaacaaggccacgcttggccacttttatgagcgctgcatccggggggccacggccgatgcagcccgtacccgggagttcctggaaggcttcgtggatgacttgctggaagccctgaggagcctctgcaaccgggacaccgacatggaggtggaggacttcattggcgtggacagcatgtacgagaactggcaggtggacaggccactgctgtgccaccttttcgtgcccttcacaccccccgagccctaccgcttccacccagagctctggtgctccggccgctcagtgcccctggatcgccagggctacggccagatcaaggtggtccgcgccgatggggacacattgagctgcatctgcggcaagaccaagctcggggaagacatgctgtgtctcctgcacggcaggaacagcatggcgcctccctgcggcgacatggagaacctgctgtgtgccacagattccctgtacctggacacgatgcaggtcatgaagtggttccagacggccctcaccagagcctggaagggcatcgcccacaagtacgagttcgacctggcctttggccagctggacagcccggggtccctgaagatcaagttccgttcagggaagttcatgcccttcaacctgattcctgtgatccagtgtgatgactcggacctgtactttgtctcccaccttcccagggagccctctgagggcaccccagcctccagcacagactggctcctgtcctttgctgtctatgagcgacacttcctcaggacgacactaaaggcactgcccgagggcgcctgccacctcagctgcctgcagatagcatccttcctgctctccaagcagagccgcctgaccggtcccagcgggctcagcagctaccacctgaagacggccctactgcacctcctactcctccggcaggccgccgactggaaggcggggcagctggacgctcgtctgcacgagttgctgtgcttcctggagaagagcttgctccagaagaagctccaccacttcttcatcggcaaccgcaaggtgcctgaggccatgggactccctgaggccgtgctcagggccgagcccctcaacctcttccggcccttcgtcctgcagcgaagcctttaccgtaagacactggactccttctatgagatgctcaagaatgccccagcgctcattagcgagtattccctacatgtcccctcagaccagcctaccccaaaaagctgacgtcttttacagaatgtgggatcctcgagctaagatgagggcatccctcacgttcacacccctggtggcatctgccagccctgttctggggacaaggcgggctttcgtgggagccgtgctcagcctgccaggaagccaagccctacagtgcagaggaaacagaatttcaacgggaagctggtttgcttcataccattgggatctgctggtaaagctgttatttgggtttagggactgatcccttgcagtttacttctggatcaccatgaatggccaagatggtggcagaacacgctgtggaccctgagttagagacaatgcaaatgttggattgggtgtaattctttttgaatcccagatccagtctgtacttgaatatgagcagaggatctacaagaatgctgacagggaaccgtgttaagacccagcacccctattcccaggagcttctggcctgaccatctgcagccaaagcactaacagggacagatatgggaatgtccacctttgatccgcatcctgcacaatagtggtcccaccatggctgccacttttttatactatttggagaaaagaccttgtataaattcgaggcccgagtgactaacgtctctgtcacacggaaatgggtacttggtggcatagagaaacacaattagccactttttcagctacacttctcactcagctgcaccctacacttctcactcaggtgcacccccttctgctgtcctttccccaacgtactgggtcccgagcgtggtgggtatttgccacactgggtgccagctcagcagccccccacctctctttattctctccaaagctggtctttctgactatcattgtggtagggggaggacagatgctaaaggtggaagctgacctggagaaagagacacacggggtgactgtggcaaaggacagctggaaaagaaactctatcacttcttcattggcaaccacaaggcacctgaggccatggcactcccagaggctgtgcgcagagccaagcctctcaacctcttctggccctgcgtcctgcagcgaagtctctgctgtaagacagtagactccttcgatgaggtgctcaaaaatgctacccggggtggtggtgtctggcttgcagtctggcccagttcagagaaagttgcagagatcaggggccaaggatgtcatagccccaggttgtcctcagggtcccaatcctagggcagggtgtgcatggaagcaagaactatggaaacctagctccagtctgcaggctctgagcccctagttcctcactccagcggggctccctcactgcacagaacccaccccttctgtgtgggcactgctgaccacacagatgacccagacccaaagagcctggcagaagctctgtggttggagctgggctccgtctccaggtctggttcagggggatcaggaaggctcttttccacctgtggcttcactggccctttgagatttcctatctcaccgttacttcagttacccttgcagggggccagggagtcaagaatataccgtgttcctccagggtttaagccggccatgccttcccgagagcataaccaacttgacaggggtgcccagttaccccacaaactgaaggaaggagatccttcccccatccccaggagtgctctcaaccagcctcagaaagcttgagaagatggaccctttgcccaccagggttaattcctggtggggcagctcggctgtgatcagggcaaccaaacctataggaagccttccagtgtgagctggaattagactgaacatgtgcttgggcctgcctctccctagacgcagttgcggggcactccagggaatgaaccagctcaagtgtgtccctaacagcagcctggagctacccccaatccctcacagcctgaccctcctcattccatcagatgcatttgtagaatcggggcaattcttattttatggccatgcttccctttatctggtcgttgttgagaaccgtacaaaagtcagagccactgcggtccatttctgtcgggagtctgggaaaaaacggtt

SEQ ID NO: 23714 - DNA, 4484 bp, Homo sapiens
agtctcggtaacatcatcagtaaaatggggatgaccctcagggctgtggggagggttgacccagacgatgcacagaaggctctgagcaccgtgcctggtgcagactggaaacctggccagtgtgcgctcttcaggacagcagaggtcggttggaggtctgcattctctgccgacttgggccccaacttccccatcaggtcactgctccctcctctgaggtctggacaaaggacaaggctgtagggacctagactgtcctagacggggaggacatctatcctcagtggtctttccagcagtttgtttggagctgctcatcctgatcttttggctgactctggcagagggaaagtcagatttgaggcctgagctctaacaggcatccagagaggaaggaagggcccaccccgtgacatcagtgaaacggaagcaccctgcaggtgacatcactgttgctcagggcaacgcctccaccctaaggcggacggggaggtgaaaaatcggcctcaagtgtgagacgcatgttgaagggaagggacatagaaggtgtaacgttcacaggaaagctccaaccatggccatggggctcttccgcgtgtgtctggtggtggtgacggccatcatcaaccacccgctgctgttcccgcgggagaacgccacagtccccgagaacgaggaggagatcatccgcaagatgcaggcgcaccaggagaagctgcagctggagcagttgcgcctggaggaggaggtggctcggctggcggccgaaaaggaggcactggagcaggtggcggaggagggcaggcagcagaacgagacacgcgtggcctgggacctctggagcaccctctgcatgatcctcttcctgatgatcgaggtgtggcggcaggaccaccaggaggggccctcacctgagtgcctgggcggtgaggaggatgagctgcctgggctggggggcgcccccttgcagggcctcaccctgcccaacaaggccacgcttggccacttttatgagcgctgcatccggggggccacggccgatgcagcccgtacccgggagttcctggaaggcttcgtggatgacttgctggaagccctgaggagcctctgcaaccgggacaccgacatggaggtggaggacttcattggcgtggacagcatgtacgagaactggcaggtggacaggccactgctgtgccaccttttcgtgcccttcacaccccccgagccctaccgcttccacccagagctctggtgctccggccgctcagtgcccctggatcgccagggctacggccagatcaaggtggtccgcgccgatggggacacattgagctgcatctgcggcaagaccaagctcggggaagacatgctgtgtctcctgcacggcaggaacagcatggcgcctccctgcggcgacatggagaacctgctgtgtgccacagattccctgtacctggacacgatgcaggtcatgaagtggttccagacggccctcaccagagcctggaagggcatcgcccacaagtacgagttcgacctggcctttggccagctggacagcccggggtccctgaagatcaagttccgttcagggaagttcatgcccttcaacctgattcctgtgatccagtgtgatgactcggacctgtactttgtctcccaccttcccagggagccctctgagggcaccccagcctccagcacagactggctcctgtcctttgctgtctatgagcgacacttcctcaggacgacactaaaggcactgcccgagggcgcctgccacctcagctgcctgcagatagcatccttcctgctctccaagcagagccgcctgaccggtcccagcgggctcagcagctaccacctgaagacggccctactgcacctcctactcctccggcaggccgccgactggaaggcggggcagctggacgctcgtctgcacgagttgctgtgcttcctggagaagagcttgctccagaagaagctccaccacttcttcatcggcaaccgcaaggtgcctgaggccatgggactccctgaggccgtgctcagggccgagcccctcaacctcttccggcccttcgtcctgcagcgaagcctttaccgtaagacactggactccttctatgagatgctcaagaatgccccagcgctcattagcgagtattccctacatgtcccctcagaccagcctaccccaaaaagctgacgtcttttacagaatgtgggatcctcgagctaagatgagggcatccctcacgttcacacccctggtggcatctgccagccctgttctggggacaaggcgggctttcgtgggagccgtgctcagcctgccaggaagccaagccctacagtgcagaggaaacagaatttcaacgggaagctggtttgcttcataccattgggatctgctggtaaagctgttatttgggtttagggactgatcccttgcagtttacttctggatcaccatgaatggccaagatggtggcagaacacgctgtggaccctgagttagagacaatgcaaatgttggattgggtgtaattctttttgaatcccagatccagtctgtacttgaatatgagcagaggatctacaagaatgctgacagggaaccgtgttaagacccagcacccctattcccaggagcttctggcctgaccatctgcagccaaagcactaacagggacagatatgggaatgtccacctttgatccgcatcctgcacaatagtggtcccaccatggctgccacttttttatactatttggagaaaagaccttgtataaattcgaggcccgagtgactaacgtctctgtcacacggaaatgggtacttggtggcatagagaaacacaattagccactttttcagctacacttctcactcagctgcaccctacacttctcactcaggtgcacccccttctgctgtcctttccccaacgtactgggtcccgagcgtggtgggtatttgccacactgggtgccagctcagcagccccccacctctctttattctctccaaagctggtctttctgactatcattgtggtagggggaggacagatgctaaaggtggaagctgacctggagaaagagacacacggggtgactgtggcaaaggacagctggaaaagaaactctatcacttcttcattggcaaccacaaggcacctgaggccatggcactcccagaggctgtgcgcagagccaagcctctcaacctcttctggccctgcgtcctgcagcgaagtctctgctgtaagacagtagactccttcgatgaggtgctcaaaaatgctacccggggtggtggtgtctggcttgcagtctggcccagttcagagaaagttgcagagatcaggggccaaggatgtcatagccccaggttgtcctcagggtcccaatcctagggcagggtgtgcatggaagcaagaactatggaaacctagctccagtctgcaggctctgagcccctagttcctcactccagcggggctccctcactgcacagaacccaccccttctgtgtgggcactgctgaccacacagatgacccagacccaaagagcctggcagaagctctgtggttggagctgggctccgtctccaggtctggttcagggggatcaggaaggctcttttccacctgtggcttcactggccctttgagatttcctatctcaccgttacttcagttacccttgcagggggccagggagtcaagaatataccgtgttcctccagggtttaagccggccatgccttcccgagagcataaccaacttgacaggggtgcccagttaccccacaaactgaaggaaggagatccttcccccatccccaggagtgctctcaaccagcctcagaaagcttgagaagatggaccctttgcccaccagggttaattcctggtggggcagctcggctgtgatcagggcaaccaaacctataggaagccttccagtgtgagctggaattagactgaacatgtgcttgggcctgcctctccctagacgcagttgcggggcactccagggaatgaaccagctcaagtgtgtccctaacagcagcctggagctacccccaatccctcacagcctgaccctcctcattccatcagatgcatttgtagaatcggggcaaatttccttatttatttatggcccatgcctttccccctcttcatcctgatcccgttttgctttgaagagaccccagtaaccaaaaaacagcctccagaagccaaaaccatgcctggatctcccatagcttctcctttgcttccaggagaaagttcactgaaaaaaaaatatcttctggcttcttgtgtgtacagagacaacagaactcggtggggaaacgggaatcttttctgcaccaaagctgcttctaaagcagaaagcagtggggctcttggtgtttcatgctgccttatttatattaaaggaagaattaaatcttgca

SEQ ID NO: 23715 - DNA, 3794 bp, Homo sapiens
agtctcggtaacatcatcagtaaaatggggatgaccctcagggctgtggggagggttgacccagacgatgcacagaaggctctgagcaccgtgcctggtgcagactggaaacctggccagtgtgcgctcttcaggacagcagaggtcggttggaggtctgcattctctgccgacttgggccccaacttccccatcaggtcactgctccctcctctgaggtctggacaaaggacaaggctgtagggacctagactgtcctagacggggaggacatctatcctcagtggtctttccagcagtttgtttggagctgctcatcctgatcttttggctgactctggcagagggaaagtcagatttgaggcctgagctctaacaggcatccagagaggaaggaagggcccaccccgtgacatcagtgaaacggaagcaccctgcaggtgacatcactgttgctcagggcaacgcctccaccctaaggcggacggggaggtgaaaaatcggcctcaagtgtgagacgcatgttgaagggaagggacatagaaggtgtaacgttcacaggaaagctccaaccatggccatggggctcttccgcgtgtgtctggtggtggtgacggccatcatcaaccacccgctgctgttcccgcgggagaacgccacagtccccgagaacgaggaggagatcatccgcaagatgcaggcgcaccaggagaagctgcagctggagcagttgcgcctggaggaggaggtggctcggctggcggccgaaaaggaggcactggagcaggtggcggaggagggcaggcagcagaacgagacacgcgtggcctgggacctctggagcaccctctgcatgatcctcttcctgatgatcgaggtgtggcggcaggaccaccaggaggggccctcacctgagtgcctgggcggtgaggaggatgagctgcctgggctggggggcgcccccttgcagggcctcaccctgcccaacaaggccacgcttggccacttttatgagcgctgcatccggggggccacggccgatgcagcccgtacccgggagttcctggaaggcttcgtggatgacttgctggaagccctgaggagcctctgcaaccgggacaccgacatggaggtggaggacttcattggcgtggacagcatgtacgagaactggcaggtggacaggccactgctgtgccaccttttcgtgcccttcacaccccccgagccctaccgcttccacccagagctctggtgctccggccgctcagtgcccctggatcgccagggctacggccagatcaaggtggtccgcgccgatggggacacattgagctgcatctgcggcaagaccaagctcggggaagacatgctgtgtctcctgcacggcaggaacagcatggcgcctccctgcggcgacatggagaacctgctgtgtgccacagattccctgtacctggacacgatgcaggtcatgaagtggttccagacggccctcaccagagcctggaagggcatcgcccacaagtacgagttcgacctggcctttggccagctggacagcccggggtccctgaagatcaagttccgttcagggaagttcatgcccttcaacctgattcctgtgatccagtgtgatgactcggacctgtactttgtctcccaccttcccagggagccctctgagggcaccccagcctccagcacagactggctcctgtcctttgctgtctatgagcgacacttcctcaggacgacactaaaggcactgcccgagggcgcctgccacctcagctgcctgcagatagcatccttcctgctctccaagcagagccgcctgaccggtcccagcgggctcagcagctaccacctgaagacggccctactgcacctcctactcctccggcaggccgccgactggaaggcggggcagctggacgctcgtctgcacgagttgctgtgcttcctggagaagagcttgctccagaagaagctccaccacttcttcatcggcaaccgcaaggtgcctgaggccatgggactccctgaggccgtgctcagggccgagcccctcaacctcttccggcccttcgtcctgcagcgaagcctttaccgtaagacactggactccttctatgagatgctcaagaatgccccagcgctcattagcgagtattccctacatgtcccctcagaccagcctaccccaaaaagctgacgtcttttacagaatgtgggatcctcgagctaagatgagggcatccctcacgttcacacccctggtggcatctgccagccctgttctggggacaaggcgggctttcgtgggagccgtgctcagcctgccaggaagccaagccctacagtgcagaggaaacagaatttcaacgggaagctggtttgcttcataccattgggatctgctggtaaagctgttatttgggtttagggactgatcccttgcagtttacttctggatcaccatgaatggccaagatggtggcagaacacgctgtggaccctgagttagagacaatgcaaatgttggattgggtgtaattctttttgaatcccagatccagtctgtacttgaatatgagcagaggatctacaagaatgctgacagggaaccgtgttaagacccagcacccctattcccaggagcttctggcctgaccatctgcagccaaagcactaacagggacagatatgggaatgtccacctttgatccgcatcctgcacaatagtggtcccaccatggctgccacttttttatactatttggagaaaagaccttgtataaattcgaggcccgagtgactaacgtctctgtcacacggaaatgggtacttggtggcatagagaaacacaattagccactttttcagctacacttctcactcactgcttctaaagcagaaagcagtggggctcttggtgtttcatgctgccttatttatattaaaggaagaattaaatcttgcaaggagtagaaatggtcactgtttgtttttaacttcaggaaatctgtgaggctcccagggcagagttggggacaggggggtggatttcctattgacaaagcagaagctttcactccctttttattcttacactttcaggagactttaaaaaataacaaaacagaacatttctaccctgtctttgaggcaacttgtgtgctgcccgcagggctccagaaagggcctttgaaagctggctgtagggtggattccagcctaagaccttatttcacagagctaatgtcagcgagaaatataggagctggaactaacaggaagcttttgggttttaaagaaagagattgtattttaaatagaggattttgagtcctctagggcactttggcctttccactaaggacaaccctgccctctttccccagagtctctttcccaaggatgcttgactttccccagcaactgctcacttgctttgcaaaataacaagggtgaaatgaatagagttggcccctaggccaagaggctggttatgttggggaagggccttatatcctcaaaagctctagcccctctgcatgcctggctgaagcacagcccccgttgagaacctgggggtggagctctggttcatcatcaagggtgtcatccgaatcacccagacaacctggtccattgccccgaccccgccttgaacctacatggtgctcagaatccagtctggagtggtcaggctaggctcgatttttaaagatttcccccaagtgactgatgtacccctagctgaggaagagctcagctttctttcttaa

SEQ ID NO: 23716 - DNA, 1104 bp, Homo sapiens
aacgaaagcaaaaattgacaaatgggacatgattaaacagaattaccatttgactcagcaatcccattattggttatatacccaaaggaatctaaatcattctgtcataaagacatatatacacaaatgttcacggcagcactatacacaatcgcaaagtcagggaatcaaactaaatgtccatcagtggtagaaaggataaagaaaatgtggtggcagggagtggtggctcatgtctgtaatcccagcactttgggaggctgaggcgggtggttcacctgaggtcaggagtttgagaccagcctggccaacatggagaaactccgtctccgctaaaaatacgaaaattagccaggcgtggtggcgagcacctgtcatcccagctacttgggaggcctaggcgtgagaatcgcttgaacctggaaggtggtggttgcagtgagccgagatcctgccactgcactccagcctgggcaaccaagcgagactctgccttaaaaaaaaaaaaagaaaatgtggcacatatacaccatggaatactatgcagccataaaaaagaatgggatcatgtcctgtgcagcaacgtggatggagctggaagccattatcctaaatgaactcactcagaaacagaaaaccaaataccacatgttctcacttataagtagaagctaaacattgagtacacatggatacaaagaagggaaccgcagacactggggcctacctgaggtcggagcatggaaggagggtgaggatcaaaaaactacctatctggtactatgctttttatctggatgatgaaataatctgtacaacaaaccctggtgacatgcaatttacctatatagcaagcctacacatgtgcccctgaacctaaaaaaaaagttaaaagaaaaacgtttggattattttccctctttcgaacaaagacattggtttgcccaaggactacaaataaaccaacgggaaaaaagaaaggttccagttttgtctgaaaattctgattaagcctctgggccctacagcctggagaacctggagaatcctacacccacagaacccggctttgtccccaaagaataaaaacacctctctaaaaaa

SEQ ID NO: 23717 - DNA, 400 bp, Homo sapiens
gggagctctttcccctgtcccagggtatatatggctgacctagccaccgctgagttcaaacgctctatggctcccaatttccttgccttggccacactgaattgtcaactgattccaaaacatggccccacactcccaccccatctggagttacggggaatgcctgctctgggatcagagaccagggttcaaacctcagttctgccacttactagctatgtgaccttggacaagtgactttatctctgagcctccagttcctcatgtgtaaagcaatgcctgcccctagggttgtgccagtgttccatgagacagtgcactcatatgttagtaacaagctggcggttatcagccaataaacgctgcctcttgattaataaacgtgtatccctcaaaagcc

SEQ ID NO: 23718 - DNA, 404 bp, Homo sapiens
gaaattaaggaaaatttaatagtgcaagaggtattggtaatgtagtctatagacataaacatttcattcattttaataaatacatgactgtctcacagaaagaatgttacaaagtttgagatacacaggtaaataagagttgaatttccagtcctcatggaatttacaatctagcaggtaaataaatgggaaccacaaaacaatttttagcccgatgagtttttaatatagagaagaccacaatcctatgggaatacagagcagcaaaatttgcccttgtctcctcgaaaataaaccattaaactcattcaaaataatagtagctagtaaatattagagaagtatgccttgaagaagcaatagacataaaagctgtgagaagaaagaatgcagaacgtcttagc

SEQ ID NO: 23719 - DNA, 422 bp, Homo sapiens
ttttttttgagatggagtctcactctgtcacccaggctggagtgcagtggcatgatctcggctcactgcaagctccgcctcctgggttcacgccattctcctgcctcagcctccctagtagctgggactacaggcgcccgccaccacgccccgctaattttttgtatttttagtagagacgggtttcatcatgttagccaggatggtctcgatctcctgacttcgtgatccgcccacctcggtctcccgaaatgctgggattacaggcatgagcaaccatgcctggccagtcacagattcttaaaacaataaagataaaattaattgattcatgttatacgtagctgtaatcattttttcttaatagcaaagaaatgctactaaagagagcagagatttatataaaaatggaagatgtatac

SEQ ID NO: 23720 - DNA, 465 bp, Homo sapiens
tatacttttgattacatatttgggatgattagataagtggatgttttccaaaagcttttttctcttttattccctcatatgaggaatgaagaggcattaccattctggggtaggatggctgtctggttgaccaagtatataataggaaaaaggagagagaatagggaaaaactaacatttctggccgggtgcggtggttcacgcctgtaatcccaacactttgggaggccgaggcgggcagatcacgaggccaggagatcaagaccatcctggttaacacagtgaaaccccatctctactaaaaatacaaaaaaaaaattagctgggtgtggtgggggatgcctgtagtcccagctactcgggagggtgaggcaggagaatggcatgaactcgggaggcggagcttgcagtgagccgagattgcaacactgcactccagcctgggtgacagagtgagactccatc

SEQ ID NO: 23721 - DNA, 402 bp, Homo sapiens
ttttttttttatagagacagagtctcaattatgttgcccaggctagtctcaaactcctgggctcaaacgagcctcccactttggcactccaacatgttaggattacaggtgtgagccaccgcacccagcctctgtctgattcagtttcaagaagcagtggtcaagcaccaacttccaggccacagacaatctgtactcggattatgaggctcatcagtaatcgtgaggtgtatctgttactaaatctggctacccaggtggcagtacccaattgtgctctaataatgacaaaagaggaaaataacaatgtggtccttggagagatgggcgagcaagcacatgacatcaacatggcatcgagctccaacacaagcaaagggtgtgaggagacaaaggtccatc

SEQ ID NO: 23722 - DNA, 358 bp, Homo sapiens
ttaaaaacagttcctctgctcaatgatagatttcaggttaatcacatggaaatgttaaaatatacacaggaatcatatttgctatgtatttttcacaacctcaagtactttccttgtgcctagacatctgctctcccatattcagtactgtgttcctgggggaacagtttcttctgtagattcaggagaatctacagaagaaaccttagcaaaaacttttcaaacaaaatcccaatttgattaaagcagatttcatttcttaagaagtggttatgcatttgtaaaattaatcaactttctatagactattctaattttatgaaagaacacacctagtaatcacatgaagtaacaaaag

SEQ ID NO: 23723 - DNA, 2296 bp, Homo sapiens
gaatggaatgaaaagccttgtacaagaggcttcgtgccatgttcagcctgccccttagccttccactgtgtgaggacacagcattccttccttccaagtgctgcagctctcacaagacaatcaaacaagcccgcaccttgatcatgatcttcctagcctccggaacgcactttcagaccatgctgaagtctaaattgaatgtcttaacactgaaaaaggaacctctcccagcggtcatcttccatgagccggaggccattgagctgtgcacgaccacaccgctgatgaagacaaggactcacagtggctgcaagcactttcagaccatgctgaagtctaaattgaatgtcttaacactgaaaaaggaacctctcccagcggtcatcttccatgagccggaggccattgagctgtgcacgaccacaccgctgatgaagacaaggactcacagtggctgcaaggttacctacctgggcaaagtctccaccactggcatgcagtttttgtcaggctgcacagaaaagccagtcattgagctctggaagaagcacacgctagcccgagaggatgtctttccggccaatgccctcctggaaatccggccattccaagtttggctccatcatctcgaccacaaaggggaggccacagtgcacatggataccttccaggtggcccgcatcgcctactgcaccgccgaccacaacgtgagccccaacatcttcgcctgggtctacagggagatcaatgatgacctgtcctaccagatggactgccacgccgtggagtgcgagagcaagctcgaggccaagaaactggcccacgccatgatggaggccttcaggaagactttccacagtatgaagagcgacgggcggatccacagcaacagctcctccgaagaggtttcccaggaattggaatccgatgatggctgaatgaacttgagacgcttcagcaaaggcagcattggtcacggagttcaagggaatagatgagtaagcaacgtttcaaatttgggatgaaaagactgccaaactattggctgaccaaggtttttaaattcagaagagcaattctaaatctaaagaaatgtatcattaaagtaattacgttacattgaaacctgctgctgctgtgactgtgaggagggtgggagtgtggatggggaggaaggttctaggctctcttcttatttttctcatttcccaatgcctctctgtgggagagctccatgccagttttcaccacgctcaggcaaatactctgcagctgttattggatgggccattccgatctgccttatgaaattccacaagaatgttaggggcaccctctttccccttctaacatccttagagggatgaaatctcagcatatgttgcaggacaccaaaaggaagaaaacaatcaagcaaataaaataaacagtcaaacaaaccaggagtttaaaacaacaaccccaacaacagaagccttggcaaagaggaataagtgatcagcaagtgaacacactctatgtcaactctccttttatccagctgagatttatggtaacttatttaattaatggtcctgtctgatgcatccttgatggcaagcttcaaatctgatttggtatcaccgaggaaaccttgcccccatcactcagcattgcacttagatacagaatgagttagataaacttggcttgtctagagacccatgtcatcttaacctaaagggaaatcttattgcgttatcataaaattgatgatatcttagggtcagaattgccctttttttttattttgaatgggaagttctcactaaaacaatcctgagatttcttaatttcatggttctttaaatattataaacacagagtcaacatagaatgaaattgtatttgttaaaatacacacattggaggacaagagcagatgactacttttcgaagtaatgctgctccttcctaaaagtctgttttcaatcctggtaatattaggggcactgcggcacctaagaagccttaaatgagagctaatccaatctagagagcgatggtgtcagcatttcggtctgcatatctgtgtgtccgtatctgcgtttgtgtgcgtgtacgtgtgcccctgtgtgtgggcccagttttcaggcatgtagaataagcatggagtcatattgaggaggactcacttcttgaagatatgcttgttgctttacaacatatgtaagctattctttagcataaatgcattcattctttaataaaaatatgtttgcattaataaagctgaggagtttcatactttgtgtct

SEQ ID NO: 23724 - DNA, 582 bp, Homo sapiens
cctttctattacctgaagcttctgcttatggagttttgaagttctccaggatggtttttctatttctctgagcactgaagtggctaatgccatggcagatgtcatacctaatgctgcagaagcagagcataagcactttcagaccatgctgaagtctaaattgaatgtcttaacactgaaaaaggaacctctcccagcggtcatcttccatgagccggaggccattgagctgtgcacgaccacaccgctgatgaagacaaggactcacagtggctgcaaggtacatggtttcactgtgttgcccaggatggtctcaaactcatggcctcaagcaatactcagacttcagcctctgaaagtgctgggattataggcgtgaaccactgtgactggcctgtattttacttttaaattgccaagggtgatcaagtttatatcctgttaaacacctttaagccttttatgctatgtctattagcttgatttaaaaacttgaaatttcataaatggtattttaattatgatgatcataatgcgtcacttgctatagaaccaaataatatactatgtttacatttcatt

SEQ ID NO: 23725 - DNA, 2603 bp, Homo sapiens
cgccgcgcgctcgccgggcccgggcggagctgcgcagtcctctcgcagctgcgccaggacagccggcgcgcggccgtgcccacaagttgccggcagctgagcgccgcgcctcctcctgctcgcagccccctacgcccacccggcggcggtggccagcgccaggacgcacatcccgcggacaccgaccccagatgtaaagcgggaccccagcccctcgccccccggcgcgatcgacagtctcgccagcgtctcctctgccaaaacccagggctggaagatgtggcagccggccacggagcgcctgcagcactttcagaccatgctgaagtctaaattgaatgtcttaacactgaaaaaggaacctctcccagcggtcatcttccatgagccggaggccattgagctgtgcacgaccacaccgctgatgaagacaaggactcacagtggctgcaaggttacctacctgggcaaagtctccaccactggcatgcagtttttgtcaggctgcacagaaaagccagtcattgagctctggaagaagcacacgctagcccgagaggatgtctttccggccaatgccctcctggaaatccggccattccaagtttggctccatcatctcgaccacaaaggggaggccacagtgcacatggataccttccaggtggcccgcatcgcctactgcaccgccgaccacaacgtgagccccaacatcttcgcctgggtctacagggagatcaatgatgacctgtcctaccagatggactgccacgccgtggagtgcgagagcaagctcgaggccaagaaactggcccacgccatgatggaggccttcaggaagactttccacagtatgaagagcgacgggcggatccacagcaacagctcctccgaagaggtttcccaggaattggaatccgatgatggctgaatgaacttgagacgcttcagcaaaggcagcattggtcacggagttcaagggaatagatgagtaagcaacgtttcaaatttgggatgaaaagactgccaaactattggctgaccaaggtttttaaattcagaagagcaattctaaatctaaagaaatgtatcattaaagtaattacgttacattgaaacctgctgctgctgtgactgtgaggagggtgggagtgtggatggggaggaaggttctaggctctcttcttatttttctcatttcccaatgcctctctgtgggagagctccatgccagttttcaccacgctcaggcaaatactctgcagctgttattggatgggccattccgatctgccttatgaaattccacaagaatgttaggggcacctatgggatctctagtggggtgggcagggtgctgatggggacgctggccgcagggaggaaggaacatctcgggagggccctctgttcctctcccacggcagatgccctcctctgtatgcaaatcagcacagcctttattgagctttacaactaacaacctgatagttggcagttaattcacagttacagataatgcttttatttacataaatataccaagtagtaccctcttattgtattcacttcatctattttcttagaatacttgcaattactaatgaccccttccctttccctcctgctgccctgtccaccctctttccccttctaacatccttagagggatgaaatctcagcatatgttgcaggacaccaaaaggaagaaaacaatcaagcaaataaaataaacagtcaaacaaaccaggagtttaaaacaacaaccccaacaacagaagccttggcaaagaggaataagtgatcagcaagtgaacacactctatgtcaactctccttttatccagctgagatttatggtaacttatttaattaatggtcctgtctgatgcatccttgatggcaagcttcaaatctgatttggtatcaccgaggaaaccttgcccccatcactcagcattgcacttagatacagaatgagttagataaacttggcttgtctagagacccatgtcatcttaacctaaagggaaatcttattgcgttatcataaaattgatgatatcttagggtcagaattgccctttttttttattttgaatgggaagttctcactaaaacaatcctgagatttcttaatttcatggttctttaaatattataaacacagagtcaacatagaatgaaattgtatttgttaaaatacacacattggaggacaagagcagatgactacttttcgaagtaatgctgctccttcctaaaagtctgttttcaatcctggtaatattaggggcactgcggcacctaagaagccttaaatgagagctaatccaatctagagagcgatggtgtcagcatttcggtctgcatatctgtgtgtccgtatctgcgtttgtgtgcgtgtacgtgtgcccctgtgtgtgggcccagttttcaggcatgtagaataagcatggagtcatattgaggaggactcacttcttgaagatatgcttgttgctttacaacatatgtaagctattctttagcataaatgcattcattctttaataaaaatatgtttgcattaataaagctgaggagtttcatactttgtgtct

SEQ ID NO: 23726 - DNA, 2463 bp, Homo sapiens
gaatggaatgaaaagccttgtacaagaggcttcgtgccatgttcagcctgccccttagccttccactgtgtgaggacacagcattccttccttccaagtgctgcagctctcacaagacaatcaaacaagcccgcaccttgatcatgatcttcctagcctccggaacgcactttcagaccatgctgaagtctaaattgaatgtcttaacactgaaaaaggaacctctcccagcggtcatcttccatgagccggaggccattgagctgtgcacgaccacaccgctgatgaagacaaggactcacagtggctgcaaggttacctacctgggcaaagtctccaccactggcatgcagtttttgtcaggctgcacagaaaagccagtcattgagctctggaagaagcacacgctagcccgagaggatgtctttccggccaatgccctcctggaaatccggccattccaagtttggctccatcatctcgaccacaaaggggaggccacagtgcacatggataccttccaggtggcccgcatcgcctactgcaccgccgaccacaacgtgagccccaacatcttcgcctgggtctacagggagatcaatgatgacctgtcctaccagatggactgccacgccgtggagtgcgagagcaagctcgaggccaagaaactggcccacgccatgatggaggccttcaggaagactttccacagtatgaagagcgacgggcggatccacagcaacagctcctccgaagaggtttcccaggaattggaatccgatgatggctgaatgaacttgagacgcttcagcaaaggcagcattggtcacggagttcaagggaatagatgagtaagcaacgtttcaaatttgggatgaaaagactgccaaactattggctgaccaaggtttttaaattcagaagagcaattctaaatctaaagaaatgtatcattaaagtaattacgttacattgaaacctgctgctgctgtgactgtgaggagggtgggagtgtggatggggaggaaggttctaggctctcttcttatttttctcatttcccaatgcctctctgtgggagagctccatgccagttttcaccacgctcaggcaaatactctgcagctgttattggatgggccattccgatctgccttatgaaattccacaagaatgttaggggcacctatgggatctctagtggggtgggcagggtgctgatggggacgctggccgcagggaggaaggaacatctcgggagggccctctgttcctctcccacggcagatgccctcctctgtatgcaaatcagcacagcctttattgagctttacaactaacaacctgatagttggcagttaattcacagttacagataatgcttttatttacataaatataccaagtagtaccctcttattgtattcacttcatctattttcttagaatacttgcaattactaatgaccccttccctttccctcctgctgccctgtccaccctctttccccttctaacatccttagagggatgaaatctcagcatatgttgcaggacaccaaaaggaagaaaacaatcaagcaaataaaataaacagtcaaacaaaccaggagtttaaaacaacaaccccaacaacagaagccttggcaaagaggaataagtgatcagcaagtgaacacactctatgtcaactctccttttatccagctgagatttatggtaacttatttaattaatggtcctgtctgatgcatccttgatggcaagcttcaaatctgatttggtatcaccgaggaaaccttgcccccatcactcagcattgcacttagatacagaatgagttagataaacttggcttgtctagagacccatgtcatcttaacctaaagggaaatcttattgcgttatcataaaattgatgatatcttagggtcagaattgccctttttttttattttgaatgggaagttctcactaaaacaatcctgagatttcttaatttcatggttctttaaatattataaacacagagtcaacatagaatgaaattgtatttgttaaaatacacacattggaggacaagagcagatgactacttttcgaagtaatgctgctccttcctaaaagtctgttttcaatcctggtaatattaggggcactgcggcacctaagaagccttaaatgagagctaatccaatctagagagcgatggtgtcagcatttcggtctgcatatctgtgtgtccgtatctgcgtttgtgtgcgtgtacgtgtgcccctgtgtgtgggcccagttttcaggcatgtagaataagcatggagtcatattgaggaggactcacttcttgaagatatgcttgttgctttacaacatatgtaagctattctttagcataaatgcattcattctttaataaaaatatgtttgcattaataaagctgaggagtttcatactttgtgtct

SEQ ID NO: 23727 - DNA, 1115 bp, Homo sapiens
cgccgcgcgctcgccgggcccgggcggagctgcgcagtcctctcgcagctgcgccaggacagccggcgcgcggccgtgcccacaagttgccggcagctgagcgccgcgcctcctcctgctcgcagccccctacgcccacccggcggcggtggccagcgccaggacgcacatcccgcggacaccgaccccagatgtaaagcgggaccccagcccctcgccccccggcgcgatcgacagtctcgccagcgtctcctctgccaaaacccagggctggaagatgtggcagccggccacggagcgcctgcagcactttcagaccatgctgaagtctaaattgaatgtcttaacactgaaaaaggaacctctcccagcggtcatcttccatgagccggaggccattgagctgtgcacgaccacaccgctgatgaagacaaggactcacagtggctgcaaggttacctacctgggcaaagtctccaccactggcatgcagtttttgtcaggctgcacagaaaagccagtcattgagctctggaagaagcacacgctagcccgagaggatgtctttccggccaatgccctcctggaaatccggccattccaagtttggctccatcatctcgaccacaaaggggaggccacagtgcacatggataccttccaggtggcccgcatcgcctactgcaccgccgaccacaacgtgagccccaacatcttcgcctgggtctacagggagatcaatgatgacctgtcctaccagatggactgccacgccgtggagtgcgagagcaagctcgaggccaagaaactggcccacgccatgatggaggccttcaggaagactttccacagtatgaagagcgacgggcggatccacagcaacagctcctccgaagaggtttcccaggaattggaatccgatgatggctgaatgaacttgagacgcttcagcaaaggcagcattggtcacggagttcaagggaatagatgagtaagcaacgtttcaaatttgggatgaaaagactgccaaactattggctgaccaaggtttttaaattcagaagagcaattctaaatctaaagaaatgtatcattaaagtaattacgttacattg

SEQ ID NO: 23728 - DNA, 408 bp, Homo sapiens
tcatctgttctccttctacagtgtctagacttttcccaaaataacccctataacatcctcttccaaacatcttatgtagctgaatctgcatggattccattgccacaatttcatctgtatacagtacgttggaagagcttctcagaacataatgtcctgggtgaggtgactttaccactaagtcatgtttctgtggactctgcttaggaattgactgtctccacagtttcatctgagtgacgtcctgacaggacacagttccccctcctctgttttactaaatatctcttggcctcccctaatagaacagagtcaataaaacaagttgctactgggtttaatgtacaattgcaggacataaaagtccaagtgattaaactacatgtggcttatttttctgcttttcag

SEQ ID NO: 23729 - DNA, 422 bp, Homo sapiens
ccacaacgtgagccccaacatcttcgcctgggtctacagggagatcaatgatgacctgtcctaccagatggactgccacgccgtggagtgcgagagcaagctcgaggccaagaaactggcccacgccatgatggaggccttcaggaagactttccacagtatgaagagcgacgggcggatccacagcaacagctcctccgaagaggtttcccaggaattggaatccgatgatggctgaatgaacttgagacgcttcagcaaaggcagcattggtcacggagttcaagggaatagatgagtaagcaacgtttcaaatttgggatgaaaagactgccaaactattggctgaccaaggtttttaaattcagaagagcaattctaaatctaaagaaatgtatcattaaagtaattacgttacattg

SEQ ID NO: 23730 - DNA, 309 bp, Homo sapiens
cccagaagagcctgggttttgtgttattgacaattggaagcatcataatttatatttgtgatctccctattataagcctcttaaaattttttaataaaagaaaaagcaaaacattttttccaggtattaaatttatataataatttcttagcccttgaggttaattgtacccaaatactatagctgctatataagggaatggtgtttgtcaaatgggaagcatcaacaaaatttatgtttcagtgtctatacctataattcatgccactcattcacttgttgcactctcaactaaacaaaacctattca

SEQ ID NO: 23731 - DNA, 1793 bp, Homo sapiens
aacaccctcctggaggatgctggtgagaggcagggaccaggggtccggctcccggctcgggcctatcgttaggcgctgggcccccaggccctctcctttgcagagtctcgctgcctccctcgacgcagagccttcaagcgccgcagtccccgacggcttccccgcgggccccactgtctccccaagacgcctggcgaggccgccggggctggaggaggcgctgagcgcgctggggctgcagggagaacgcgagtacgccggggacatcttcgccgaagtcatggagtacctgggtctggctggtgacacactttatctggcggttcacctgcttgattcctacctgagcgctggccgcgtgcgtctacatcgcctgcagctgctgggcgtggcttgcctgtttgtggcgtgcaaaatggaagagtgcgtgcttcccgaggaaactgaggtccggaacttggggcctttccagggcagggagtaaagagcccggatccaagactccttcacctccccccgcatcccccatctgcagcccgccttcctctgcctcctgagcgcggactccttctcacgggcggagctgctgcgcgccgagcgtcgcatcctgagccgcctggatttccggctgcaccaccccggcccgctgctgtgcctcgggctgctggccgcgctggcagggagcagcccccaggtgatgttacttgccacctacttcctggagctgtctttgctggaggccgaggcggcgggatgggagccgggtcgtcgtgcggctgcggctctgagcctggcgcaccgcttgctcgacggggcgggctccaggctccagccagaactttacaggtgtagtcttggcggaggaagtgtatggggtcaccgcagcttcagggacttaccttcctggtcatttttacggtctcggagaatgagagacaattattgaggaggaggtggcacctagacttgatttttctgggtgtgggagagaatggggtgggaggacccccattagtccagatctggggtctcttaaccttgccccagagtggaagatagtctcccaggcccagaagatgctcctattgccttccagggctgagaacgaaggatcacccaggcctcgagtcctccatctctgtatctggtggtggatggggtgttcctttagctgctagggccgctaaccatgctaccaggtggcagggcgaaccatggtttccctcagcctgtgcacccagcatagagaggatggctgcccatcctcagctcccctccttgcttcctcgagtgttctgactccgcactagccgcgccctgtaggaagaatagggtgtccacctctccccggtgctcgcctagtcactccagttgaagacgggacgcgtgcccgatctcaagagagcccccgacccgtccgtggggaaccacatcgacgcttcttctcagcctccagtctccagttccaaggatgggtcatctccaaccccttgccctgcctcagtttctccatctccctgctgcagccccgaggaactgggcaccctcgagccgtgcatggcccgcgctgcgctccgaggtcccgcgccgggtcgcgccgcagtcttcctcaagtatgcgcggccccagcgccaggggaccagccttgccgccgcctgcctgctccgccgcctccagtctgagcctccctgagtactgggactcagtcacaaaaaaatcaacaacaaaaaacaaaaccctcccagtgtgtgtccgtctctcatctcaataaaagaatttattttattctgaac

SEQ ID NO: 23732 - DNA, 1516 bp, Homo sapiens
tttttaaaataaattcttttattgagatgagagacggacacacactgggagggttttgttttttgttgttgatttttttgtgactgagtcccagtactcatggagtacctgggtctggctggtgacacactttatctggcggttcacctgcttgattcctacctgagcgctggccgcgtgcgtctacatcgcctgcagctgctgggcgtggcttgcctgtttgtggcgtgcaaaatggaagagtgcgtgcttcccgagcccgccttcctctgcctcctgagcgcggactccttctcacgggcggagctgctgcgcgccgagcgtcgcatcctgagccgcctggatttccggctgcaccaccccggcccgctgctgtgcctcgggctgctggccgcgctggcagggagcagcccccaggtgatgttacttgccacctacttcctggagctgtctttgctggaggccgaggcggcgggatgggagccgggtcgtcgtgcggctgcggctctgagcctggcgcaccgcttgctcgacggggcgggctccaggctccagccagaactttacaggtgtagtcttggcggaggaagtgtatggggtcaccgcagcttcagggacttaccttcctggtcatttttacggtctcggagaatgagagacaattattgaggaggaggtggcacctagacttgatttttctgggtgtgggagagaatggggtgggaggacccccattagtccagatctggggtctcttaaccttgccccagagtggaagatagtctcccaggcccagaagatgctcctattgccttccagggctgagaacgaaggatcacccaggcctcgagtcctccatctctgtatctggtggtggatggggtgttcctttagctgctagggccgctaaccatgctaccaggtggcagggcgaaccatggtttccctcagcctgtgcacccagcatagagaggatggctgcccatcctcagctcccctccttgcttcctcgagtgttctgactccgcactagccgcgccctgtaggaagaatagggtgtccacctctccccggtgctcgcctagtcactccagttgaagacgggacgcgtgcccgatctcaagagagcccccgacccgtccgtggggaaccacatcgacgcttcttctcagcctccagtctccagttccaaggatgggtcatctccaaccccttgccctgcctcagtttctccatctccctgctgcagccccgaggaactgggcaccctcgagccgtgcatggcccgcgctgcgctccgaggtcccgcgccgggtcgcgccgcagtcttcctcaagtatgcgcggccccagcgccaggggaccagccttgccgccgcctgcctgctccgccgcctccagtctgagcctccctgagtactgggactcagtcacaaaaaaatcaacaacaaaaaacaaaaccctcccagtgtgtgtccgtctctcatctcaataaaagaatttattttattctgaac

SEQ ID NO: 23733 - DNA, 1579 bp, Homo sapiens
gcatccagggctggagctcaggagaaaggcagaggcacaggtgtggagagtgaagcgtccctgccccaaccccaggtgtgccgcgtgctgcccctgagagccctgccccgcgctgtgaccccggagatgcgcgccctggtggtagactggctggtccaggtgcacgagtacctgggtctggctggtgacacactttatctggcggttcacctgcttgattcctacctgagcgctggccgcgtgcgtctacatcgcctgcagctgctgggcgtggcttgcctgtttgtggcgtgcaaaatggaagagtgcgtgcttcccgagcccgccttcctctgcctcctgagcgcggactccttctcacgggcggagctgctgcgcgccgagcgtcgcatcctgagccgcctggatttccggctgcaccaccccggcccgctgctgtgcctcgggctgctggccgcgctggcagggagcagcccccaggtgatgttacttgccacctacttcctggagctgtctttgctggaggccgaggcggcgggatgggagccgggtcgtcgtgcggctgcggctctgagcctggcgcaccgcttgctcgacggggcgggctccaggctccagccagaactttacaggtgtagtcttggcggaggaagtgtatggggtcaccgcagcttcagggacttaccttcctggtcatttttacggtctcggagaatgagagacaattattgaggaggaggtggcacctagacttgatttttctgggtgtgggagagaatggggtgggaggacccccattagtccagatctggggtctcttaaccttgccccagagtggaagatagtctcccaggcccagaagatgctcctattgccttccagggctgagaacgaaggatcacccaggcctcgagtcctccatctctgtatctggtggtggatggggtgttcctttagctgctagggccgctaaccatgctaccaggtggcagggcgaaccatggtttccctcagcctgtgcacccagcatagagaggatggctgcccatcctcagctcccctccttgcttcctcgagtgttctgactccgcactagccgcgccctgtaggaagaatagggtgtccacctctccccggtgctcgcctagtcactccagttgaagacgggacgcgtgcccgatctcaagagagcccccgacccgtccgtggggaaccacatcgacgcttcttctcagcctccagtctccagttccaaggatgggtcatctccaaccccttgccctgcctcagtttctccatctccctgctgcagccccgaggaactgggcaccctcgagccgtgcatggcccgcgctgcgctccgaggtcccgcgccgggtcgcgccgcagtcttcctcaagtatgcgcggccccagcgccaggggaccagccttgccgccgcctgcctgctccgccgcctccagtctgagcctccctgagtactgggactcagtcacaaaaaaatcaacaacaaaaaacaaaaccctcccagtgtgtgtccgtctctcatctcaataaaagaatttattttattctgaac

SEQ ID NO: 23734 - DNA, 836 bp, Homo sapiens
tttttaaaataaattcttttattgagatgagagacggacacacactgggagggttttgttttttgttgttgatttttttgtgactgagtcccagtactcatggagtacctgggtctggctggtgacacactttatctggcggttcacctgcttgattcctacctgagcgctggccgcgtgcgtctacatcgcctgcagctgctgggcgtggcttgcctgtttgtggcgtgcaaaatggaagagtgcgtgcttcccgagcccgccttcctctgcctcctgagcgcggactccttctcacgggcggagctgctgcgcgccgagcgtcgcatcctgagccgcctggatttccggctgcaccaccccggcccgctgctgtgcctcgggctgctggccgcgctggcagggagcagcccccaggtgatgttacttgccacctacttcctggagctgtctttgctggaggccgaggcggcgggatgggagccgggtcgtcgtgcggctgcggctctgagcctggcgcaccgcttgctcgacggggcgggctccaggctccagccagaactttacagccccgaggaactgggcaccctcgagccgtgcatggcccgcgctgcgctccgaggtcccgcgccgggtcgcgccgcagtcttcctcaagtatgcgcggccccagcgccaggggaccagccttgccgccgcctgcctgctccgccgcctccagtctgagcctccctgagtactgggactcagtcacaaaaaaatcaacaacaaaaaacaaaaccctcccagtgtgtgtccgtctctcatctcaataaaagaatttattttattctgaac

SEQ ID NO: 23735 - DNA, 398 bp, Homo sapiens
agactcagataacaaggggtagctgcatttactctgtgacagatattggcagaaatcctggaaataggtgaatgatgaagacaaaattgctgctccacagaacagttaggaaaaaaatggcaaataaatatttaaaatatggtgagataagttttctaatggagacatgtaaaaggagctctaagaacacagcaagggatgggcctaacccttccttctatacagaggagaccttctcaggatcccggtgatagctcatagcaactgactggctgtctgcgccaggcactgttgcaagcatattacacatatttattcatttactcttacaacaaccccatgagacaggtacttttattatcattctcattttaaagataagaaaactgaggagtata

SEQ ID NO: 23736 - DNA, 567 bp, Homo sapiens
ccactgcacccggcctagtacacagtttttaactttgataaacattgccaaattcctctccaggaaggctgtattaatttgtattccctctgagaaagtataagactaaattaccccctctcttgcctaattggctatcatcattttttgtattttctgggagtaagttcttagaaagttttgtaagggacacttacattaaaccaggacatctccctggtaacaataaaagcatggagaaaggaccagggaaggagaaaacaggtataaagttcccagagaccccactaggttttctacctgtgcgatcctagattaaaaccacttgttttgatttcaggaaattagggacaaaataaaaatctcagcctgaactggaccttgtagaaattatccctgcttgagcaataagcactctaaattcagtctgtttagaaagattcctgcccgttagccaggtgtggtagcacaggcctcaagtccaagctgctcaggaggctgaggaaggaggatgccttgagcccaggagtttggggcttcaggcaacaacagcaagagcccatctct

SEQ ID NO: 23737 - DNA, 401 bp, Homo sapiens
tttttttgagacggagtctcactctgtcccccaggctggagtgcactggcgtgatcttggctcactgcaagctccccctccctggtttacgccattctcctgcctcagtctcctgagtagctgggactacaggtgcccaccaccacgcccggctaattttttatatttttagtacagatggggtttcaccatgttagacaggatggtctcgatctcctcccctcgtgatccgcccgcctcagccttccaaagtgctgggattacagacatgagccatcgcgctaaatacttttataatattagagtagagaaggattttctaagcaagacataaaacatcaaaatcacaaaagattgatatagttaactaaatgaagatttctaaatatcggtatgatttt

SEQ ID NO: 23738 - DNA, 320 bp, Homo sapiens
tattttttttagtagagacggggtttcaccatgttagccaggatggtctcgatctcctgacctcgtgatccgcccacctcggcctcccaaagtgctgggattacaggcgtgagccaccatgcccagcctgtgaattcttatgatgccacttttttggagagttttgatagactttattgtaccctcaagatgggtatcatggggagaggagcatagattatggcttagctcctgccactacctctttcctcttctcctccctcttccattctatatgcaattttttaaagcacaagctctttgccagagccatgtcgaac

SEQ ID NO: 23739 - DNA, 263 bp, Homo sapiens
tctggggacattgggaggaacagaggtagcttagtgactctactgtccctaccacccaacctgctattagccctgctggtccgctcgtgtttgaggtcatgagtcagtctacttaataaaatcatcagctggagcttacaaagcaatagtgcttaatagatacaagcatgctaatatattttttaagtgaatgctgatctttctgagctgtgtgtctaaaatcatcattgtgaataaaagaattgtaatttccaacccataca

SEQ ID NO: 23740 - DNA, 457 bp, Homo sapiens
ccccaccatgcttcagctcaccctccttgggctgtacccactgtccaaccagccctgatgagatagatgtaccaggttcctcagttggaaatgaagaaatcacctgccttctgcatcgatctccctgggagctgccgaccagagctgttcctattcagtcatcttgccagcaaccccagtatcttatttttgatgtttagattgttattttcaaaaatattttatacttagttttgataaacatcgttatagttaaatatttgtgatttttcaaggtgattttcttaggcgaaatctcagaagtaaaatttctgtgtttaaaaaagaatgggcacttttaagcttttgattcatattttaaaattacctctcaggaagagttactaatttacattcccactggtagtatatgagaatacttatttttccatgcacttatctatactgaatattattt

SEQ ID NO: 23741 - DNA, 307 bp, Homo sapiens
accaaaaaaaaaaaaaaaaaaaaaaaacacctcaaactaagcagaaggcagtaatggaaggattgagaaacaaaaaaaaagaaacatttctaaaaataataaaatggtagtagtcttttcttatcagtaataattttaaatgtaaattgcttaaattatccaattaaatagcagagattggcagaatggataccaatagcaacaaaaccccaacaaaacaaagcttatggttcatctatatgctatctagaagagactccttcagatccaaagacacacataggctgaaagtgaaagaacagaaaaa

SEQ ID NO: 23742 - DNA, 635 bp, Homo sapiens
gataacctggagatccagtgtcccgcggagccccggagggggagctgggcagggatgagagcagagagcagtcagagccccccagacaccccaccacgaggatgccccctggaagctccgcaaactgtacccacatttccagggctttcattatgtccacagcccagtgcctggcatgaggggaagcccaaggatggcagggagctccactcctgggtgatcgaggactgctgccagctagaaaatgaggcgcacagcctccctagggacaagccagctgaagccaggcagccttcctcctgtgtgtattttggcacagggacgcctggtgctcgtgcctcttcctgtaactcctacctgcagccaactccattttatctcaaacttactgggcatcctagcctaacgggttctgcctgagtggggcagaggtgatggggtgggaacacccagaagcagtctaaggcatagctgtgcccaccaaggagctcatgagggactacgtgggggacagaaaagacccctggcgaacttccaccaggctctttatctcctgagtgtcaacacctacatcaccaagaccaggtgtccaccttaccagtatggagaaggcactcataatgggcaaagctggg

SEQ ID NO: 23743 - DNA, 139 bp, Homo sapiens
caccttccctccaccacccctgctcccaaacacacattcactctgctctctccctgcattgcttttacagcctgcaggtgtttggtggaagataaaagtggttcctggggtgagatttcacctcctagaattatcaaag

SEQ ID NO: 23744 - DNA, 171 bp, Homo sapiens
ctatgctatgatagggttgtacttataactccctataaaaaatgtattctattcttgttgaaacgaaaaagataatctgaatttgttctttggtaccaagtcttcatactcctaagttgttattgaaaactaaaaatcagccaggcacggtggctcacgcctgtaatccca

SEQ ID NO: 23745 - DNA, 414 bp, Homo sapiens
taatgtcagatgactagtaaatcaatttgttagaatacattgttttctgtccatatcttctgcgagtcactcgcccagcagccaggcttctcaagaacggaaggactgctgacgttcacaggtggctaccgggtgggacgctgtgcctgggttatctgatttcttccttcctgccacctcgggaggtagggagagccttctggcaggccaggggcagggacgggttctgagccaaggccttcctgctttcagggcccaccctcttcgtgccatgctgacttacacagttacgttttaatctaatcgctaattttaataaaccttctaaattacctctgcacagattaaaaatacctatgccggtgaagttttgattagagtgattagatattgagggcacagttctaagcactt

SEQ ID NO: 23746 - DNA, 2705 bp, Homo sapiens
aaatgctcggtgctttaaatttgcaattaccatatttgcagaaacttgaaaaatcatcccaattaaatgacaaaatgtataggaggattatctttcttttgcccttacaactcaaattatattcgaagtaacatttttacagcagtcaaaacttttaaccaaaactcacacctgcagtctcataagtttaacaaaatggccacattccacgctttattttcttaacaaccctgactgtttaaatgactcccattgaaccaacagcttacagttgctgggcaataaaaaagcgagcaaaaggacctccagccctgctgttttagctattacccagcactctcagagtttgctctagtctggctgttcaatcaaattcattttccagtagcttctggcctttgtctcctctttctggccacgcatttcattgcctcctgaatttgatgacaacattttctttcttcactttgaatcttggcccagaatctcactctcccagccccatggaaagatggggaaaagatttcattctgctgatcaaatttgttagaagacattctttagagtctgaaaaaatatatttcattagcagttctctaggtagtggaatttttagtgatgtttactcttttttccttgttctaattttcctctaataaacagaaaaaaagcaagagtaacccaccaaatttggataaagggcttctgcttttcatattctcttcaaccagaacagcttaacttttctccatttatttatttaagtatttattcatatttgaaacaggctggggtgcagtggcatgatctcagctcactgcaacctccacctctcgggtacaagtgattctcctgccttggcctcccaaagtgctgggattataggcgtgagccaccgcacctggccttaatttgatttttattatccacaacactcatatctctttttgatcctactgtaatatcacattatcctacctaaagatgaattgttccaaccctgatgctttggtaatcatcttttctaaattaaaaattgaggccaggtgcagtggctcaggcctgtaatcccaacactttgggaggacgaggcaggtggatcgcttgagatcaggagtgagagaccagcttggccaacatggtgaaaccccatctctactaaaaatgcagaaaaattagctgggcatggtggtgcatgcctgtaatcctagctacttgggaagctgaggcacgagaatctcttgaacccgggaaggagagattgcagtgagccaagatcatgccactgcactccagcctgggtgacagaacgagaccctgtctcaaaaaaagaaaaaaaaaaaagagagagagagatttgtaatctagcaaaatatgttatttacttattttctttccaacttttagtgtgggcccaagcgggtacctgtgcaggtttgtttcacgagtaaattgtgtgtcatgggggtttgttttacagatgattttgttactgagataatcagcataatatgtgatatgtagttttttaatccttaccctcctcttatctccaccctcaggtaggccccagtgtctgttgttcccttctttgtgtccatgtgtactcaatgtttagctcccacttataagtgagaatatgcagtatttggttttctgttcctgcattaatttatttagagatcttttatttaaatacatgaattcattttcaggaaaagccttccagagatataaaagtcaaaatccaataaaagaatgacctttgttatggaaaaacaaagaaagaaagaaatcaggtcttttttggaaaatctgggacattgaattgttacacgtaacatgtgtccccctagggacataggtcactttcagtatttgccaaagcattaggtcagccagacatgtgaaacatctcggagcttaataactgagctgcttcaatgtgttttgataaaagtttaaattctctggccccaatttattgaacacatgcctttgacaatacagcatttctttcttaggctattagtgaaagattaaccatctactcagtgattgttattgtgcctgtatgtgtgcagtatgaacagttatgtaacaaaacttcaaagattagagacctttaaaaggatctggggaaataggaagagtctataatcttataggaaaggaatgaattatgcaagcaactaaaagtgtgtcaatattctctgcttcacaaacaaattggaaaccagtggtaaactttagatcagaaacagaaactcaaaaaatgaaagaactggccatgagcagtggctcaggcctgtaatcccagcactttgggaggtcgaggcaggcggatcacctgaggtcgggagtttgagaccagcctgaccaacatggagaaaccctatctttactaaaaatacaaaaaattagacaggcatgatggcagatgcctgtaatcccagctacttgggaggctgaggcaggagaatcacatgaacccaggaggtggaggttgtggtgagcctatgttgcgccattgcacttcagcctgggcaacaagagcaaaactctgtctcaaaaaaagaaaaaagaaaaagaaaagaagaaaaagaaagaacctagaaacttagaggtcaactaaggagacaggcatttttataaaaagagttgaaagaaatttgtggtagaataacagaaaatacagacaagtt

SEQ ID NO: 23747 - DNA, 2486 bp, Homo sapiens
aaatgctcggtgctttaaatttgcaattaccatatttgcagaaacttgaaaaatcatcccaattaaatgacaaaatgtataggaggattatctttcttttgcccttacaactcaaattatattcgaagtaacatttttacagcagtcaaaacttttaaccaaaactcacacctgcagtctcataagtttaacaaaatggccacattccacgctttattttcttaacaaccctgactgtttaaatgactcccattgaaccaacagcttacagttgctgggcaataaaaaagcgagcaaaaggacctccagccctgctgttttagctattacccagcactctcagagtttgctctagtctggctgttcaatcaaattcattttccagtagcttctggcctttgtctcctctttctggccacgcatttcattgcctcctgaatttgatgacaacattttctttcttcactttgaatcttggcccagaatctcactctcccagccccatggaaagatggggaaaagatttcattctgctgatcaaatttgttagaagacattctttagagtctgaaaaaatatatttcattagcagttctctaggtagtggaatttttagtgatgtttactcttttttccttgttctaattttcctctaataaacagaaaaaaagcaagagtaacccaccaaatttggataaagggcttctgcttttcatattctcttcaaccagaacagcttaacttttctccatttatttatttaagtatttattcatatttgaaacaggctggggtgcagtggcatgatctcagctcactgcaacctccacctctcgggtacaagtgattctcctgccttggcctcccaaagtgctgggattataggcgtgagccaccgcacctggccttaatttgatttttattatccacaacactcatatctctttttgatcctactgtaatatcacattatcctacctaaagatgaattgttccaaccctgatgctttggtaatcatcttttctaaattaaaaattgaggccaggtgcagtggctcaggcctgtaatcccaacactttgggaggacgaggcaggtggatcgcttgagatcaggagtgagagaccagcttggccaacatggtgaaaccccatctctactaaaaatgcagaaaaattagctgggcatggtggtgcatgcctgtaatcctagctacttgggaagctgaggcacgagaatctcttgaacccgggaaggagagattgcagtgagccaagatcatgccactgcactccagcctgggtgacagaacgagaccctgtctcaaaaaaagaaaaaaaaaaaagagagagagagatttgtaatctagcaaaatatgttatttacttattttctttccaacttttagtgtgggcccaagcgggtacctgtgcaggtttgtttcacgagtaaattgtgtgtcatgggggtttgttttacagatgattttgttactgagataatcagcataatatgtgatatgtagttttttaatccttaccctcctcttatctccaccctcaggtaggccccagtgtctgttgttcccttctttgtgtccatgtgtactcaatgtttagctcccacttataagtgagaatatgcagtatttggttttctgttcctgcattaatttatttagagaatgacctttgttatggaaaaacaaagaaagaaagaaatcaggtcttttttggaaaatctgggacattgaattgttacacgtaacatgtgtccccctagggacataggtcactttcagtatttgccaaagcattaggtcagccagacatgtgaaacatctcggagcttaataactgagctgcttcaatgtgttttgataaaagtttaaattctctggccccaatttattgaacacatgcctttgacaatacagcatttctttcttaggctattagtgaaagattaaccatctactcagtgattgttattgtgcctgtatgtgtgcagtatgaacagttatgtaacaaaacttcaaagattagagacctttaaaaggatctggggaaataggaagagtctataatcttataggaaaggaatgaattatgcaagcaactaaaagtgtgtcaatattctctgcttcacaaacaaattggaaaccagtggtaaactttagatcagaaacagaaactcaaaaaatgaaagaactggccatgagcagtggctcaggcctgtaatcccagcactttgggaggtcgaggcaggcggatcacctgaggtcgggagtttgagaccagcctgaccaacatggagaaaccctatctttactaaaaatacaaaaaattagacaggcatgatggcagatgcctgtaatcccagctacttgggaggctgaggcaggagaatcacatgaacccaggaggtggaggttgtggtgagctgagaatgcacggtagcctaggtgacagggtgagacgctatctc

SEQ ID NO: 23748 - DNA, 2535 bp, Homo sapiens
aaatgctcggtgctttaaatttgcaattaccatatttgcagaaacttgaaaaatcatcccaattaaatgacaaaatgtataggaggattatctttcttttgcccttacaactcaaattatattcgaagtaacatttttacagcagtcaaaacttttaaccaaaactcacacctgcagtctcataagtttaacaaaatggccacattccacgctttattttcttaacaaccctgactgtttaaatgactcccattgaaccaacagcttacagttgctgggcaataaaaaagcgagcaaaaggacctccagccctgctgttttagctattacccagcactctcagagtttgctctagtctggctgttcaatcaaattcattttccagtagcttctggcctttgtctcctctttctggccacgcatttcattgcctcctgaatttgatgacaacattttctttcttcactttgaatcttggcccagaatctcactctcccagccccatggaaagatggggaaaagatttcattctgctgatcaaatttgttagaagacattctttagagtctgaaaaaatatatttcattagcagttctctaggtagtggaatttttagtgatgtttactcttttttccttgttctaattttcctctaataaacagaaaaaaagcaagagtaacccaccaaatttggataaagggcttctgcttttcatattctcttcaaccagaacagcttaacttttctccatttatttatttaagtatttattcatatttgaaacaggctggggtgcagtggcatgatctcagctcactgcaacctccacctctcgggtacaagtgattctcctgccttggcctcccaaagtgctgggattataggcgtgagccaccgcacctggccttaatttgatttttattatccacaacactcatatctctttttgatcctactgtaatatcacattatcctacctaaagatgaattgttccaaccctgatgctttggtaatcatcttttctaaattaaaaattgaggccaggtgcagtggctcaggcctgtaatcccaacactttgggaggacgaggcaggtggatcgcttgagatcaggagtgagagaccagcttggccaacatggtgaaaccccatctctactaaaaatgcagaaaaattagctgggcatggtggtgcatgcctgtaatcctagctacttgggaagctgaggcacgagaatctcttgaacccgggaaggagagattgcagtgagccaagatcatgccactgcactccagcctgggtgacagaacgagaccctgtctcaaaaaaagaaaaaaaaaaaagagagagagagatttgtaatctagcaaaatatgttatttacttattttctttccaacttttagtgtgggcccaagcgggtacctgtgcaggtttgtttcacgagtaaattgtgtgtcatgggggtttgttttacagatgattttgttactgagataatcagcataatatgtgatatgtagttttttaatccttaccctcctcttatctccaccctcaggtaggccccagtgtctgttgttcccttctttgtgtccatgtgtactcaatgtttagctcccacttataagtgagaatatgcagtatttggttttctgttcctgcattaatttatttagagatcttttatttaaatacatgaattcattttcaggaaaagccttccagagatataaaagtcaaaatccaataaaagaatgacctttgttatggaaaaacaaagaaagaaagaaatcaggtcttttttggaaaatctgggacattgaattgttacacgtaacatgtgtccccctagggacataggtcactttcagtatttgccaaagcattaggtcagccagacatgtgaaacatctcggagcttaataactgagctgcttcaatgtgttttgataaaagtttaaattctctggccccaatttattgaacacatgcctttgacaatacagcatttctttcttaggctattagtgaaagattaaccatctactcagtgattgttattgtgcctgtatgtgtgcagtatgaacagttatgtaacaaaacttcaaagattagagacctttaaaaggatctggggaaataggaagagtctataatcttataggaaaggaatgaattatgcaagcaactaaaagtgtgtcaatattctctgcttcacaaacaaattggaaaccagtggtaaactttagatcagaaacagaaactcaaaaaatgaaagaactggccatgagccaccgtgcccagcctatttatttatttttttaagtggaggttgtggtgagcctatgttgcgccattgcacttcagcctgggcaacaagagcaaaactctgtctcaaaaaaagaaaaaagaaaaagaaaagaagaaaaagaaagaacctagaaacttagaggtcaactaaggagacaggcatttttataaaaagagttgaaagaaatttgtggtagaataacagaaaatacagacaagtt

SEQ ID NO: 23749 - DNA, 1973 bp, Homo sapiens
cagtccggccgggcggagctaggggcgggcccctgcgtctctgggcgctggagcgcggcgactatcacgccgcgtggcggacggacggactgacggacgcgcagccttacccgaaaggccatggcggagcacgcccctcgccgctgctgcctgggctgggacttcagcacgcagcaggtaaaggttgttgctgttgatgcagagttgaatgtcttctatgaggaaagtgtgcattttgacagagatcttccagaatttgggcatgtacttgatgtgcatgactcagggcggtgttcatgtgcacaaggatgggctgacggtcacttctccagtactaatgtgggtccaggcactggatatcatcttggagaagatgaaggcttcgggcttcgacttctctcaagtcctagccttgtccggggcgggccagcaacacggaagtatatactggaaggctggagcccagcaggcactgacaagcttatcaccagacctccggctacaccagcagcttcaggactgtttctccatcagcgactgcccggtgtggatggactccagcaccacagcccagtgccgccagctggaggctgctgtgggtggtgctcaggctctcagctgcctcacggggtcccgtgcctatgagcgttttacagggaaccaaattgcaaaaatttaccagcagaaccccgaggcctactcacatacagagagaatttctttggtcagtagctttgctgcttccctgttccttggctcttactcccctattgactacagtgatggttctggaatgaatttgttgcagatacaggataaagtctggtcccaggcttgccttggtgcctgtgcacctcatttagaggagaagcttagcccaccagtaccatcatgctcagttgtgggagccatttcttcctactacgtccagcgctacggatttcctccaggatgcaaagtggtggccttcactggggacaacccagcgtcgctggcaggcatgagactggaggaaggtgacattgcggtcagcctgggcaccagtgacaccctgtttctctggctccaagagcccatgcctgccctggaaggccacatcttctgcaacccggttgactcccagcactacatggcactcctgtgctttaaaaatggctccctcatgagagagaagatccgcaacgagtctgtatcccgttcctggagcgatttctctaaggcactgcagtccacagagatgggcaacggtggaaacctgggtttttattttgatgtaatggagatcacccctgaaattattggacgtcataggtttaacacagaaaaccacaaggttgcagcattccctggggatgtggaggttcgagcactaattgaaggacaattcatggccaagaggattcacgcagaaggcctgggctatcgagtcatgtccaagacaaagattttggccacaggaggagcatctcacaatagagaaatcttacaggtgcttgcagatgtgtttgatgccccggtgtatgttatagacactgccaactcggcctgtgtgggttctgcataccgagcttttcatggtcttgcaggtggaacagatgtgcccttttcagaggttgtgaagttagctccaaatcccagactagctgctaccccaagcccgggagcttctcaggtgagagaccatcagaatttgtttgtagcatttgcattatgaaagcccgctagggttttttcccccaccaaaaggtcacctacattgaacgtgatgtgctcaactaaaggagaaattctgctttattgaaattatcaagaaaatggagctaaagggccatgttgtcagctgcaagtcacagatactgctgattttacagccagggtcagatggattgctgggcatatttgtattgcttcttatgcctcacggtgggcccttccatgtcactgggctataaaagctactgaaaggatccatc

SEQ ID NO: 23750 - DNA, 2038 bp, Homo sapiens
cagtccggccgggcggagctaggggcgggcccctgcgtctctgggcgctggagcgcggcgactatcacgccgcgtggcggacggacggactgacggacgcgcagccttacccgaaaggccatggcggagcacgcccctcgccgctgctgcctgggctgggacttcagcacgcagcaggtaaaggttgttgctgttgatgcagagttgaatgtcttctatgaggaaagtgtgcattttgacagagatcttccagaatttgggactcagggcggtgttcatgtgcacaaggatgggctgacggtcacttctccagtactaatgtgggtccaggcactggatatcatcttggagaagatgaaggcttcgggcttcgacttctctcaagtcctagccttgtccggggcgggccagcaacacggaagtatatactggaaggctggagcccagcaggcactgacaagcttatcaccagacctccggctacaccagcagcttcaggactgtttctccatcagcgactgcccggtgtggatggactccagcaccacagcccagtgccgccagctggaggctgctgtgggtggtgctcaggctctcagctgcctcacggggtcccgtgcctatgagcgttttacagggaaccaaattgcaaaaatttaccagcagaaccccgaggcctactcacatacagagagaatttctttggtcagtagctttgctgcttccctgttccttggctcttactcccctattgactacagtgatggttctggaatgaatttgttgcagatacaggataaagtctggtcccaggcttgccttggtgcctgtgcacctcatttagaggagaagcttagcccaccagtaccatcatgctcagttgtgggagccatttcttcctactacgtccagcgctacggatttcctccaggatgcaaagtggtggccttcactggggacaacccagcgtcgctggcaggcatgagactggaggaaggtgacattgcggtcagcctgggcaccagtgacaccctgtttctctggctccaagagcccatgcctgccctggaaggccacatcttctgcaacccggttgactcccagcactacatggcactcctgtgctttaaaaatggctccctcatgagagagaagatccgcaacgagtctgtatcccgttcctggagcgatttctctaaggcactgcagtccacagagatgggcaacggtggaaacctgggtttttattttgatgtaatggagatcacccctgaaattattggacgtcataggtttaacacagaaaaccacaaggttgcagcattccctggggatgtggaggttcgagcactaattgaaggacaattcatggccaagaggattcacgcagaaggcctgggctatcgagtcatgtccaagacaaagattttggccacaggaggagcatctcacaatagagaaatcttacaggtgcttgcagatgtgtttgatgccccggtgtatgttatagacactgccaactcggcctgtgtgggttctgcataccgagcttttcatggtcttgcaggtggaacagatgtgcccttttcagaggttgtgaagttagctccaaatcccagactagctgctaccccaagcccgggagcttctcaggtctacgaggcccttctcccccagtatgccaaactcgagcagagaatcttgtctcagacccgggggcctccggagtgaacaggcatccctgttgcccctgcctgcccagatttactgaccccatttgtcgacatggccccagacaggagggatccacttctctgttctgaacagctcttcctgcccctactgactccttggagtgtccaggaccatcttaaagccgccctcagcacatctgcatgaagatagataggcactcctgtccctgtgcccgtgtgccccagggcaggaaagcatctctcttttcctgtcttttatcccaggaggcaggacaacactgagactgggatatgtccaataaaaactatgacttttccccttg

SEQ ID NO: 23751 - DNA, 664 bp, Homo sapiens
cagtccggccgggcggagctaggggcgggcccctgcgtctctgggcgctggagcgcggcgactatcacgccgcgtggcggacggacggactgacggacgcgcagccttacccgaaaggccatggcggagcacgcccctcgccgctgctgcctgggctgggacttcagcacgcagcaggtaaaggttgttgctgttgatgcagagttgaatgtcttctatgaggaaagtgtgcattttgacagagatcttccagaatttggagcaaccttggaagcacatgtggaacatgacagagccaccatcaacctggttcctgaatgactgcatggagcagaactccccactccccactcatgttcctaaccacctactgattgtgctttacatgaggagaaagaaacttcagctgtatcaagccatagaaatgtgtttttccttaactaatataattttttccctcatatcctttttttaaagaaaatactggggccaggtgtggtcgctcacgcctgtaatcccagcactttgggattacagaggcgggcacatcacgaggtcaggagatcgagaccatcctggctaatgcagtgaaaccccgtctctactaaaaatacaaaaatttagccaggcttggtgccgggcgcctgtagtcccagctgctcgg

SEQ ID NO: 23752 - DNA, 3792 bp, Homo sapiens
cagtccggccgggcggagctaggggcgggcccctgcgtctctgggcgctggagcgcggcgactatcacgccgcgtggcggacggacggactgacggacgcgcagccttacccgaaaggccatggcggagcacgcccctcgccgctgctgcctgggctgggacttcagcacgcagcaggtaaaggttgttgctgttgatgcagagttgaatgtcttctatgaggaaagtgtgcattttgacagagatcttccagaatttgggactcagggcggtgttcatgtgcacaaggatgggctgacggtcacttctccagtactaatgtgggtccaggcactggatatcatcttggagaagatgaaggcttcgggcttcgacttctctcaagtcctagccttgtccggggcgggccagcaacacggaagtatatactggaaggctggagcccagcaggcactgacaagcttatcaccagacctccggctacaccagcagcttcaggactgtttctccatcagcgactgcccggtgtggatggactccagcaccacagcccagtgccgccagctggaggctgctgtgggtggtgctcaggctctcagctgcctcacggggtcccgtgcctatgagcgttttacagggaaccaaattgcaaaaatttaccagcagaaccccgaggcctactcacatacagagagaatttctttggtcagtagctttgctgcttccctgttccttggctcttactcccctattgactacagtgatggttctggaatgaatttgttgcagatacaggataaagtctggtcccaggcttgccttggtgcctgtgcacctcatttagaggagaagcttagcccaccagtaccatcatgctcagttgtgggagccatttcttcctactacgtccagcgctacggatttcctccaggatgcaaagtggtggccttcactggggacaacccagcgtcgctggcaggcatgagactggaggaaggtgacattgcggtcagcctgggcaccagtgacaccctgtttctctggctccaagagcccatgcctgccctggaaggccacatcttctgcaacccggttgactcccagcactacatggcactcctgtgctttaaaaatggctccctcatgagagagaagatccgcaacgagtctgtatcccgttcctggagcgatttctctaaggcactgcagtccacagagatgggcaacggtggaaacctgggtttttattttgatgtaatggagatcacccctgaaattattggacgtcataggtttaacacagaaaaccacaaggttgcagcattccctggggatgtggaggttcgagcactaattgaaggacaattcatggccaagaggattcacgcagaaggcctgggctatcgagtcatgtccaagacaaagattttggccacaggaggagcatctcacaatagagaaatcttacaggtgcttgcagatgtgtttgatgccccggtgtatgttatagacactgccaactcggcctgtgtgggttctgcataccgagcttttcatggtcttgcaggtggaacagatgtgcccttttcagaggttgtgaagttagctccaaatcccagactagctgctaccccaagcccgggagcttctcaggtctacgaggcccttctcccccagtatgccaaactcgagcagagaatcttgtctcagacccgggggcctccggagtgaacaggcatccctgttgcccctgcctgcccagatttactgaccccatttgtcgacatggccccagacaggagggatccacttctctgttctgaacagctcttcctgcccctactgactccttggagtgtccaggaccatcttaaagccgccctcagcacatctgcatgaagatagataggcactcctgtccctgtgcccgtgtgccccagggcaggaaagcatctctcttttcctgtcttttatcccaggaggcaggacaacactgagactgggatatgtccaataaaaactatgacttttccccttgcagaggcagaattaaagctaatctagggactcaaatcagcagaatgggggagacaaagcccggtctcaccccctaacctcatcctatctctttctccaaccctgactgcccactcctccgcaaaccgtgacccatagccgcccccaccccataccttgatctaccatccatcctcttccccaatccaaaccccacagtctcttctctcccacaccctgccctccttgtttcagctgtctgaggtgcctcgcagggcctctcttacttgccccatgctcaccctttccatgctgtccccattctctcctttcaccatctctcctctccccctccttcatctctcctccctccccaaactcacttggcataattcacaacctcccacccaaacaatgggcctggtggacgtgcttcctgtgccctccctttagctatgcccacagatcactgagagggaccatctcccaagtggtgcagtttagaacttctctccctttttctccctcattccctctctcttcttgcagtccacttgctgaagaagttgtgtcatttctctggaagaatttccaaaattctggatttcttttttattttggagtatttcatcagctgaaaagtgattctcactttgagttttcttcctatatttgtatagtgagttcctttttccttcctctttatccctcctgttttactttatacctctctattccttgctcaaattattgcaaaagcctctatagaaagtcctctgtgatctgactcctgcagactcttccagatttttctgcccaaggcctttactgagctcaggactccagctaaatcaaaatacgcatgttctcacccagagtgacaaaatcctgcagataggtttaagacctagtggctcagagcagtagctactgggaagttaaaaggaaggggcttagaaaatgaatgggaccaaaggcatcacttctgatggagatgaagccatcttgaaagtgagtggtgtcctttggaggcatggtggatgaaaggcgcaaaggaagcaagaggttaaagataatggcccattagatacaacagcaagcccaagattccgaagaagacagacaactccccctagtaccacctagacattactttttaaagacattttacattattgtccagcagaaaaaggctgtcttggaccatgaaacagtaaactgtaactaaacacttcaacatgaatttgaaaataaataattgtggatataaaagaacaccagagatcagaaattcaaaaactcagaataaaaatgaaaaagctacaagcatatatgagaagagaactgactgaacttgggaaataatttgaacaaaaagataaatcttcacagatatgaatactaaattatatcttaatgaaaatagatatggtcacaagtacattaaggcacgtagaaggtaggagtaagaaaagctaagagaagcaaaacaaacaaagcaatattaaaggaagagccaaaaagacccagaaataaaatgacagataaagaagattgtcaaagaaaagatgatacaggtaagattggaactcatgaagacaaaagataagacagtggcatagagttaatatttaaaattcaaatattaaaactcaaataaaccccaaagaacttttggaaaacaaaagaaaaccttaaactttatcttgaaagggtctatcttgttacttagaatattgaatcagaatgattagctctgagacatagcctaccaac

SEQ ID NO: 23753 - DNA, 1019 bp, Homo sapiens
cagtccggccgggcggagctaggggcgggcccctgcgtctctgggcgctggagcgcggcgactatcacgccgcgtggcggacggacggactgacggacgcgcagccttacccgaaaggccatggcggagcacgcccctcgccgctgctgcctgggctgggacttcagcacgcagcaggtaaaggttgttgctgttgatgcagagttgaatgtcttctatgaggaaagtgtgcattttgacagagatcttccagaatttgggactcagggcggtgttcatgtgcacaaggatgggctgacggtcacttctccagtactaatgtgggtccaggcactggatatcatcttggagaagatgaaggcttcgggcttcgacttctctcaagtcctagccttgtccggggcgggccagcaacacggaagtatatactggaaggctggagcccagcaggcactgacaagcttatcaccagacctccggctacaccagcagcttcaggactgtttctccatcagcgactgcccggtgtggatggactccagcaccacagcccagtgccgccagctggaggctgctgtgggtggtgctcaggctctcagctgcctcacggggtcccgtgcctatgagcgttttacagggaaccaaattgcaaaaatttaccagcagaaccccgaggcctactcacatacagagagaatttctttggtcagtagctttgctgcttccctgttccttggctcttactcccctattgactacagtgatggttctggaatgaatttgttgcagatacaggataaagtctggtcccaggcttgccttggtgcctgtgcacctcatttagaggagaagcttagcccaccagtaccatcatgctcagttgtggtaggtctcctttctggtgatgtggctcatttaagagctggcagctaccagggaagcactgtagcgcacacacacgcacacacacacacacacacacacacacactctgcacacacccttatttgttcctcacc

SEQ ID NO: 23754 - DNA, 389 bp, Homo sapiens
tccttactctgtgcccaccttttcctggagacaggttgcagcattccctggggatgtggaggttcgagcactaattgaaggacaattcatggccaagaggattcacgcagaaggcctgggctatcgagtcagtaagtgagccactggcagcatgtgtcccggggtgggggctcagggccagctcactcgcaggggccagggctagtggggcaatatctactaaagttttcttacagggggacttgtgcaggagggaggtggagcctgacctcagggatggggtgagaaagtgtcaattggcacttgtaggcaagcatagaatagcagacaggttgttcccgcttctcagctgtgtccacaatagcctgaccttttggccaggacctgta

SEQ ID NO: 23755 - DNA, 457 bp, Homo sapiens
catgaacgtaatggatgcagattatgtaaaagtgataaatattgtgagccacatgactatgaatactgctgtccttgtgagtggcaccgtacagaacatgataggcaactcaatgaagtagagaacaatattaagaagaaagcttgctgttgtgagggattcccattccatgaggttattcaagaattccttttaaacaaggataaattggtgaaggttatcaggtaccaaagacctgatttgttattgtttcagagatttactcttgaaaaaatggagtggcccaatcactatgcatgtgagaaattgctggtacttttgacccattatgacatgatagaaagaaagcttggtagcagaaactctaatcaactacagccaattcggtaatgtaaagaactgtatggtgaaggtggtgtttttacttgagtattttataattaaaatattcctaata

SEQ ID NO: 23756 - DNA, 5862 bp, Homo sapiens
  misc_feature (2314)..(2314): n is a, c, g, or t
catgaacgtaatggatgcagattatgtaaaagtgataaatattgtgagccacatgactatgaatactgctgtccttgtgagtggcaccgtacagaacatgataggcaactcaatgaagtagagaacaatattaagaagaaagcttgctgttgtgagggattcccattccatgaggttattcaagaattccttttaaacaaggataaattggtgaaggttatcaggtaccaaagacctgatttgttattgtttcagagatttactcttgaaaaaatggagtggcccaatcactatgcatgtgagaaattgctggtacttttgacccattatgacatgatagaaagaaagcttggtagcagaaactctaatcaactacagccaattcgaattgttaagactcgaatcagaaatggagttcattgttttgaaatagaatgggaaaagcctgaacattatgctatggaagataaacaacatggagaatttgctttattaacaattgaggaagaatcattgtttgaagcagcatatcctgagatcgttgctgtttaccaaaaacaaaagttagaaattaaagggaagaaacaaaaacgtattaagcctaaagaaaacaatttgccagaaccagatgaagtaatgagctttcagtcacacatgactttaaaacccacatgtgaaatctttcataagcagaattccaagttaaattcggggatttcccctgatcctacattaccacaggaatctatttctgcctcattgaatagcttgcttttacctaaaaatactccatgtttgaatgcacaagaacagttcatgtcttctctaagacctttggctatacagcaaattaaagctgtcagtaagtctctaatttcagaatctagtcaacccaatacctcatctcataatatatccgtgattgctgatctacacttgagcactattgactgggaaggtacttcttttagtaattctccagctattcaaaggaatactttttctcatgatttaaaatcagaagttgaatcagagctatcagccatccctgatggctttgaaaatatcccagaacaactgtcctgtgaatcagaaaggtacactgcaaacataaagaaagtgttggatgaggattctgatgggattagtcctgaagagcatctactttctggcattactgatttatgtcttcaggatttgcctttaaaggaacgaatatttacaaaattatcatatcctcaggataatctacaaccagatgtcaacctgaaaactttgtccatacttagtgtaaaagaatcttgtattgctaacagtggttctgattgtacatcacatctttcaaaggatcttccaggaattcccttgcaaaatgaatccagagactctaaaattctaaaaggagaccagctgcttcaagaagactataaagtcaatacttctgtcccttattctgtcagtaacacagtggtaaagacctgcaatgttagaccaccaaatactgctttagatcatagtagaaaagttgatatgcaaaccactcggaaaattttaatgaagaagagtgtttgccttgacagacattcctctgatgaacaaagtgccccagtgtttgggaaagctaagtacacaactcaaagaatgaagcacagttctcaaaagcataattcatcccatttcaaagaaagtggccataacaagttgagtagccctaagatacatattaaagaaactgaacagtgtgtcagatcttatgaaacagctgaaaatgaagaaagctgtttcccagattcaacaaaaagttctctgagttctctacaatgtcataagaaagaaaacaactctggtacttgtttggatagccctcttcctttacgccagagattaaaactaagattccaaagcacttgaaatttaaaacacttaggtataacttaactattttagtactatcagcaatagcagagacagagggaaggtatctagttcatgtgtggtaaaaattttaatgttctctgtgtcatgaaacacttgccattttaatcaaagttgtaatttttaaaaagtcacctaaaactctggttttaaaagatcctctgtattgaaaacttctgataatgtatgtcattatgtccttactattccttaattgtagttttaaaatattggtatagtacttgacagagtaaatacttcatctgattgttcatttttactttttcttccacaagcctctaaagtatttatattccagcttgttcccaagaggataattctttatacttctcttcattcttttaaggccttgcaaggncttccgttataactcgctttcctaaaagctattttctccctcagtgtgaagatacctttagtgtgctcttccactttggaaggccatgcaaggtgttccattataactctttttcctaagagttatattctccctcagtttgaagatacctttagtgtgctcttccacttttggtgtcttagtctcttttgaggggcaaaaatagaaaaggagagaagatgtcagtatgtttagtaaaaatcatgctcgtaatggctgaataaactgagcaaagtaactccttatgtatccccagaagttcacaggtatatcgggtggaaaaagatttggaaaatcaaatgtataaccaaaaggattagaaactagcccaggatcacgtagctaactaataatcctgtgggaatcagttttcttgcctgctaatttttttatttttctattttttccttctatagcacttttcccccttttgttttgaatctatgcaatattgactttaataccaccaaatattaagtcatgcattaatttaggtcgcactcaaaaattctagagaggcatccagattgaaaaggaaaatggtgtctgcagatgacaagattgtatgcatcaaaaattctaagaaatccactagaaaactattaaaactgataaagcgagttcatccaggtcgtagaatacaagaccaatgtgcaatgatcattgcattttgtttttgtttgtttgtttttttttgagacagagtctcactcttgtcgagactggggtgtagtggcgccatcttggctcactgcaacctctgcctcccaggttcacgcaattcacatgcctcagccacctgagtagcagggattacaggtgtgtgccaccatgcctggctaatttttagtatttttagtagagatgggattttcccttgttggtcaggctagtcatgaactcctggcctcaagcgatccacccatcttggcctcccagagtgctgggattacaggtgtgaatcaccatactcagcctcaattgtatttctgtacacctctaaataaatggaaatacattccatgttcatgaatcagaagacataagatgaccatactccccaaactgatctacaggttaaatgtaattcccattaattccagctggtttctttgctgattctaaaattcatatggaaatttcaggaacacagaatattaggaagaatcttgaaagagtttgaatgacccacccttcctgattttaagtatacagaactacagtaatgaatgtgttgtactggtataaaggtagacatataggtcaatatagatcaatggcatagaattgagaattcagaaaaaaagccttcacgtttatggtcagttgattttaaaccagagtgccaagacaattcaatgggaaaaggaaacagtctttgaaccaactgtcttctggatctattggatatctatgtaaaaaagagtgacatttgattcctacttcacatgatatttaagaagtaacttaagatggatcaaatacctaaatgtaagctaaagctataaaactcttagaagaaaacatagacgtaaatctttgtgactttggattaggcaaggatttcttaaatatacccaaagcataggcaacaaaagagaatacacaaactggacttcatcaaaactaaaaactgttgtttgaaatgacaccatcaagaaagtgaaaagacagcttacagaatgggagaaaatatttgcaaatcataaatgtgataagggacttgtatcttggtggtatataaagaactcgtaactcaattataaaaagacaactttgaaatgggcaaaatagctcaacaggcttttctgcaaagaagaaatacaaatgaccaagaagcacatttaaaaattttcagtactattactcatcaggaaaatgcaaatcaaaaccacaagacacccaatgtctacaatcaaaaagataataactagtattgatgaggatgtggagaaattgaaattctcataacatgctggtaggaatgtaaaatggggcagccactttggaaaaagtctggtagttcttcaaatggttaaatgtagagttacgatatgatccagcaattcctctcccaggtatatacccaagataaatgaaaacttatatccacataaaaacctgtgcacaaatgtccatagcagcgttattcataatagcctaaaagtggaaacaatcccagttccagaatgaggaaggggagaaactaatgtgtattagctattgtgtgctaagcattcaactagattatttacaaaccttgtatcatctcaactctttaaagactgtattgcaatgttttgaatattcagagagaaaaaagtcgttgctaaaacattttccaaggttctgcttattctgatttgttcagtcgtggctgtgatagttcaggaccatctagaccaggtaaataaaatatctagaggcattcttgagattgtatgagatgaaaataacaaaattagttgggagtggccagtctgagttcattttgctatatagctcaggagtccccaacccctgggctatggacaggtaccagtccatcacctgtcaggaaccggcctgcacagcaggtgttgagcggcatgcaagcgagaattaccgcctgagctctgcctcctgtcagatcagcggtggcattagagtctcataggagcatgaaccctattgtgaactacgcatgcgaggatctagtttgtgcactcctactgagaatctaatgcctgatgatataaggtggaacagcttcatcccacagccatctccccctcatcatccgtggaaaaactgttttccacgaaagtggtcctcggtgccagaaaggttggggactgctgatatacctaatataggcataagtgtaaaattatagttcctcctcctcaaggatttctctgttttcattgtccaggttataccaattctttttaaagcattccatgttcttgttccttgatgtggtcatgttatcacttgtaaatcaaatcttttaagttgctgcttacgtatttgctcatcacttcattgtcttgttgaggatgccttgcttccctttgaaatactctgccaaagatctgcctccagctgctaggatcctgtaattggtttctttctgatggctccatgctaaggccctgctctggcctaactgctttgggctttgtgtaatcaatcttaagtccttggcggtttttcttttagattttttttccatataaaatctctatctggccacacatggtggccgtgcctgtaatcccagcacgctgggaggctgaggcgggtggattgcttgaggccaggagttcaagaccagcctggccaacatggtgaaaccccatctctactaaaaatacaaaaatcagtggggcctggtggcgtgcacctgtaatcccagctactcgggaagctgaggcaggagaatcgcttgaacctgggaggcagaggttgcagtgagctgagatagtgccactgcacttcactccaggatgggcgaaaaagtgtct

SEQ ID NO: 23757 - DNA, 4781 bp, Homo sapiens
  misc_feature (2314)..(2314): n is a, c, g, or t
catgaacgtaatggatgcagattatgtaaaagtgataaatattgtgagccacatgactatgaatactgctgtccttgtgagtggcaccgtacagaacatgataggcaactcaatgaagtagagaacaatattaagaagaaagcttgctgttgtgagggattcccattccatgaggttattcaagaattccttttaaacaaggataaattggtgaaggttatcaggtaccaaagacctgatttgttattgtttcagagatttactcttgaaaaaatggagtggcccaatcactatgcatgtgagaaattgctggtacttttgacccattatgacatgatagaaagaaagcttggtagcagaaactctaatcaactacagccaattcgaattgttaagactcgaatcagaaatggagttcattgttttgaaatagaatgggaaaagcctgaacattatgctatggaagataaacaacatggagaatttgctttattaacaattgaggaagaatcattgtttgaagcagcatatcctgagatcgttgctgtttaccaaaaacaaaagttagaaattaaagggaagaaacaaaaacgtattaagcctaaagaaaacaatttgccagaaccagatgaagtaatgagctttcagtcacacatgactttaaaacccacatgtgaaatctttcataagcagaattccaagttaaattcggggatttcccctgatcctacattaccacaggaatctatttctgcctcattgaatagcttgcttttacctaaaaatactccatgtttgaatgcacaagaacagttcatgtcttctctaagacctttggctatacagcaaattaaagctgtcagtaagtctctaatttcagaatctagtcaacccaatacctcatctcataatatatccgtgattgctgatctacacttgagcactattgactgggaaggtacttcttttagtaattctccagctattcaaaggaatactttttctcatgatttaaaatcagaagttgaatcagagctatcagccatccctgatggctttgaaaatatcccagaacaactgtcctgtgaatcagaaaggtacactgcaaacataaagaaagtgttggatgaggattctgatgggattagtcctgaagagcatctactttctggcattactgatttatgtcttcaggatttgcctttaaaggaacgaatatttacaaaattatcatatcctcaggataatctacaaccagatgtcaacctgaaaactttgtccatacttagtgtaaaagaatcttgtattgctaacagtggttctgattgtacatcacatctttcaaaggatcttccaggaattcccttgcaaaatgaatccagagactctaaaattctaaaaggagaccagctgcttcaagaagactataaagtcaatacttctgtcccttattctgtcagtaacacagtggtaaagacctgcaatgttagaccaccaaatactgctttagatcatagtagaaaagttgatatgcaaaccactcggaaaattttaatgaagaagagtgtttgccttgacagacattcctctgatgaacaaagtgccccagtgtttgggaaagctaagtacacaactcaaagaatgaagcacagttctcaaaagcataattcatcccatttcaaagaaagtggccataacaagttgagtagccctaagatacatattaaagaaactgaacagtgtgtcagatcttatgaaacagctgaaaatgaagaaagctgtttcccagattcaacaaaaagttctctgagttctctacaatgtcataagaaagaaaacaactctggtacttgtttggatagccctcttcctttacgccagagattaaaactaagattccaaagcacttgaaatttaaaacacttaggtataacttaactattttagtactatcagcaatagcagagacagagggaaggtatctagttcatgtgtggtaaaaattttaatgttctctgtgtcatgaaacacttgccattttaatcaaagttgtaatttttaaaaagtcacctaaaactctggttttaaaagatcctctgtattgaaaacttctgataatgtatgtcattatgtccttactattccttaattgtagttttaaaatattggtatagtacttgacagagtaaatacttcatctgattgttcatttttactttttcttccacaagcctctaaagtatttatattccagcttgttcccaagaggataattctttatacttctcttcattcttttaaggccttgcaaggncttccgttataactcgctttcctaaaagctattttctccctcagtgtgaagatacctttagtgtgctcttccactttggaaggccatgcaaggtgttccattataactctttttcctaagagttatattctccctcagtttgaagatacctttagtgtgctcttccacttttggtgtcttagtctcttttgaggggcaaaaatagaaaaggagagaagatgtcagtatgtttagtaaaaatcatgctcgtaatggctgaataaactgagcaaagtaactccttatgtatccccagaagttcacaggtatatcgggtggaaaaagatttggaaaatcaaatgtataaccaaaaggattagaaactagcccaggatcacgtagctaactaataatcctgtgggaatcagttttcttgcctgctaatttttttatttttctattttttccttctatagcacttttcccccttttgttttgaatctatgcaatattgactttaataccaccaaatattaagtcatgcattaatttaggtcgcactcaaaaattctagagaggcatccagattgaaaaggaaaatggtgtctgcagatgacaagattgtatgcatcaaaaattctaagaaatccactagaaaactattaaaactgataaagcgagttcatccaggtcgtagaatacaagaccaatgtgcaatgatcattgcattttgtttttgtttgtttgtttttttttgagacagagtctcactcttgtcgagactggggtgtagtggcgccatcttggctcactgcaacctctgcctcccaggttcacgcaattcacatgcctcagccacctgagtagcagggattacaggtgtgtgccaccatgcctggctaatttttagtatttttagtagagatgggattttcccttgttggtcaggctagtcatgaactcctggcctcaagcgatccacccatcttggcctcccagagtgctgggattacaggtgtgaatcaccatactcagcctcaattgtatttctgtacacctctaaataaatggaaatacattccatgttcatgaatcagaagacataagatgaccatactccccaaactgatctacaggttaaatgtaattcccattaattccagctggtttctttgctgattctaaaattcatatggaaatttcaggaacacagaatattaggaagaatcttgaaagagtttgaatgacccacccttcctgattttaagtatacagaactacagtaatgaatgtgttgtactggtataaaggtagacatataggtcaatatagatcaatggcatagaattgagaattcagaaaaaaagccttcacgtttatggtcagttgattttaaaccagagtgccaagacaattcaatgggaaaaggaaacagtctttgaaccaactgtcttctggatctattggatatctatgtaaaaaagagtgacatttgattcctacttcacatgatatttaagaagtaacttaagatggatcaaatacctaaatgtaagctaaagctataaaactcttagaagaaaacatagacgtaaatctttgtgactttggattaggcaaggatttcttaaatatacccaaagcataggcaacaaaagagaatacacaaactggacttcatcaaaactaaaaactgttgtttgaaatgacaccatcaagaaagtgaaaagacagcttacagaatgggagaaaatatttgcaaatcataaatgtgataagggacttgtatcttggtggtatataaagaactcgtaactcaattataaaaagacaactttgaaatgggcaaaatagctcaacaggcttttctgcaaagaagaaatacaaatgaccaagaagcacatttaaaaattttcagtactattactcatcaggaaaatgcaaatcaaaaccacaagacacccaatgtctacaatcaaaaagataataactagtattgatgaggatgtggagaaattgaaattctcataacatgctggtaggaatgtaaaatggggcagccactttggaaaaagtctggtagttcttcaaatggttaaatgtagagttacgatatgatccagcaattcctctcccaggtatatacccaagataaatgaaaacttatatccacataaaaacctgtgcacaaatgtccatagcagcgttattcataatagcctaaaagtggaaacaatcccagttccagaatgaggaaggggagaaactaatgtgtattagctattgtgtgctaagcattcaactagattatttacaaaccttgtatcatctcaactctttaaagactgtattgcaatgttttgaatattcagagagaaaaaagtcgttgctaaaacattttccaaggttctgcttattctgatttgttcagtcgtggctgtgatagttcaggaccatctagaccaggtaaataaaatatctagaggca

SEQ ID NO: 23758 - DNA, 2348 bp, Homo sapiens
cggacgcgtgggtcgacccacgcgtcgccacccttcctgattttaagtatacagaactacagtaatgaatgtgttgtactggtataaaggtagacatataggtcaatatagatcaatggcatagaattgagaattcagaaaaaaagccttcacgtttatggtcagttgattttaaaccagagtgccaagacaattcaatgggaaaaggaaacagtctttgaaccaactgtcttctggatctattggatatctatgtaaaaaagagtgacatttgattcctacttcacatgatatttaagaagtaacttaagatggatcaaatacctaaatgtaagctaaagctataaaactcttagaagaaaacatagacgtaaatctttgtgactttggattaggcaaggatttcttaaatatacccaaagcataggcaacaaaagagaatacacaaactggacttcatcaaaactaaaaactgttgtttgaaatgacaccatcaagaaagtgaaaagacagcttacagaatgggagaaaatatttgcaaatcataaatgtgataagggacttgtatcttggtggtatataaagaactcgtaactcaattataaaaagacaactttgaaatgggcaaaatagctcaacaggcttttctgcaaagaagaaatacaaatgaccaagaagcacatttaaaaattttcagtactattactcatcaggaaaatgcaaatcaaaaccacaagacacccaatgtctacaatcaaaaagataataactagtattgatgaggatgtggagaaattgaaattctcataacatgctggtaggaatgtaaaatggggcagccactttggaaaaagtctggtagttcttcaaatggttaaatgtagagttacgatatgatccagcaattcctctcccaggtatatacccaagataaatgaaaacttatatccacataaaaacctgtgcacaaatgtccatagcagcgttattcataatagcctaaaagtggaaacaatcccagttccagaatgaggaaggggagaaactaatgtgtattagctattgtgtgctaagcattcaactagattatttacaaaccttgtatcatctcaactctttaaagactgtattgcaatgttttgaatattcagagagaaaaaagtcgttgctaaaacattttccaaggttctgcttattctgatttgttcagtcgtggctgtgatagttcaggaccatctagaccaggtaaataaaatatctagaggcattcttgagattgtatgagatgaaaataacaaaattagttgggagtggccagtctgagttcattttgctatatagctcaggagtccccaacccctgggctatggacaggtaccagtccatcacctgtcaggaaccggcctgcacagcaggtgttgagcggcatgcaagcgagaattaccgcctgagctctgcctcctgtcagatcagcggtggcattagagtctcataggagcatgaaccctattgtgaactacgcatgcgaggatctagtttgtgcactcctactgagaatctaatgcctgatgatataaggtggaacagcttcatcccacagccatctccccctcatcatccgtggaaaaactgttttccacgaaagtggtcctcggtgccagaaaggttggggactgctgatatacctaatataggcataagtgtaaaattatagttcctcctcctcaaggatttctctgttttcattgtccaggttataccaattctttttaaagcattccatgttcttgttccttgatgtggtcatgttatcacttgtaaatcaaatcttttaagttgctgcttacgtatttgctcatcacttcattgtcttgttgaggatgccttgcttccctttgaaatactctgccaaagatctgcctccagctgctaggatcctgtaattggtttctttctgatggctccatgctaaggccctgctctggcctaactgctttgggctttgtgtaatcaatcttaagtccttggcggtttttcttttagattttttttccatataaaatctctatctggccacacatggtggccgtgcctgtaatcccagcacgctgggaggctgaggcgggtggattgcttgaggccaggagttcaagaccagcctggccaacatggtgaaaccccatctctactaaaaatacaaaaatcagtggggcctggtggcgtgcacctgtaatcccagctactcgggaagctgaggcaggagaatcgcttgaacctgggaggcagaggttgcagtgagctgagatagtgccactgcacttcactccaggatgggcgaaaaagtgtct

SEQ ID NO: 23759 - DNA, 447 bp, Homo sapiens
aattaaaatattcctaatatctttaagctcgtttttgtaaaggtggaggaaaggcctcctggaatattaaaagcttattcagggcttataatcagaacaacatagtaagtcatgctttatcatacttttctacttcaaacacatagtaataatagattataaaaagaaacaagcataaaaggatatagccaggctttataagacaactatttcagtggaccagaaaaggaacaaacgtgttaagggaatgtgggaactaaaactggttttgcagagccttaaatctagaagcagccgtatcatccaggaggtaaatcgcttcagagaaaaaaaaaaaaatggggaccaaaagtgcaagatgttgatggagtcaggcttatttcttgaaacccagtagctagggtggaatttctctgttcctatcaggagattagaggctggggtaga

SEQ ID NO: 23760 - DNA, 351 bp, Homo sapiens
gaaagcttgctgttgtgagggattcccattccatgaggtaatatccagtaattcaactctattaattttagaaactttcttaaaagtttaaatctcagtttctattttcttttttcttgctaggttattcaagaattccttttaaacaaggataaattggtgaaggttatcaggtaccaaagacctgatttgttattgtttcaggtatctgaaaataaattcttctttactgtatgaagttatatgctggaaagataggaacagatattcactctgattggtcttagaggaggtttaaaattaaaacaggcagctcttatattttttcagcatttatttctactctctcat

SEQ ID NO: 23761 - DNA, 448 bp, Homo sapiens
accatgttctgggctcagtgcttaagtagactaaagtttacctgttctgttgtgccagttttgtgctaggattgtaaagatgaatacactattgttactttctctgattgtgtagtctagtgtataggtcagcaaactttttctatgaagggccagatagtaaattactttatagggcatatgttctttgttgccaccactcacctttactgttgtaccaccaaagtagccatggacaatatgtaaatgaatgagcatgactgtattccattaaaactttatttacaaagacagatggtggattgaatttggcctgtgggcctagtttgccaacttctgttccagtggaagaaatggttacataaatagaatacagtaaacagttgattcttgttatttgtggtggttatgttctatacattcaataaattcaccacaaacactgaat

SEQ ID NO: 23762 - DNA, 439 bp, Homo sapiens
ggcccaaagaagacatttcatgaatattattcttacttccacttttcctttctttgtctcttttcctctaatttcagtctgccttctttctctctcctccatttattggcttaaaggattgaaaccacagtatgttaaccagcagcctgggaaaagtcccatggtgctcacctccacccctgtgctgacaaactgtaggttaccctcaaaaaccacaaggctaatgtccaactgccttcagggcactccctgaagcttggagaacatttaaatagcatagaagatctaattagcagcagcctagtcctcatgagcattctttacaccaccatccaattacccatcctgtgcagtcaatttgggtgcaggttttggtaacagaagcttttccatatttagtcatcatgataatttatgcttaaatattttgtaggtttgt

SEQ ID NO: 23763 - DNA, 748 bp, Homo sapiens
caggtgagccctgaaaacacaaaaggacagttctgtgttgaaacaccccatcccctcacgttctcaccccaggcccagaagtaggttgcaactgcctttggaagattttgccccttagccatccccacccacttgtaccagctaagaatgctggagactctgccaccatgctctgcgtgcccctgaacctctgtgcagcccggaaggctgatgtacaggtgtacctcaatccacattacagccatgctcctaatgtacatggacatttttgtaactcagctcatattctgactgtatttgagaagctggctgtttaagggaacccagaagtgaattcttttgtaaagtaaagcacccttttgtaatgcaattaattatcccttaatgtatctgttttgtaagtctgcatttttgtatatcggatttaccttaagcttctctagtgaggcattctgagcagtggtgatcacatgccagatcgccctgcctatccacaaagtagatgaccaatgcacgctcctcaaacatctttggaggaactacctggccaaaacactggccaggatgcagcaagcagcagcaggggctgacagcaggcttactgccatcaacattgcttgaaatgcctctatgttctgaataaagaaaaaccataattgcttgtggtgaaacgaagcagtcttcatgttaagtagcaatggttatttttattggtagtaactgaacagtgttttgcaatttgtgaaac

SEQ ID NO: 23764 - DNA, 400 bp, Homo sapiens
taaatacacgttgtgtgaattaatgcacattgtttaaccaggcccccattgataaactttgcatttcttttgttctttactattgtaaacatttccttgcctttgtgtactgtatttgaaggataaatttccagatcttgaattgctagatttaaaacagcgcagatgtccttcaacaggtgaatgactaagcaaaccatgatttgctttgtattccaaatcatggaattcacatcagccataaaaaggaacagactagtggtacacactacaacttggatgaatctagggaattatgttgagtgaaaaaagctaattcaaaaagtatgatatacgtgctatatcatttcatttatttaacatttttaagcgacaaaattttcttttttccttctccttc

SEQ ID NO: 23765 - DNA, 700 bp, Homo sapiens
ccaaatctatataaaaatgacattccacacattgaaaaataaaagtggctattgctgctgggaatgcaaaatgaaacagctgttttggaaaatgctttgatagtttcttataaattaaacatacacttacaaagtgatccagaattgctactcctaggtatttatatcaaagaaatgaaaacttatgtatacaaaagcctatacacgaatgtttagagtggatttattcatagttgccagaaattggaacaacccaatgtcttcaaactgggaaatggataaacaaactatggtgtattcatacagtggaatactactcagtaataaaaagaaatgagcacccaatacatgcaacaacttggagttacatcaaatgcattatgctaattagaggaagtcagacttaaaatgctacatactgtatataatccatatggcattttaaaaactacaggatcagcaaacagatctgtgctgtgagttggaggaagaattgatgaaaaaagacacaagaaaattgtttgaagtgatggagctgttctatatcttgattgtagtagtgatggcattgaatgcatttgccaaaactcatagaactctgtaactaaaaaataatgaattttattatatataaattataccttcataacagggtaccctcaaatgagtagtaatatatttttgcgtgtgttttgatttt

SEQ ID NO: 23766 - DNA, 130 bp, Homo sapiens
aatttcttgttatcatgggaaattttggttctagggatagaatacatctcatagaagtcagagatccttactccctttttcttttttttttccaatttttttggcctttctagcactcatctttatgtag

SEQ ID NO: 23767 - DNA, 369 bp, Homo sapiens
gtatttctagtagagatagggttttgccatgttgcccaggcttgtcttgaactcctgagttcaggtaatctgccgcctcggcctcccaaagtgctgggattataggcatgagccatcgtgcccggccaacagtggttgttttatctctggtatggaatatggctgtggggtgtgtgtgtacgtgcacacatgcacttgtaaatgttcttgctttttgctttttttttttttggagacagtgtctcgctctgttgcccaggctggtcttgaacccctgggctcaggcaatcctcccacttgggcctctgccaaaaatgactttggaaagaaaaacacagctgggagtctctctggcttgggggctgcctg

SEQ ID NO: 23768 - DNA, 950 bp, Homo sapiens
acagtttcaaaatatcaaatataactaaatattgaaatgaaaagcacacgtcctgtctctgcagtctgaagctacatgtaagcaggacactcatgtgtcttccaattacaactaaacagacctggctgtcagtaatctgcattctcagtggcctctgggctcactttagacaatactttcagcctccttcattccaattacttcactaccttgggggaaataattttagagaagataaaagtagcatttttcattctctaaaatcactttgtattttatagtagtacatgcctttgctgtctgaactaaaaaaagacaaaatatagaaatgcttttgattttctttgtaaatggtattttgactcctatagtgtatttgtacctgacatcatctccgttaaagcagttttattcctgagatgagggtacagtggaaaacacattagcatcatagattaaaaccagttgacagcggtctcctaaaatgctaaataataaaaattccaccaaaagcaccataacaggttatgaaactcccaaataactacagccctaggaaatattttttaattaaaaaaagttcacaatcttttatgttacaggaaaaaaatccgtaaatctttctgactataaaccgcctcacaagtctgagaatatgacacttttacactgatttaccactttcattgttatcagttaaaatccatatggcttttagtcttttacctacccaaaaaggtgagggggcagggggttccttcatagtgcccaggattttgagggacatttcccaaccaaatgtaattcagcattaaattttccacagataaattaggcacatcagaccagatttcaactgcattgagatttcaacactgtatatcctgactgaaataactaacttgaaagcttccactagtgactgaagggatggtgggaagggggttgtg

SEQ ID NO: 23769 - DNA, 465 bp, Homo sapiens
ctgacattgacatcattgcccagcttccaacagccagacagcttcacacgtctggcttccttttcaactggagaacactgtgaatcgtgtggggacacattttggaaggaggtgaaatattaaataactgctctgttatgatggaatcttccccacctcccaatccaatggtgtcttcatctctcctccaacccctaacccagggcttctcagctggaatgcactttagaattgctgagcaagcttcagttacaggcacccaagttctattctccatctactgaatcagaaactcacagggtgcagcacaggtaggtgcatttttaatagcaccccagagattctcaacctgattccacaaaaggacctgcagtgagtcgctctgagcggaaaacacctgatgctctcagtattgctcgtctcagctgaatttgtgtcttaacaagaatccaagcctagagttta

SEQ ID NO: 23770 - DNA, 535 bp, Homo sapiens
atggcactggctgcagttagagatgaattcagaattaggataagtttgttttctccccgagtatgagcatcaagcttctgtgtcaacttctcctcccaatgccatgctttccccactgtactgcagctggtgcatatgtagaaaaattgtatgtatcccagaaagcatcccctgattttgtaaactattctcattttgtcctgaagatcagggtcccagcttccccacacacatacctatgcatctgatcagaactgcaaatggaggtggtagagacttcaaggcagttactattgctagaagaggaactgccctctcccatttcactgccaggcttactttattcaggacactgaagtctggggacaggctgcagaagcaggctccagtctgtgatgatgtgtgcgtaaaagaatgtaatccacatgcagctggaagccggagcctgttcaggggcatggtgtctccacatgcgcctgccttatgtgctacaagcatcatggccaggccctggggcagcaggtgtgagctggaa

SEQ ID NO: 23771 - DNA, 369 bp, Homo sapiens
aggctgcctagaggatcccgacgtatggtgatccctgaagatcagggtcccagcttccccacacacatacctatgcatctgatcagaactgcaaatggaggtggtagagacttcaaggcagttactattgctagaagaggaactgccctctcccatttcactgccaggcttactttattcaggacactgaagtctggggacaggctgcagaagcaggctccagtctgtgatgatgtgtgcgtaaaagaatgtaatccacatgcagctggaagccggagcctgttcaggggcatggtgtctccacatgcgcctgccttatgtgctacaagcatcatggccaggccctggggcagcaggtgtgagctggaa

SEQ ID NO: 23772 - DNA, 566 bp, Homo sapiens
  misc_feature (40)..(40): n is a, c, g, or t
gcacaagaccgccaccgcgacgttccctcagaacaaacgncacccaaccacctagttaactttggggactcccagaagataaaataataagaaaaaaagctgaaatcctgccatttgaccagtgaacgttcctgatctagtggacttagaaaccttcccgagggacctgatgcaaatttgcaccaaagcagcagctgcatttccacagttctagcttcaccttcacaatgtttcccttgctcaaaaaggcactaagtcatctccaagtttgaagcacccagcgaacaacagcaaggcagagccaccagaagcatacacctgattttcatgacaaacacggtaacgctgtatgagctagtgaaaccactttctgtattgctgtacggatatgtatagcaacacaaactggaatagaatggaacatgtcccctgttggcagagtcaccccaaaggaatggagagataagtaggcatcccagctggtataacactgaattgttcagaaaacaactcataattgatgccaagtgaaagcactgtgtacccattaaaacattacattattg

SEQ ID NO: 23773 - DNA, 553 bp, Homo sapiens
agcaaggcaaatagtcaagacggagatgaacttctttggcagttaactttggggactcccagaagataaaataataagaaaaaaagctgaaatcctgccatttgaccagtgaacgttcctgatctagtggacttagaaaccttcccgagggacctgatgcaaatttgcaccaaagcagcagctgcatttccacagttctagcttcaccttcacaatgtttcccttgctcaaaaaggcactaagtcatctccaagtttgaagcacccagcgaacaacagcaaggcagagccaccagaagcatacacctgattttcatgacaaacacggtaacgctgtatgagctagtgaaaccactttctgtattgctgtacggatatgtatagcaacacaaactggaatagaatggaacatgtcccctgttggcagagtcaccccaaaggaatggagagataagtaggcatcccagctggtataacactgaattgttcagaaaacaactcataattgatgccaagtgaaagcactgtgtacccattaaaacattacattattg

SEQ ID NO: 23774 - DNA, 505 bp, Homo sapiens
tcccagctactcgggaggctgaggcaggagaatggcgtgaacccgggaggcggagcttgcagtgagccaagatggcgcccctgcactccagcctgggtgacagagcgagactccgtctcaaaaaaaaaaaaaaaaaagaaaacgaaaaccaatcattgacctgaaaattgtgtaattgaatttaaaaattaatctcaggtacagatacctatttagatttaaatgttgtttgatattttatgtccacaaagcaaatacttaatgagtcctaaaatgcatctctagaaagctttagaaaataaagcttaactttgcagtctaaaccactattgaattaatcttatttatttgttatatagatttcaaaggatcagaaaataggactcaggctgggtgcagtcgtcccgcctataatcgcaacacttagcaaggccgaggtggacgatcacctgaggtcaggagttggagaccagcctggccaacatggtgaaaccccgtctctact

SEQ ID NO: 23775 - DNA, 458 bp, Homo sapiens
ggcttacactgctactggctatttactaaaaatcagagcaaactttgccttattattatgtattgcatatatatttttgaaaggtcactcttgcagttttactaaaaaaaaaataaataaaagtttcagtgaattccggaagtttgggaattctcggtttacgctagccctgtcctgtgtttctgtttggctctgtcctcaggccttgccaccattttctctcggtgaaagaacttggcttcacattctgttcagtttcatgaacctgcctgtcactttgaggcagcgtttgggattctgcttcattagcctttgaactcatgaaccaagttgagaggatttgctactatagacaattatttgatcttcgagatattttgaacagttcccaagtgcaacaccagtggttgtccaaaagacacagagaagtgatgtgaaattttaattatgtaaaaaaa

SEQ ID NO: 23776 - DNA, 421 bp, Homo sapiens
gtatttgtaatttgttccctttcactctgctcaactaaaacaaggatgaaaaacatttttccattaaagattattaattttaaaaattaattgagtcagaaaaaataaatgcaaattaattttattttattttaaaattattttaatcttttgctttaaagaaaacactgagtttatgggtcactttacaagtgaaataagaacacagatttgggggtaataaacataatttagcaccaaatatatttgttctaatttatttcacagttcaaaaacaaagtgtaagagtagaaaaaggaaagaaagaagaaaggagagagagagaagtacagaaaaagttacaataatcaaaataaaaatcaagagaaaagggaaaagaaagactagcagagacataaatggaaagatagtcgtatgactt

SEQ ID NO: 23777 - DNA, 213 bp, Homo sapiens
acacaaaaatgtatttattgactcaaataatttggaaaaccagggcttatcagtccagctttagatatgactagatttagaagttcaaaataattttctctgcttactaaacttgaagttggctgcattattgggcaggctctccccacaatgtggcaaaaatgaccagcagcagttcctagtttatgttgtactggcagctggaatttctag

SEQ ID NO: 23778 - DNA, 581 bp, Homo sapiens
acaaaactgcaatattaatagatttacatacattgataaattgataaatataattttgcttatcaacaagaaattaagaattactggtacgatttggtaatgctgtcacccaccgctgtcattctttttacgtcctctaaaaagtatatgccgtataatatttttgtgcattatttcctctgatttctgatggttggaggactatgactggtctaaaattgttaggcaatgcagagatttcttgtggttattcattattttaatttttcagactatgagattcagaaattattctcattataatccatgcaaaaaggagaggtttaaatacgcagctaaagctaatcaggtataggaacaataaataatactctgctaaacaatagtcttaacagttcctaagttttaaaaaactgacactttgcttgcatttacatgttaatttatttgcttttgctgcagcagcttgactgctctttatcagtgctcaagtaaagtaaattttgttgtggtcctttaagattagagtagagcagggtaaaatgtctgattaatttatgcatattagcacagccgacttt

SEQ ID NO: 23779 - DNA, 394 bp, Homo sapiens
gaaatataagtaaatatataccatttgaatcttagtcattattttctccaatatatatacatcatttaagaattatttttaaggaatctattttaatattctcacgttctaaaaacttgtcttcaaattgaccctttccaaagtcattttggggacatgtatcatgcagcacaacttactgacatttagcttccttcttgtgaaaggattatctcttaagtattttggtatggcaattatatgaaagtttaattcactcctaacatgtcagttgcattagacacttaagaatgttgttggttgcaggtggctcgagtcttttattatctttgtgtcattgcactgcagtatgtggcgcctctggtaatgctgcttcacacaactctgcttttga

SEQ ID NO: 23780 - DNA, 470 bp, Homo sapiens
gattaggagactgttacctacaaaaccaccacaaagggtctttgttggtcaactcattcaagaggcttcgagatctttaataaggacaataagccaggctcagggccttaaatccacagcaacatagtatagtatgctggtctaaatgttttttttttttaattcatcctcttaatgtaattggcaggctttccctttacaatgaaattatctagaaattaggaggcagactaatatgtagttagggttgatttagatttcgagccatctaaggacagaaaactcccagtgttcagactggaatggtgagctgggattaaatttttgaattcccagtgggccaagtagagattcagatctgaatgccactaacccctgtgtgaaaggaaacccccatgtcagcaacctggagtcagcagtacccgaagagaggccttcacaaaggtgcctagggatcttctcggtcccca

SEQ ID NO: 23781 - DNA, 395 bp, Homo sapiens
ctttcttaaactatacagtcatgcactgtataacaatgttttggtcaactataagccacatgtatgatagtagtaccataagattataacactgtatttttactgtaacttttctatgtctagatgcacaaatacttaccactgtgttacagttgcctacaatattcaatacagtaacatgctgtaaatgtttatagcctaggagcaataggccagaccatataacctatctgtgtagtaggctatactatctaagtttgtgtaagtgcactctatgaggtttgcaacaatgatgaaattccctaatgacaccttgcttagactatatcccatcattgtgctatagcccatcgttctgaatacatgactgtattcagaaagaagaaagctcctaa

SEQ ID NO: 23782 - DNA, 423 bp, Homo sapiens
actttctgtcatgcaactatcttaccaatgtctacagtaggtactatttctctctcactaaatccaatcaccataatctcattgatgtcatggaccagtgtgatatctcttgaaagggaaaaatgatcaagatcccactgggtgcagtggctcatgcctgtaatcccagcactttgggaggccagtgcgggaggattgcttgagcccaggagtttaaaaccagcctgggtaatgtattgagaccctgtttctacaaaaaaatttttaaaaattagccacatgtggtgatacatgcctggagtcctagctactcgggaagctgaagtgggaagattgtttgagcgtgggacgttggggctgcaatgtgctctgatcgtgccactgcacttcagcctgggcaagagaatgagaccctgtctcaaa

SEQ ID NO: 23783 - DNA, 4668 bp, Homo sapiens
  misc_feature (1)..(1): n is a, c, g, or t
  misc_feature (1501)..(1501): n is a, c, g, or t
ngtaaaattgctgagtactttacagacatcatctcatttaatcctcacaaaagccctgtgaggtcagtactgttgttatccccattttactgatgtggaaatggtctcataaagaggttaaagaatttgtcctactcatttgtagaggtagagctaattcagacatgagcctggctgactgtaaggtttgtgctttttatccatataataatctccaaccaaagagaaatgaaaaaccaccatacggacacaaagagcagctcgcccagcttcttactctgggaaaccagattgattttgaggtggggagaagcctggataaagtcccatacacttagatctctaggccataaagattcattccacagcattcaattagaataatgtaaatatgtaaaacccagtgcctggtatatcataattatttagtaagtgggagtgaactattacaataattctacgactaagccagaaattaggttcctgttcataaaataggaaaagaaaaaaattcccatagtcccacaatcccttacttgaaactcttggagtcatgtgagttttgttttagaattatagcaaggtaatatgtatatttaccatatgctatgtaacatccccagcagagaccagggcagccccctgtaatcaaaacaccaacaatttctgcaatgaaatatatgaatattcacactaagcagaagaaatgaagactatagccttaaatcagttcaggtaaagttttgctgccaaatgagtgaagaaaaactcttttgcatttcagagcttattgtataagagttgaagggaagggattgtgtacttgtaaagcatacaacaacatttcaaggagaataaagaagcaattactttactaagttgaatagacaagtgatagttctgttcaaaagagactgttaatcctaagtcaaagcatgaagtctttttggcctctgatttcaaatgctaataattacatccaaagagagaaaacaagcatctcttattttatcttctttcaaataagtatgcgtcactttaaatgaagttggggactaaaatcaagtactatattttttttctagaggatctgtgtttatcaaagaaaacacaagaagctaaatccatttgaattgggttttttttttgtagattcctttttgtaatagaatctcatttttttaaaatgagaatggaaaaatgatattctgtatggtggtctttaagtgctgaaggatccacagagtcttctgaactttgaaagaaactaagtttggccactcctgagcaaaagtaatctagaaaaagcgataagtatataaggtgatggatatgttaattagcttgatttaatcattgcacaatgtatacatttatcgaaatatgttgtatatcataaatctataaaatttttatcaattaaaccttaataaatttggaggagaaaaggaaatctaccttccatccttccgtaaaaggaattgaataattctaaaggaanggaatttcaaattttaggaagataagcaattatagttgatggcagtacctgttgtagataaaactgaagcagaataattaaacacctgcttctttatctctaccctcttcatgtcctagcttccttccctactggtttatattccaccgtacatgattacacatcctcagcttcctcgttcttccttcctctattgaatttgaccccacccctggtcaaatccaactgttcatttgctctgcattggcccttgagtagctgaacatggttggagtaaatggatgaccatgttggtctggcttgaattttaaattaatgatcactaatcccaagttggcccttagggctgcttgacagttccccttcatttccttagtccattcattcttttccatcacctaaacaattatttcacaccttctcttgtctctatgcctctggtatcctcacgcagtgtcagctgatgacctttcctttttactttcactgagaatagacacagtcgtgaaagaacttccacatgatcgcctaccccttaacctgcatgcatttgtatgcatgtactctgcctatcctcctgttagaattggccaagcagcagtggtctctgaagtcagcctttctacttctgctttgatctccacctctcttaccttcttccccattaaatcaatttctaggagttgttccttaataggtagttgagattgagaaccactctgctagaatgtaaactccacagaccaaagatttgttctcttgctcattgctgtattctcaatgcctgtaacaatacataatccaatagtaggcactcagtcttgtgtttaatggatagatgagtgaatggataaatgaacaaatgaatctttctggtaaaaaagatataaattgcagtacaagctctgaagagcttaataaataatctttccttgtgttttatgatcaaattggagctaaactgttcatcttacaatgttcatttaaagagttttctgctgatttactgtaactatcctcacctgaaaacttttcctagcatttttatgcacacagtcctagttatctggatttttgttgttgttgttgttattgggaactgagatttttctgatttctaagtggttaagctttgcttttcaaatgaatttctctggtggcagtttcacaagtgaatagatctgtacaaatccagaactgttcattttactcattactgctacttggaagacctgagttcaactgcctgctccatcactttttctcactgaagtgaatctgggcatgattcttgtattgagaaatgcctagtatagtctcaatataattgattgcatttctttcattaaaatcaggggaaacatgtttgtttccttgacacctgtgtttcatgaaaaatcgtagaaaacagccacatgtattttaatttagttctatatctcttttcccttaatcctaatttgtagaagtgtggctgttcaaacagactctcatgtattttgaaatacatgcagtgcggtttttgtatgggagcaagtactatggattttcttgggctataacttagtagcatggcagtaggttatagaaccagtccatgaatcctgcagttcttactaatgtgagtcaaatggtattatggtaaagatacctcgctgcttttttggtggctgtgtttttatttgtaggacaaccctaaaatagaactcagctaggtcatttctaaacgtaatgttgtggtggataccccagaacaaacaccattaatgtggttagtcatttacttggaaagctattgccagggcaaactcagagccactagagacagaaagcacataagtaaacctgcttgttaaagtggagatacagagtaactcagcaatgtaataatacgaagtaatggttaagtattcagtttatagaaatttgactcagatgtttcaataaaatatctgtttttgtaaatcaaaagataactaccttcattggtatttgggaccaaagtttttcctccttcactttctgcccttttggaagacacagtaaaaatagaattcatgaaacatttctaaataatgggtgtatagagattctctttatgtgtggtatcagtgctctgctatgtaattatttgttatattttaaatttcaatttatgtgttctctcttgcccccttcagccccgtgccacataatttttgtttttggtggaaccattcagccttaaatacttttagtatatatcgtctgagaatagggacataactccaaaactactatcacacccaagaaatttgactttgattcagtgccatctaatatataacccatattcaaattttctcagttgtcccccaaataactggattttctaattttctttgatccagcatctaataaaagttcatatgttacatttagttgttttgtttcttcatctttctttaatctaaaacagttcccatgccctccctttaaaaataaaaataatctatcttgacatttctggagtctagaccagttattttatgaaatgttcctcattcttgatttgtctgattattttcttactgttaattttaggttaaatctttctggttaccatatagagtctgattattttttaagaagtgtagtattcagttatagagaatcttgacttgttctgcctgcttgcacctgcttttcttagagtcctaacctctcaactcaggtgcaaggaagcagagtttgactacttttgtgggtactgaagacctagcttattgtaacaacaaaaaaaaatgtggttttatttttagtaaaaatcagtgtccaatatgcgctctaaatataatctggttatttttgaaatttatgttaagaagtaagaatttggctgggcgcggtggctcacatctgtaatcctggcacttcaggaggccgagacaggcggattgcctgagttccggagtttgagactagcctaggcaacatggtgaaaccctgtctctactaaaatacaaaaaaaatcagccaggtgtggtggtgggcgcctgtaatctcagctatcaggagtctgaggcatgagaattgcttgaacctgggaggcggaggttgcagtgagctgagatcgtgccactgcactccagcttgcgcaacaaagcgaaactgtctcaaaaaaaaaa

SEQ ID NO: 23784 - DNA, 322 bp, Homo sapiens
tatatacatgacacatccttctccagttcattcatcctgctccctggaaagctgatgtgaaagctggacctccagcagccatctaggaacataaggataaggaatggcagaagggtgagctggaaggttcctgagttcctaatgactttgtggacccaccacaccgacattgggttacctacatccagacttcttttatgtgtgagaaaaattaacttgcttgagttactgttatttgaactctattttatctaatatcccctccaaactggtcatgtcttgcaagacaaggaacttggtcaataacatcaacattcactat

SEQ ID NO: 23785 - DNA, 161 bp, Homo sapiens
gactatgggagattataaagagtatgttgctactatttagcagcgactgatggttaccatcaaggaacatgtggccagggttagcagatgttccatgttttcaagagaagctctctgtttttaaatgttgtcagctagttcaaatttaaaaccttctggcc

SEQ ID NO: 23786 - DNA, 3215 bp, Homo sapiens
ggagatattacaggggacccagcccgcagcgacaggcacaaagtcacggggtaatgaacttcggggacccttcgccgctgcgtgcgcggctctccccggaaacccggacctggccgcctcttccctcggaagatttcccagcaatctagttttcccactctgcgcttgggttccggcagcgcggagcccgtctgcctctgagactgcggtagtgttttccttctttccttgggagaccagcggtcggcagagattgcccacactctgcatgcctatgtagagggagagatcgaagactgagtgacaggaatggggaaaaagagggatttcgctccgtaggaaggccattttcgtgtctccatctctgtctttcaacatccctctcttgctgttcttccttcttcctcagtcttcctgtccatctctccatctgtctgtccatgtgtgtgtccatatcaagcagcattcccagcagctgcggttttgcaagagccgggaagaaacttaaggatgcttaaatttccactgttggacgaattctgagcgcccagggagcagcgcagcgcgcgactgacacccacctgtcccgcccaggagccttgcaggctggagggcggctggagagcggcggcgcccggcggcgaggcgggcgctgccggccgggactcgggcagcgcccaccaaccgctccgccccgggacagccagcatgagcaagccagccggatcaacaagccgcattttagatatcccctgcaaagtgtgtggcgaccgcagctcggggaagcactacggggtctacgcctgcgacggctgctcaggttttttcaaacggagcatccgaaggaataggacctatgtctgcaaatctggaaaccagggaggctgtccggtggacaagacgcacagaaaccagtgcagggcgtgtcggctgaagaagtgtttggaagtcaacatgaacaaagacgccgtgcagcacgagcgggggcctcggacgtccaccatccgcaagcaagtggccctctacttccgtggacacaaggaggagaacggggccgccgcgcactttccctcggcggcgctccctgcgccggccttcttcaccgcggtcacgcagctggagccgcacggcctggagctggccgcggtgtccaccactccagagcggcagaccctcgtgagcctggctcagcccacgcccaagtacccccatgaagtgaatgggaccccaatgtatctctatgaagtggccacggagtcggtgtgtgaatcagctgccagacttctcttcatgagcatcaagtgggctaagagtgtgccagccttctccacgctgtctttgcaagaccagctgatgcttttggaagatgcttggagagaactgtttgttctaggaatagcacaatgggccattccggttgatgctaacactctactggctgtatctggcatgaacggtgacaacacagattcccagaagctgaacaagatcatatctgaaatacaggctttacaagaggtggtggctcgatttagacaactccggttagatgctactgaatttgcctgtctaaaatgcatcgtcactttcaaagccgttcctacacatagtggttctgaactgagaagtttccggaatgctgccgccattgcagcccttcaagatgaggctcagctaacgctcaacagctacatccataccagatatcccactcaaccctgtcgctttggaaaactcctgttgcttttgccagctttacgttctattagcccatcaactatagaagaagtgtttttcaaaaaaaccatcggcaatgtgccaattacaagactgctttcagatatgtacaaatccagtgatatctaagctcacaagatacccacttttcaggatgggacagtatcagatgaacttcaacccatggagaacaagcctcaactaacaaacccttcaggaagcatataccggggaatgtgtagccttcaggaaaaaaatgccaattgacacaaagcattccagtagctatgacctgccgccctgaccaggatagggcgggtgggaaggagaggggtgcaacaggaccgcctgcactgaaaactcactgctgccatgccctgggagggggcaaactgggggttgccacaggccgtgccattctgcctcttacctggaagatcaggctgaacgatcaaaagctgaaacataagtagtgctttctcttcctttttagcatacaaagtttggtaaccaaatatagctctgtgtataacatcgtactgcggccttcaaaactacgttatgttggagcatttattttaaaaataatggtaggttttaaattaaaagtgttatcaaaagtttcccctctattgtaatacattattaagtggccttcagaactgagttaataagtgaaaagtagcttatgccatgtgatttgctttttctctatcttcttttttcttttctttctctttcttttgttctttcttcttcttttttaataccataggccaggcaaccttgtcaaaggaattgatggacaaaatgagattctcaccaggacttcaggttggataacatgtcaaaaagagaagagctttactaaaagaacataagtcaagggaggatgaataaaaacagcaaaaccaaataaagtggagatgagtgattgagtgaggtagattgctgtcccgttaacatagtgctgaaaccaaaggcagtgggggtccaaactcgtggtgcagcaagtcacaccagacaggaaacgaatatggacgtaattgcagaaggaacttcaaggagatgaatgaatgctaaaagggttcttgactgatccattgctaacagcctgagactcttcaatgcctttccgaaaactggtttctagtaaagccttgaatgaacacacacacacacacacacacacacacacacacacacacacacacacaccgtcctacactttaagctgctcctttggtatgactctatacttatggaaatgtagaaacaaacatttttaaatagctgctgtacttttcacattttgatttattaggtactagcactgaggaaaaaaaattcagcacttggactatcataggatgagtaaaacttttcttgtacaaagtgaattaactgatttgtgaagttaaaaggttgtactcattgtatttacaaagaataaaaatatattgaatttaaatgaactc

SEQ ID NO: 23787 - DNA, 481 bp, Homo sapiens
ggctgaggtgagaggattgcttgagcccaggatgtcgaggctactgtgaaccatgatcacaccactgcactctagcctgggtgacagagcaagaatctgtatcaaaaaaaaaaaaaaaaaaaaaaaaaaaaaatggaaataggtacttatacattgtctgcttgctttttctctctccatctattagttttctcccttcttgctatataatggcatgctttacttggtgaggactaaggccacctttgttcttcaaggcctacatctggaggatctcactggcaatgatagtcttacttctctgccctcattctggctttagaattctggaaacagaaaatattgacccagtcttggtcaaatgctcccccttagaacaatcaactctggcaggcgcatggcatggtcatataaaaactttgtattccctgatataacaatatgattaggattagaaagccaatagtttccaggagaaaga

SEQ ID NO: 23788 - DNA, 517 bp, Homo sapiens
gagcaaaatcgtgtgtgtagaatccttctagatttctccaactgccctggtttatagctgtctgacccaaacctaatttagcaccttttttttttaaagcatttttctaaaagaaacttctctagagcagtgccgtgtgcttccgtggggccgagctctgtttccacggatgcgtgcggccacaccgtccgatggtggactccaagctccccagccaggagctgcctgcccggggtggccttcgtcgtgcagcccgagcctgggcgcccctggagctcctgctgtagcagctcttcagccttcaggaggctctcagccttggtttccgtttccgacacgggaggtttcccctccgtgttttgcaaaggcacatacgcctccagatcggtgaggatgaggctgctgtttactacactgtgtgttcactgatttcctacccttttagggtgattgccgcagattagccctgcaggttgtcagtccgtagggttaataagctagatatggatcgcgctaa

SEQ ID NO: 23789 - DNA, 304 bp, Homo sapiens
ttcactgtcagcgcaggctgagcctctgggactgcacccttctttgcactattacctccagttgctgaagaattgttcaggaacgttgaaacttggaaataaaaagggaaaagcaatgtaaatataggaaaaggctgactacgcattttatgaactcatagctaatatgctgcatgttcacagaaaggcagcaagccttgctaacatggaaatctccaaacatttctttgtaattctttgtaaacctttttaacttaatgtattgctaaactttgttaacctttacgacataactaggattcat

SEQ ID NO: 23790 - DNA, 423 bp, Homo sapiens
acaactctgaaggctataccaaatagtgtcctggagggcttgggtggcattggcccgttgtctacaatgataatctatctgctcatgaatgctaccactactgcttcttcttctctgtctgaattttccacttctctacaggtgatggccctcaaagcctgtctcaggatctgcttctggagcaaagaataaggacccaggttttgggattatgagattaggcacagatgtctgtaaaagtttgttgaaaggaattgaattatgtgaaatttaattgaattaaattaaattatcctgcaacctcaatctctttgggccaaatccaaatactcatgtgctgttatgagagctgggaaagaaggggtggggcatgttattattatcaatctgttgacaattaatttataaacaatcttaactagt

SEQ ID NO: 23791 - DNA, 354 bp, Homo sapiens
ttttttttgagacagggtctcactctgacacccaggctgaagtacagtggtgcgatcaaggctcactgcaccctccgcctaccaggctcaagtgatcctcccaccttggcctcctgagcagctgggattacagtcatgcaccatcacgcccagtgaattttttgtagagatggggtcttgccatgttgcccaggctggtctcgaactcctgagctcaaacaatctgcctgcctcagcttcccaaagtgctgcaattacaggcgtgagccacctcccctggccaataagtggcttcttacaggtacatcaaaagcatagaacccaaggttccccatgagcctgcttctggatgtt

SEQ ID NO: 23792 - DNA, 274 bp, Homo sapiens
accacttttaatatcttgggaaaaagtatctgaatgctattctgatctcaagtctggttttagggtttattgtagtagccatttagataaaatatctgtggtacggttcatttggattaagaacacatcagaatcagatcctttcattcaaaaatatttgtttacaggatagatcttcagtaaagagaatgcagcctgaatcattcaaatatatttatgagaaagaatataacttacctgagtaattcctggccagtcataaaatgctgaggag

SEQ ID NO: 23793 - DNA, 187 bp, Homo sapiens
ccggcccactgagcctcccagatgagaacctgcatttcaacaaggtccttgatgcagcaaagtttgagatatactgggctagaacactcaggggacacaaaggttctctgaaaactaaggaaaataggcagggtgtggtggctcatgcctgtaatccttgtattttgggatgccaaggcgggcggat

SEQ ID NO: 23794 - DNA, 405 bp, Homo sapiens
acacacacacacacacacacacacacagagcagaggaatcaggagccgccttccgcctttctgctcttcatcctagcaggcttttcctgctggccttgtttctgatgggccaattacagtgcaaaactgttccagacctgacctttcatcccggttccagtggcccgccaagaatcagccttgccttgttacacctccatcagcagcacagcccaaccgcagcttcatcacattaggatgtggcttcatcacattatgattttctctgagttggggagcaaaggtgagttggggagaccaggcagggttcctcacaaagttgcccaggaagggcaggaagacggggcagtgtccgagaggcagcatgacccaggggtcaggtgcggaggccctggagccaaactg

SEQ ID NO: 23795 - DNA, 1220 bp, Homo sapiens
tactatgtatatttactctgtggtatagtatactacttgtaaaacaaataacagcatcaaaacagtgaaatctccctagagacttttcaaagaaaaaaatgaatgtaatgtatctgttataactactctaaaaattttaggctttattttatagtgctataaaagctcttaagagtttattcaaataaaacatgaaatataaattatgtcatatatcctaagttttgaatttgtaacacaagcaaaatctgtttgtaatacatatgctgctgttagaaataggtgcataattggggtgagtatataagtgtgtatttatgcataattatacactgttatatttggtattatgataactattgttataactggttatgataaaatctggtatactagatactggtataactggtattttgttatgatatcccaggcagatgaatacagccccccactaaattccatgaggtgtaaagtggcggttggctctcaacaaagggtgatgctgtcctccctcctccccgccaagacatgtctcaatatctggagacattttggtttatcagaactgagggtaggggtaatataggcatttagtggttgtaagttaaggatgctgctaaacatagtacaatgcacaggacaactcccacaacaaaaatatatctagcccaaaatgtcagtagtgctgaggttgagaaattgtgaacatctttttaggatgtatgtgctcttgtaagctaacccaagtcctttacggaaacaagtgagttatcaggaaatatacatttaagagcaacaatatacttcgtgttagatgcagttattttcagtacttgcaaaagccagtaaactgtgattcttagagtgaatcaaactcatatctaccaaatgaaaacataaccctgaagtatatatgtgtgcatgcatatttatatttgtatgtatgtgaagtataattttctcttaaaatcattcaccttataagctgccataaattttctaacactagatacttgtaatttttaaataaatattttatatacgtgtatgtgtttgtgtgtgtgtgtttattcacccaggcattagaattgataactaaaaagcatggcagagccataaaaaacattttttgcaagtgtgaaataatatggcttgactgccaatgttactatttttggcaaaaattttctgaaatatttgtatcatcttagctgaaa

SEQ ID NO: 23796 - DNA, 347 bp, Homo sapiens
tagttggtgaactgcagtaaagttggtagggataaatctggcagattaaatacgaactatttcaagaacagccttaaatgacaacttgacctaggagataaacaatttttttttttttttttttttttttttttggagatggagtctcactctgtcaccaggctggagtgcaatggtatgatctcggctcaccgaaacctccacctcccaggttcaagcgattgtcctgcttcagcctcccaagtagctgggactacaggcgtgcaccaccatgcccggctaatttttgtatttttagtagagatgggatttcactatgttggccaggctggtctcgaactcctgac

SEQ ID NO: 23797 - DNA, 485 bp, Homo sapiens
aacagagtgaaatttatagcattaaagcctgtgttagaaaagacaaaaaagatctcagattagtgggctcaactaccaccttaggaaactggaaaagaaaaaaagacccaattaaacccaaagtaagcaaaataaaggatataacaatgagaatagagatcagcaaactagaaaatagaataatttaaaaaaactaaccaaaaactagttatttgagaatgtcagtaaaatggttaagcctctagccagactgatcagaaagagaagacacaaattttcagtatcagtaatatgagaggtggcatcagtacagattcaacccatattagaaggaatatttttaaaaactatatatgggctgggtgtggtggctcacgcctgtaatcccagtgctttgtgggggccaaagcaggagaatcacttgacaccaagagttgaagaccagcctgggtatcatagtaagactccatctcttacaaaaaaaa

SEQ ID NO: 23798 - DNA, 433 bp, Homo sapiens
gacatttttgtaaagttgcttaacctgtccatgcctcaccttttaaactctttgaaaaatgagtacttgtgtttgtcaagaagattaaatgagataatatatataaagtacatagcatattatttggtacataataaggtcttggtaaacattagctgttgcttctgccattgctcttttaaacaggcttagggtccagacctatagtcaggagttcaaaagaagggatttcttgtttaactttccaaggttcttctattaggcacactttctttctctcttaatcctatagtggtgtcattcttatgctacctttactattttgcatttagactgcaaaatagacacccagcaacccattttaatcttgccatattttaaaatttgttggcacattataaccagagctcactaagctcttcattcattcact

SEQ ID NO: 23799 - DNA, 439 bp, Homo sapiens
tgcccttgccgaggctgcctggtggagggagtccgcctggagcagacagcaaggaagaaagccaagctgagagctgcggggaggcggattccccatgctgtcgtacctgagcacctggatccaaccctgcctgaagctagacctggggcttaatgtttaacaaattaccaagtccatcttctttcctaaagcccatacaagatgcatttttataactggagtgggaaaaatcctgccaggtgagactctgcccaggctggcatcctctacctcagggaagaacgggtcactcctgcccaagggaggtctgtggctctgactaatgaaaagtggggaagttagaagattttctgatagataatagtgtgtttgtcacggttgcggcaggaaaggcatctcccaacactgcaagctctggagagaggaaggtgctgtcctt

SEQ ID NO: 23800 - DNA, 667 bp, Homo sapiens
cgagacagggtctcactctgtcacccaggctggagtgcagtggcgtgatctcagctcactgcaacctccacctcctgggttcaagcgattctcccgcctcagcctcccaagtagctgggactacaggtgcacaccaccacgcgtagctaattcaagtgtccctttatgaagcccacgtaacaaacccacaggctcagactgctagacataaggtttcttccttcttctggaattcaaggagtttctttggaaagcatgctccatgcatcacacattccttttgggggctgctgtatacagaaaattctgacttcagaattcaacgtcagaaaccaagcaagggcacctgctgcccgaaggatagtcacgtacacttccatcttaggaaactgctaatagacacaggggctccacccgggggaagccaccgtgagtcacaggcctacgcatccggtactactgggcccaaaatatctgattgcgtctggggaagcgacagccaagcccttaggcagaatcctgggtgtgctgcttgaaatcctcaaatgaagccggccacagacaagacgtggcaggagggccacgaaaccaacacgccctgacaatgccaagaataaacattctgcagactgaaaaatgcccctgaaaatactggggcacagtgggc

SEQ ID NO: 23801 - DNA, 613 bp, Homo sapiens
cgagacagggtctcactctgtcacccaggctggagtgcagtggcgtgatctcagctcactgcaacctccacctcctgggttcaagcgattctcccgcctcagcctcccaagtagctgggactacaggtgcacaccaccacgcgtagctaattcaagtgtccctttatgaagcccacgtaacaaacccacaggctcagactgctagacataaggtttcttccttcttttgggggctgctgtatacagaaaattctgacttcagaattcaacgtcagaaaccaagcaagggcacctgctgcccgaaggatagtcacgtacacttccatcttaggaaactgctaatagacacaggggctccacccgggggaagccaccgtgagtcacaggcctacgcatccggtactactgggcccaaaatatctgattgcgtctggggaagcgacagccaagcccttaggcagaatcctgggtgtgctgcttgaaatcctcaaatgaagccggccacagacaagacgtggcaggagggccacgaaaccaacacgccctgacaatgccaagaataaacattctgcagactgaaaaatgcccctgaaaatactggggcacagtgggc

SEQ ID NO: 23802 - DNA, 368 bp, Homo sapiens
ggttgatgaagaaattcagaaggaaatttgacgatttcttgaaacaaatgcaaatggaaatacaacataccaaaatctataggacacagcaaaagcagttgtaagagggaagcttgtagcaatgaacacctatatcaaaaatgtagaaagactgaacgatctaatgaggcatctcaaagaaccaggaaaacccagacaaaccaaatccaaaatgagtaggaggaaagaagtaataaatatcagagcacaaataaatgaaaaggaaatgtaaaaaacaatacaggccaggcacagtagttcacccctgtaatcccagcacttttgaggctgaggcaggtggatcacttgagcccaggagttcaaaacca

SEQ ID NO: 23803 - DNA, 537 bp, Homo sapiens
aaaagctggaagatggccctactttcttgaagtctggtgatgctgccatcgttgatatggttcctggcaagcccatgtgtgttgagagcttctcagtctacccacctctgagtcgctttgctgtttgtgatatgagacagacagttgctgtgggtgtcatcgaagcaatggacaagaaggctgctggagctggcaaggtcaccaagtctacccagaaagctcagaaggctaaatgaacattatccctaatacctgtcacccaagtcttaatcagtggtggaagaacagtctcagaactgtttgtttcaattggccatttaagtttaatagtaaatgactggttaatgataacaatgcatcataaaaccttcagaaggaaaggagaatgttttgtggaccactttggtttttttttatatgtgtgtggccattttaagtcattagtttttaaaattagtactttttaatggaaacaacttgaccaaaaatctgtcacagaattttgagacccattaaaatgaagtttactaagaaata

SEQ ID NO: 23804 - DNA, 340 bp, Homo sapiens
taattgatggggtttcaaccatgttgcctatgttgagttttctcaaacttctgggctcaagtgatccacttgcctcagcctcccagtgttgtgattacaggcatgagccactatgcctggccccaaagcaatattaatggaaataaaaataacagtttattttcataaattaaaacaccctccttaaatcttgccttcccctccccccaaattactaaatcactatttatatgtagaaaaaggtagacttatacgcctttaggtcacagtatatgggccaaacttaaggccagttttttattatgaatctggagtgaaggtttgatttcaccagagttac

SEQ ID NO: 23805 - DNA, 1706 bp, Homo sapiens
cataccctgaattttttttaattgagaaaagtaatagaattttaaatatagaaatatgagaattttaaagtaatatattgattaaagatcactgatgatatagatataatatatcataacagaaggaaagtaaatggacttgagcttaacttctcaccctggaattattagtgggtgaagaggggaatcattagcattctgggcgtttttatattaaatgttttgtgaatatgccagaagatctgccttcaacttgtaattaggcaagatagtaatgcttgatggtaacttctatgtttgtgtagaaataataccagttagttttggaaagccattcagatccattcaaaaattccataaagtatgatgtatgctttggaagagggatatgagtgatacaattgttatataaatggaatagacaaaccatttgaatgcatttttctagggcaaacattttttgagatttttgagttaagaagatttttcggcttgagcagaagatgtgtttgttttgcatttttcagctccaaggaaatagcccccatggctttaaaaggccctgaagttcagatagtagtaggtagtgttttgttattgttttaatttgagagttgcaggaataatgggcagagctgtcatttgccggtaggctaccatctgcctacatagaattattggactgtaagctaaaacagactgtaaaagacctacttgctaaagcattgcttattcagtggtattcagtagataagatctatttcctgatatattgtgctcaagttatttgcacatcttaagaaacttttaatatctaaaaccattgttgtaagatttaggtagaggaggtttccttttgtgtgatgcataataatagaaaacactgatacagtgtttactatgtgccaagcaagcatatgataactaattcttaacaactctatgaggcagggtcatttattatcctgttgtcatatgaggaaatctcgccagagagaagttaattaacctgcccaaggtcgtatagttagtaaagtggtcatgcttggattttaacctaggcagattacttcagagtcagcgtctgccttactatcctgtttcctgagcaggaatttccccttgtgtcaggcaacactaggtgttaggagtggaggtgtgcagatgttgccttacattctgttttcctgatgtggtgtgcttcctaagagtacaaacctgagcatatgtccaggcttgcaaagtctcaggcaaagctgggactaaggcttgtgtttcctgccttgggtaggattttcttctatgcatgttgggtgcttctcacttaacctaatagtatgccttgtctgttttccccccttcccctttttgtttaaattgattcacagaacacaaaaatttactaggtatgaacatttgaaaaaatggaatagagaaaatggtacatcacatgtaataaagataaatattgttttgtgaaatgtctttttcaatcataaatatgtgttgtgtgctatataaaactatttcttattgtggatattgaagtttgaagcctgttgttcatctatagatgcactggatgggattggaagtcttcagatttcagtagggttttccacaagcttatgaagacattgttctgtttaggctgtaaactgtttttatttcttgatgaaaaatgttcttctatttatatgatccca

SEQ ID NO: 23806 - DNA, 1479 bp, Homo sapiens
cataccctgaattttttttaattgagaaaagtaatagaattttaaatatagaaatatgagaattttaaagtaatatattgattaaagatcactgatgatatagatataatatatcataacagaaggaaagtaaatggacttgagcttaacttctcaccctggaattattagtgggtgaagaggggaatcattagcattctgggcgtttttatattaaatgttttgtgaatatgccagaagatctgccttcaacttgtaattaggcaagatagtaatgcttgatggtaacttctatgtttgtgtagaaataataccagttagttttggaaagccattcagatccattcaaaaattccataaagtatgatgtatgctttggaagagggatatgagtgatacaattgttatataaatggaatagacaaaccatttgaatgcatttttctagggcaaacattttttgagatttttgagttaagaagatttttcggcttgagcagaagatgtgtttgttttgcatttttcagctccaaggaaatagcccccatggctttaaaaggccctgaagttcagatagtagtaggtagtgttttgttattgttttaatttgagagttgcaggaataatgggcagagctgtcatttgccggtaggctaccatctgcctacatagaattattggactgtaagctaaaacagactgtaaaagacctacttgctaaagcattgcttattcagtggtattcagtagataagatctatttcctgatatattgtgctcaagttatttgcacatcttaagaaacttttaatatctaaaaccattgttgtaagatttaggtagaggaggtttccttttgtgtgatgcataataatagaaaacactgatacagtgtttactatgtgccaagcaagcatatgataactaattcttaacaactctatgaggcagggtcatttattatcctgttgtcatatgaggaaatctcgccagagagaagttaattaacctgcccaaggtcgtatagttagtaaagtggtcatgcttggattttaacctaggcagattacttcagagtcagcgtctgccttactatcctgtttcctgagcaggaatttccccttgtgtcaggcaacactaggtgttaggagtggaggtgtgcagatgttgccttacattctgttttcctgatgtggtgtgcttcctaagagtacaaacctgagcatatgtccaggcttgcaaagtctcaggcaaagctgggactaaggcttgtgtttcctgccttgggtaggattttcttctatgcatgttgggtgcttctcacttaacctaatagtatgccttgtctgttttccccccttcccctttttgtttaaattgattcacagaacacaaaaatttactaggtatgaacatttgaaaaaatggaatagagaaaatggtacatcacatgtaataaagataaatattgttttgtga

SEQ ID NO: 23807 - DNA, 114 bp, Homo sapiens
attcaccactcaccagtccttcagatcatcatcccccagccatgtatgtgcccatcctttttatagtctccctgcaaagctctcccatcttcaggtcctggatcttgcctttac

SEQ ID NO: 23808 - DNA, 344 bp, Homo sapiens
cctaactcttgagagaaagctagacatctagttccaggaagatcaaagaaccccagatacattcaacccagacattatagtcaaattgtgaaaaatcaaagacaaagatattttaaaatagcaagagaaaagtaacacacttataatggaatccccattagactaacagctgatttcccagcagaaaccttaggctagaagagaatgggatgatatattcgaagttctgaaagaaaaaaaatctttcggccaagaatattatacccagcacagctatccgttacaaatgaagacataaaatctgtcacagataaacaaaaaccaagataattcatcaccactag

SEQ ID NO: 23809 - DNA, 532 bp, Homo sapiens
tggtttttttaaatggatgttcagagcagcaccagtcacgagatcaaaatgataaggaaaaaccttaatggtcatttcttcatggcttaaatttctgggtatctctttttctacaatggcatctagtctaacagtatgtgtaaagttcccatatatataccactgagaaactcttgcaactaacatttgtaaacatgacaatttcctactagagggatctggaagtcaggaaagccaagaagagttaaacaaacagtgagatgtagtaagtcaattaaaatatgtgcattatattggctcaagaaaatgtgtatgcgtaacaaagtgaacaaaaagaaagtaaaaaagcagaacaggccaggtgcggtggctcatgcctataatcccagcactttgggaggccaaggtggtcagatcatgaggtcaggagtttgagaccagcctggccaatatggtgaaaccccgtctctactaaaaatacaaaaaaactagccaggtgtggtggcatgcgcctgtgtcccagctacttggg

SEQ ID NO: 23810 - DNA, 3094 bp, Homo sapiens
caggaaccacctactacagactcccaggaggcccagagtcctggtcattccagtgcagggcaagagggtgaggatacactgaggaggcgactgctggccccagaggctggaagtcatccacaacaaacacaaaaattggaagaaattaaagagaatgcacaggacaccatgagacagattaataaaaagggtttttggagctatggccctgtgattcttgtcgtcctggttgtggctgttgtggcaagttctgtgaatagctactattcctctccagcccagcaagtgcccaaaaatccagctttggaggcctttttggcccagtttagccaattggaagataaatttccaggccagagttccttcctgtggcagagaggacggaagtttctccagaagcacctcaatgcttccaaccccactgagccagccaccatcatatttacagcagctcgggagggaagagagaccctgaagtgcctgagccaccatgttgcagatgcctacacctcttcccagaaagtctctcccattcagattgatggggctggaaggacctggcaggacagtgacacggtcaagctgttggttgacctggagctgagctatgggtttgagaatggccagaaggctgctgtggtacaccacttcgaatccttccctgccggctccactttgatcttctataagtattgtgatcatgagaatgctgcctttaaagatgtggccctggtcctgactgttctgctagaggaggaaacattagaagcaagtgtaggcccaagggaaacggaagaaaaagtgagagacttactctgggccaagtttaccaactctgacactcccacctccttcaaccacatggactcagacaaattgagtgggctgtggagccgaatttcacacctggtactgccagtccagccagtgagtagcatagaagaacaggggtgccttttctaaagctaagcacagagttggttacagaaggtatatgtttatgaaaaagtttgtttaaagaccttccatttatatggaaggaggttgataaaatagcttgaggaaatagcctgaaaaacaaagatgagcttattttagaaacaagtttttattttttattccttgtaaaatctttctaatctaagccttgacaaagctaaaaattaacctgactttttttctttggaccaaatcaggtttgaaatatcgatgatatatatgagaattttttttaaattctaaaatatagcaacattgcacaggaagatactcttacttcttagagtaactacagagtgatttttttttttcttgagtgagactctgaagaaccttttcgataatgtttggacttggactaaagcaattagaattatgaagcaatgataacctttagaaaatttttctatcacatgttgaatattttcaaaccttactttaataatctaaagttacgggattatatcttatattaattttgcagttttgagtagtatgataaaagaaataagaattcaaaccattaagtacctacctaaatactacatgtaaggcactgtgcttttatttcattcagctgaggtataagcagctgtactcaaatgttcttaaaaatgagaaccagtggggaaattgtttataatcattggaaatgaagaaattccaattggctatatctttacttcagcttttcttgaacaatttacagcattgattttcaaactgtgtctactggcacccttcccctttgtatcagagcagttctgcttttaactgttttatatgttggggttctctatgagatttcattggaacaaagagtttcactgatattcgagtttgaaaaccattgattaagtgaaaaaacatcttagaagataggaaatatgtttaaaaaatgaatgtattaaatcttatgagtaggaagatgaaatacaggtttattgtatagatacattatttatgaaggataaagatctatacatgaacagcagaatgtataagctagcatttactagcatgtctctgatgcttttgttcatttctgttaatcgtcatttctgtcccctctgcatggaattttatacttgtctagggtaagagtttgtagactctttcagcagaacagattttaataaccaatttatttgttttattttaaaaatttatttttgaataaccaatttaatagtaaattttatatgaacatttggcataactttaccagtttatttctatgcagtgatggaacattatgtaatgcagctcatttcttgaccaactagttatagaagtaccattaggttaaaaattagagaaatctaagagatgttatactcagtgagaggaagcagaaatggtgggtagattctcagaggttttgatgttcagtactgacggaccatgttctgtgattgtaagaaagattgaaaacagtttgtatggagatagagttgattagcatttgagctctgaaagcagaactctagtaaaatgatctcgacctaacaaagggtctgttccattatatagactattaccataatcctggattatttcaactgggttttggcctctccattatatgagatcatatgtatatagctaagaagtctgattaaagtatggaaagattttaggaaacactaagaagatacagggatctttactgatacctaaaaagattacaattgagtaattgctcaattgagtgtaggggcatacctgaaggaagaatttgcatttgggacttcgaaggaagcttccaagagatttgggaagagacctgaacaaaaagttaaagcatggtgaatgtgatatcactgtcaatccagtataaaagcagaggaagttgaaggaaaatctgtatcccatatgcacattttttctgtctttttagatcttagatgctagcgttacatccacaaaaccagtgttgccttgtataactattatattggcctgctgacctgtgctacctcagatctgtcaaggaaccagtatgtcgcatattcttgtttcttcattcagttgaatatggtttttcatcatttctcttcaaaataatttagaaaaataaatttctaaagtcata

SEQ ID NO: 23811 - DNA, 3112 bp, Homo sapiens
ctggccaaggtatagaaagccttttagtcaaatcattctttggtttggtgagagatataaaggtatacatactgtcattagtgtactgcctaaaaataatattgattcttttcctctccagaggctggaagtcatccacaacaaacacaaaaattggaagaaattaaagagaatgcacaggacaccatgagacagattaataaaaagggtttttggagctatggccctgtgattcttgtcgtcctggttgtggctgttgtggcaagttctgtgaatagctactattcctctccagcccagcaagtgcccaaaaatccagctttggaggcctttttggcccagtttagccaattggaagataaatttccaggccagagttccttcctgtggcagagaggacggaagtttctccagaagcacctcaatgcttccaaccccactgagccagccaccatcatatttacagcagctcgggagggaagagagaccctgaagtgcctgagccaccatgttgcagatgcctacacctcttcccagaaagtctctcccattcagattgatggggctggaaggacctggcaggacagtgacacggtcaagctgttggttgacctggagctgagctatgggtttgagaatggccagaaggctgctgtggtacaccacttcgaatccttccctgccggctccactttgatcttctataagtattgtgatcatgagaatgctgcctttaaagatgtggccctggtcctgactgttctgctagaggaggaaacattagaagcaagtgtaggcccaagggaaacggaagaaaaagtgagagacttactctgggccaagtttaccaactctgacactcccacctccttcaaccacatggactcagacaaattgagtgggctgtggagccgaatttcacacctggtactgccagtccagccagtgagtagcatagaagaacaggggtgccttttctaaagctaagcacagagttggttacagaaggtatatgtttatgaaaaagtttgtttaaagaccttccatttatatggaaggaggttgataaaatagcttgaggaaatagcctgaaaaacaaagatgagcttattttagaaacaagtttttattttttattccttgtaaaatctttctaatctaagccttgacaaagctaaaaattaacctgactttttttctttggaccaaatcaggtttgaaatatcgatgatatatatgagaattttttttaaattctaaaatatagcaacattgcacaggaagatactcttacttcttagagtaactacagagtgatttttttttttcttgagtgagactctgaagaaccttttcgataatgtttggacttggactaaagcaattagaattatgaagcaatgataacctttagaaaatttttctatcacatgttgaatattttcaaaccttactttaataatctaaagttacgggattatatcttatattaattttgcagttttgagtagtatgataaaagaaataagaattcaaaccattaagtacctacctaaatactacatgtaaggcactgtgcttttatttcattcagctgaggtataagcagctgtactcaaatgttcttaaaaatgagaaccagtggggaaattgtttataatcattggaaatgaagaaattccaattggctatatctttacttcagcttttcttgaacaatttacagcattgattttcaaactgtgtctactggcacccttcccctttgtatcagagcagttctgcttttaactgttttatatgttggggttctctatgagatttcattggaacaaagagtttcactgatattcgagtttgaaaaccattgattaagtgaaaaaacatcttagaagataggaaatatgtttaaaaaatgaatgtattaaatcttatgagtaggaagatgaaatacaggtttattgtatagatacattatttatgaaggataaagatctatacatgaacagcagaatgtataagctagcatttactagcatgtctctgatgcttttgttcatttctgttaatcgtcatttctgtcccctctgcatggaattttatacttgtctagggtaagagtttgtagactctttcagcagaacagattttaataaccaatttatttgttttattttaaaaatttatttttgaataaccaatttaatagtaaattttatatgaacatttggcataactttaccagtttatttctatgcagtgatggaacattatgtaatgcagctcatttcttgaccaactagttatagaagtaccattaggttaaaaattagagaaatctaagagatgttatactcagtgagaggaagcagaaatggtgggtagattctcagaggttttgatgttcagtactgacggaccatgttctgtgattgtaagaaagattgaaaacagtttgtatggagatagagttgattagcatttgagctctgaaagcagaactctagtaaaatgatctcgacctaacaaagggtctgttccattatatagactattaccataatcctggattatttcaactgggttttggcctctccattatatgagatcatatgtatatagctaagaagtctgattaaagtatggaaagattttaggaaacactaagaagatacagggatctttactgatacctaaaaagattacaattgagtaattgctcaattgagtgtaggggcatacctgaaggaagaatttgcatttgggacttcgaaggaagcttccaagagatttgggaagagacctgaacaaaaagttaaagcatggtgaatgtgatatcactgtcaatccagtataaaagcagaggaagttgaaggaaaatctgtatcccatatgcacattttttctgtctttttagatcttagatgctagcgttacatccacaaaaccagtgttgccttgtataactattatattggcctgctgacctgtgctacctcagatctgtcaaggaaccagtatgtcgcatattcttgtttcttcattcagttgaatatggtttttcatcatttctcttcaaaataatttagaaaaataaatttctaaagtcata

SEQ ID NO: 23812 - DNA, 3175 bp, Homo sapiens
caggaaccacctactacagactcccaggaggcccagagtcctggtcattccagtgcagggcaagagggtgaggatacactgaggaggcgactgctggccccagaggctggaagtcatccacaacaaacacaaaaattggaagaaattaaagagaatgcacaggacaccatgagacagattaataaaaagggtttttggagctatggccctgtgattcttgtcgtcctggttgtggctgttgtggcaagttctgtgaatagctactattcctctccagcccagcaagtgcccaaaaatccagctttggaggcctttttggcccagtttagccaattggaagataaatttccaggccagagttccttcctgtggcagagaggacggaagtttctccagaagcacctcaatgcttccaaccccactgagccagccaccatcatatttacagcagctcgggagggaagagagaccctgaagtgcctgagccaccatgttgcagatgcctacacctcttcccagaaagtctctcccattcagattgatggggctggaaggacctggcaggacagtgacacggtcaagctgttggttgacctggagctgagctatgggtttgagaatggccagaaggctgctgtggtacaccacttcgaatccttccctgccggctccactttgatcttctataagtattgtgatcatgagaatgctgcctttaaagatgtggccctggtcctgactgttctgctagaggaggaaacattagaagcaagtgtaggcccaagggaaacggaagaaaaagtgagagacttactctgggccaagtttaccaactctgacactcccacctccttcaaccacatggactcagacaaattgagtgggctgtggagccgaatttcacacctggtactgccagtccagccagtgagtagcatagaagaacaggggtgccttttctaaagctaagcacagagttggttacagaaggtatatgtttatgaaaaagtttgtttaaagaccttccatttatatggaaggaggttgataaaatagcttgaggaaatagcctgaaaaacaaagatgagcttattttagaaacaagtttttattttttattccttgtaaaatctttctaatctaagccttgacaaagctaaaaattaacctgactttttttctttggaccaaatcaggtttgaaatatcgatgatatatatgagaattttttttaaattctaaaatatagcaacattgcacaggaagatactcttacttcttagagtaactacagagtgatttttttttttcttgagtgagactctgaagaaccttttcgataatgtttggacttggactaaagcaattagaattatgaagcaatgataacctttagaaaatttttctatcacatgttgaatattttcaaaccttactttaataatctaaagttacgggattatatcttatattaattttgcagttttgagtagtatgataaaagaaataagaattcaaaccattaagtacctacctaaatactacatgtaaggcactgtgcttttatttcattcagctgaggtataagcagctgtactcaaatgttcttaaaaatgagaaccagtggggaaattgtttataatcattggaaatgaagaaattccaattggctatatctttacttcagcttttcttgaacaatttacagcattgattttcaaactgtgtctactggcacccttcccctttgtatcagagcagttctgcttttaactgttttatatgttggggttctctatgagatttcattggaacaaagagtttcactgatattcgagtttgaaaaccattgattaagtgaaaaaacatcttagaagataggaaatatgtttaaaaaatgaatgtattaaatcttatgagtaggaagatgaaatacaggtttattgtatagatacattatttatgaaggataaagatctatacatgaacagcagaatgtataagctagcatttactagcatgtctctgatgcttttgttcatttctgttaatcgtcatttctgtcccctctgcatggaattttatacttgtctagggtaagagtttgtagactctttcagcagaacagattttaataaccaatttatttgttttattttaaaaatttatttttgaataaccaatttaatagtaaattttatatgaacatttggcataactttaccagtttatttctatgcagtgatggaacattatgtaatgcagctcatttcttgaccaactagttatagaagtaccattaggttaaaaattagagaaatctaagagatgttatactcagtgagaggaagcagaaatggtgggtagattctcagaggttttgatgttcagtactgacggaccatgttctgtgattgtaagaaagattgaaaacagtttgtatggagatagagttgattagcatttgagctctgaaagcagaactctagtaaaatgatctcgacctaacaaagggtctgttccattatatagactattaccataatcctggattatttcaactgggttttggcctctccattatatgagatcatatgtatatagctaagaagtctgattaaagtatggaaagattttaggaaacactaagaagatacagggatctttactgatacctaaaaagattacaattgagtaattgctcaattgagtgtaggggcatacctgaaggaagaatttgcatttgggacttcgaaggaagcttccaagagatttgggaagagacctgaacaaaaagttaaagcatggtgaatgtgatatcactgtcaatccagtataaaagcagaggaagttgaaggaaaatctgtatcccatatgcacattttttctgtctttttagatcttagatgctagcgttacatccacaaaaccagtgttgccttgtataactattatattggcctgctgacctgtgctacctcagatctgtcaaggaaccagtatgtcgcatattcttgtttcttcattcagttgaatatggtttttcatcatttctcttcaaaataatttagaaaaataaatttctaaagtcataatttttaatttagcctttttaaaaacattttcccttctatgtatagtgcaatcaattgaggatggtccgcacagtctgtct

SEQ ID NO: 23813 - DNA, 1122 bp, Homo sapiens
caggaaccacctactacagactcccaggaggcccagagtcctggtcattccagtgcagggcaagagggtgaggatacactgaggaggcgactgctggccccagaggctggaagtcatccacaacaaacacaaaaattggaagaaattaaagagaatgcacaggacaccatgagacagattaataaaaagggtttttggagctatggccctgtgattcttgtcgtcctggttgtggctgttgtggcaagttctgtgaatagctactattcctctccagcccagcaagtgcccaaaaatccagctttggaggcctttttggcccagtttagccaattggaagataaatttccaggccagagttccttcctgtggcagagaggacggaagtttctccagaagcacctcaatgcttccaaccccactgagccagccaccatcatatttacagcagctcgggagggaagagagaccctgaagtgcctgagccaccatgttgcagatgcctacacctcttcccagaaagtctctcccattcagattgatggggctggaaggacctggcaggacagtgacacggtcaagctgttggttgacctggagctgagctatgggtttgagaatggccagaaggctgctgtggtacaccacttcgaatccttccctgccggctccactttgatcttctataagtattgtgatcatgagaatgctgcctttaaagatgtggccctggtcctgactgttctgctagaggaggaaacattagaagcaagtgtaggcccaagggaaacggaagaaaaagtgagagacttactctgggccaagtttaccaactctgacactcccacctccttcaaccacatggactcagacaaattgagtgggctgtggagccgaatttcacacctggtactgccagtccagccaatcttagatgctagcgttacatccacaaaaccagtgttgccttgtataactattatattggcctgctgacctgtgctacctcagatctgtcaaggaaccagtatgtcgcatattcttgtttcttcattcagttgaatatggtttttcatcatttctcttcaaaataatttagaaaaataaatttctaaagtcata

SEQ ID NO: 23814 - DNA, 1203 bp, Homo sapiens
caggaaccacctactacagactcccaggaggcccagagtcctggtcattccagtgcagggcaagagggtgaggatacactgaggaggcgactgctggccccagaggctggaagtcatccacaacaaacacaaaaattggaagaaattaaagagaatgcacaggacaccatgagacagattaataaaaagggtttttggagctatggccctgtgattcttgtcgtcctggttgtggctgttgtggcaagttctgtgaatagctactattcctctccagcccagcaagtgcccaaaaatccagctttggaggcctttttggcccagtttagccaattggaagataaatttccaggccagagttccttcctgtggcagagaggacggaagtttctccagaagcacctcaatgcttccaaccccactgagccagccaccatcatatttacagcagctcgggagggaagagagaccctgaagtgcctgagccaccatgttgcagatgcctacacctcttcccagaaagtctctcccattcagattgatggggctggaaggacctggcaggacagtgacacggtcaagctgttggttgacctggagctgagctatgggtttgagaatggccagaaggctgctgtggtacaccacttcgaatccttccctgccggctccactttgatcttctataagtattgtgatcatgagaatgctgcctttaaagatgtggccctggtcctgactgttctgctagaggaggaaacattagaagcaagtgtaggcccaagggaaacggaagaaaaagtgagagacttactctgggccaagtttaccaactctgacactcccacctccttcaaccacatggactcagacaaattgagtgggctgtggagccgaatttcacacctggtactgccagtccagccaatcttagatgctagcgttacatccacaaaaccagtgttgccttgtataactattatattggcctgctgacctgtgctacctcagatctgtcaaggaaccagtatgtcgcatattcttgtttcttcattcagttgaatatggtttttcatcatttctcttcaaaataatttagaaaaataaatttctaaagtcataatttttaatttagcctttttaaaaacattttcccttctatgtatagtgcaatcaattgaggatggtccgcacagtctgtct

SEQ ID NO: 23815 - DNA, 4243 bp, Homo sapiens
agtgcaaaacctggccagcagcccgagtgagtaggagccatgtgactctggtgagttggagtgtgcaattgcctcctgcttcagagctacctgatccgaatactaagcagagcgagtgccgggctgagtgtaagacactgaagacactgcagagcaaggtgcttattccagaggcgttacaaaacatggagattaaagaccagggagcccaaatggagccgctgctgcctacgagaaatgatgaagaagcagttgtggatagaggtggaactcgttctattctcaaaacacactttgagaaagaagatttagaaggtcatcgaacactatttattggagtacatgtgcccttgggaggaagaaaaagccatcgacgtcacaggcatcgtggtcataaacacagaaagagagacagagaaagagattcaggattagaggatggaagggagtcaccttcttttgacaccccatcacagagggtacagtttattcttggaaccgaggatgatgacgaggaacacattcctcatgaccttttcacagaactggatgagatttgttggcgtgaaggtgaggacgctgagtggcgagaaacagccaggtggttgaagtttgaagaagatgtggaagatggaggagaaaggtggagcaagccttatgtggctactctttcattgcacagcttgtttgaattgagaagttgtattctgaatggaactgtgttgctggacatgcatgccaacactttagaagaaattgcagatatggttcttgaccaacaagtgagctcaggtcagctgaatgaagatgtacgccatagggtccatgaggcattgatgaaacagcatcatcatcagaatcagaaaaaactcaccaacaggattcccattgttcgttcctttgctgatattggcaagaaacagtcagaaccaaattccatggacaaaaatgcaggtcaggttgtttctcctcagtctgctccagcctgtgttgaaaataaaaatgatgttagcagagaaaacagcactgttgactttagcaaggttgatctgcattttatgaaaaagattcctccaggtgctgaagcatcgaacatcttactgggagaactggagttcttggatcgaacagtagttgcgtttgtcaggttgtctccagctgtattgcttcaaggactggctgaagtcccaatcccaaccagatttttgttcattcttctgggacccctgggaaagggtcaacagtaccatgagattggcagatcaattgcaaccctaatgacagatgaggtatttcatgatgttgcctataaagctaaagatcgtaatgacttggtatcaggaattgatgagtttctggatcaggttactgttctccctcctggagaatgggatccaagcattcgaatagagcctcccaaaaatgttccttcccaggagaagaggaagattcctgctgtaccaaatggaacagcagctcatggggaagcagagccccacggaggacatagtggacctgaactccagcgaactggaaggatttttgggggacttattttagatatcaaaagaaaagctccatacttctggagtgacttcagagatgctttcagcctgcagtgcttagcatcttttctatttctctactgcgcgtgtatgtctcctgtcatcacgtttggaggactgctgggagaagcaactgaagggcgtataagtgcaattgaatctctctttggagcatccatgaccgggatagcctattctctctttggtggacagcctcttaccatattaggcagtacaggaccagttttggtgtttgaaaagattttgtttaaattttgcaaagaatatgggctgtcatacctatctttaagagctagcattggactttggactgcaactctatgtatcatacttgtggccacagatgctagttcccttgtctgctacatcactcggtttactgaagaagcttttgcttccctgatttgcatcattttcatttatgaggccctggagaagttgtttgaactcagtgaagcatatccaatcaacatgcataatgatctggaactgctgacacaatactcgtgtaactgtgtggaaccgcataatcccagcaatggcacattgaaggaatggagggaatccaatatttctgcctctgacataatttgggagaacctaactgtgtcagaatgcaaatcattgcatggagagtatgttggacgggcctgtggccatgatcacccatatgttccagatgttctattttggtctgtgatcctgttcttttccacagttactctgtcagccaccctgaagcagttcaagactagcagatattttccaaccaaggttcgatccatagtgagtgactttgctgtctttcttacaattctgtgtatggttttaattgactatgccattgggatcccatctccaaaactacaagtaccaagtgttttcaagcccactagagatgatcgtggctggtttgttacgcctttaggtccaaacccatggtggacagtaatagctgctataattccagctctgctttgtactattctaattttcatggaccaacagattacagctgtcatcatcaacaggaaagagcataagctaaagaaaggttgtgggtaccatctggacctattaatggtggctgtcatgctcggtgtatgctccatcatgggcctgccatggtttgtggctgccacagtcctctccatcactcatgtcaatagcctaaaactggaatcagaatgctcagctccaggagaacaacccaaatttctcggcattcgggagcaaagggttactgggcttatgatttttattcttatgggttcatcagtctttatgaccagtattctgaagtttattcccatgccagtgctatatggagtgtttctttatatgggtgcttcatctctaaagggaattcagttctttgataggataaagctcttctggatgccggcaaaacatcaaccagattttatatacctaaggcacgtaccgcttcgaaaagtgcatctcttcacaattattcagatgagttgccttggccttttgtggataataaaagtttcaagagctgctattgtctctcccatgatggtgttagccctggtatttgtaagaaagttgatggacttgttgttcacgaagcgggaactcagctggttggatgatttgatgcccgagagtaagaaaaagaaactggaaagtagctggaaagaagaagaacaatgtgtgctacctatggaagatgagggcacagtacaactcccattggaagggcactatagagatgatccatctgtgatcaatatatctgatgaaatgtcaaagactgccttgtggaggaaccttctgattactgccgataactcaaaagataaggagtcaagctttccttccaaaagctccccttcctaatcactctagaagctgattccccaaagcattgaaagccgaaaagagaagaaagctgactcagggaaaggtgttgacagggagacttgtctatgactcgatcttcaatttattttttacatatatatgagaagagtgtcacaattattaataaaactgctttgatcatgtattgtaaattctgtccctcaacccaaatccaccttcatactgtaagtagtgcaatacttgtttcatttctgtgtttaaacttctgagcagtgagacatccctgtgagcagatacaatagccaatgcaagaatctgtgtgttccttgctgtacgttagacatttgtaaactggattctgattgtcagttttatgagagcaatagcttccttaaagagataagtcatatttacctagtttgtattctcctactttagtgacctgaagatgcctgataatttcattcagaagaatttttgaaaggtagtcttacttctttttagtttttatagcttagcattagtgacttatttcaaaagacccaaatcaaaaagttagtttgaaagcattttttaataattgtatttatgcatttggctactgtaagttttgctccatggaataatgatgtgatagcaaaaatgaataagactatgaataagttcctacatgaaggttaatgtcagtggtgaaaaatcttattatgctccaatatactgccagcatgctgagtatacttggatcataaaaaactgtttcatttttcttatttattttatgcataggaatattcattccggaattc

SEQ ID NO: 23816 - DNA, 4368 bp, Homo sapiens
agtgcaaaacctggccagcagcccgagtgagtaggagccatgtgactctggtgagttggagtgtgcaattgcctcctgcttcagagctacctgatccgaatactaagcagagcgagtgccgggctgagtgtaagacactgaagacactgcagagcaaggtgcttattccagaggcgttacaaaacatggagattaaagaccagggagcccaaatggagccgctgctgcctacgagaaatgatgaagaagcagttgtggatagaggtggaactcgttctattctcaaaacacactttgagaaagaagatttagaaggtcatcgaacactatttattggagtacatgtgcccttgggaggaagaaaaagccatcgacgtcacaggcatcgtggtcataaacacagaaagagagacagagaaagagattcaggattagaggatggaagggagtcaccttcttttgacaccccatcacagagggtacagtttattcttggaaccgaggatgatgacgaggaacacattcctcatgaccttttcacagaactggatgagatttgttggcgtgaaggtgaggacgctgagtggcgagaaacagccaggtggttgaagtttgaagaagatgtggaagatggaggagaaaggtggagcaagccttatgtggctactctttcattgcacagcttgtttgaattgagaagttgtattctgaatggaactgtgttgctggacatgcatgccaacactttagaagaaattgcagatatggttcttgaccaacaagtgagctcaggtcagctgaatgaagatgtacgccatagggtccatgaggcattgatgaaacagcatcatcatcagaatcagaaaaaactcaccaacaggattcccattgttcgttcctttgctgatattggcaagaaacagtcagaaccaaattccatggacaaaaatgcaggtcaggttgtttctcctcagtctgctccagcctgtgttgaaaataaaaatgatgttagcagagaaaacagcactgttgactttagcaaggttgatctgcattttatgaaaaagattcctccaggtgctgaagcatcgaacatcttactgggagaactggagttcttggatcgaacagtagttgcgtttgtcaggttgtctccagctgtattgcttcaaggactggctgaagtcccaatcccaaccagatttttgttcattcttctgggacccctgggaaagggtcaacagtaccatgagattggcagatcaattgcaaccctaatgacagatgaggtatttcatgatgttgcctataaagctaaagatcgtaatgacttggtatcaggaattgatgagtttctggatcaggttactgttctccctcctggagaatgggatccaagcattcgaatagagcctcccaaaaatgttccttcccaggagaagaggaagattcctgctgtaccaaatggaacagcagctcatggggaagcagagccccacggaggacatagtggacctgaactccagcgaactggaaggatttttgggggacttattttagatatcaaaagaaaagctccatacttctggagtgacttcagagatgctttcagcctgcagtgcttagcatcttttctatttctctactgcgcgtgtatgtctcctgtcatcacgtttggaggactgctgggagaagcaactgaagggcgtataagtgcaattgaatctctctttggagcatccatgaccgggatagcctattctctctttggtggacagcctcttaccatattaggcagtacaggaccagttttggtgtttgaaaagattttgtttaaattttgcaaagaatatgggctgtcatacctatctttaagagctagcattggactttggactgcaactctatgtatcatacttgtggccacagatgctagttcccttgtctgctacatcactcggtttactgaagaagcttttgcttccctgatttgcatcattttcatttatgaggccctggagaagttgtttgaactcagtgaagcatatccaatcaacatgcataatgatctggaactgctgacacaatactcgtgtaactgtgtggaaccgcataatcccagcaatggcacattgaaggaatggagggaatccaatatttctgcctctgacataatttgggagaacctaactgtgtcagaatgcaaatcattgcatggagagtatgttggacgggcctgtggccatgatcacccatatgttccagatgttctattttggtctgtgatcctgttcttttccacagttactctgtcagccaccctgaagcagttcaagactagcagatattttccaaccaaggttcgatccatagtgagtgactttgctgtctttcttacaattctgtgtatggttttaattgactatgccattgggatcccatctccaaaactacaagtaccaagtgttttcaagcccactagagatgatcgtggctggtttgttacgcctttaggtccaaacccatggtggacagtaatagctgctataattccagctctgctttgtactattctaattttcatggaccaacagattacagctgtcatcatcaacaggaaagagcataagctaaagaaaggttgtgggtaccatctggacctattaatggtggctgtcatgctcggtgtatgctccatcatgggcctgccatggtttgtggctgccacagtcctctccatcactcatgtcaatagcctaaaactggaatcagaatgctcagctccaggagaacaacccaaatttctcggcattcgggagcaaagggttactgggcttatgatttttattcttatgggttcatcagtctttatgaccagtattctgaagtttattcccatgccagtgctatatggagtgtttctttatatgggtgcttcatctctaaagggaattcagttctttgataggataaagctcttctggatgccggcaaaacatcaaccagattttatatacctaaggcacgtaccgcttcgaaaagtgcatctcttcacaattattcagatgagttgccttggccttttgtggataataaaagtttcaagagctgctattgtctctcccatgatggtgttagccctggtatttgtaagaaagttgatggacttgttgttcacgaagcgggaactcagctggttggatgatttgatgcccgagagtaagaaaaagaaactggaaagtagctggaaagaagaagaacaatgtgtgctacctatggaagatgagggcacagtacaactcccattggaagggcactatagagatgatccatctgtgatcaatatatctgatgaaatgtcaaagactgccttgtggaggaaccttctgattactgccgataactcaaaagataaggagtcaagctttccttccaaaagctccccttcctaatcactctagaagctgattccccaaagcattgaaagccgaaaagagaagaaagctgactcagggaaaggtgttgacagggagacttgtctatgactcgatcttcaatttattttttacatatatatgagaagagtgtcacaattattaataaaactgctttgatcatgtattgtaaattctgtccctcaacccaaatccaccttcatactgtaagtagtgcaatacttgtttcatttctgtgtttaaacttctgagcagtgagacatccctgtgagcagatacaatagccaatgcaagaatctgtgtgttccttgctgtacgttagacatttgtaaactggattctgattgtcagttttatgagagcaatagcttccttaaagagataagtcatatttacctagtttgtattctcctactttagtgacctgaagatgcctgataatttcattcagaagaatttttgaaaggtagtcttacttctttttagtttttatagcttagcattagtgacttatttcaaaagacccaaatcaaaaagttagtttgaaagcattttttaataattgtatttatgcatttccttgatttaatatgataaatttaatacttaacaatttatatgtaactaaaacttaaagtcatttgaaaaatatatagaaacctatttacaacttgttaaggacaatcagacataatgcagagttaagtagtatttgcttaaaattcaagttgtgactaatgatcaaatactaggcttgtacgaaatgctttagaaaaactttgtaacagttttgtgggatttttcaatataaacctttatcagaaatatactaagtttgtctcccactgacaacagatgttttccaaataaacatattctatacataacttgtggaatgccacatggtgaatca

SEQ ID NO: 23817 - DNA, 4005 bp, Homo sapiens
ctggtgactcttgaggatcccccccaaatggaatccacagaaagagagacagagaaagagattcaggattagaggatggaagggagtcaccttcttttgacaccccatcacagagggtacagtttattcttggaaccgaggatgatgacgaggaacacattcctcatgaccttttcacagaactggatgagatttgttggcgtgaaggtgaggacgctgagtggcgagaaacagccaggtggttgaagtttgaagaagatgtggaagatggaggagaaaggtggagcaagccttatgtggctactctttcattgcacagcttgtttgaattgagaagttgtattctgaatggaactgtgttgctggacatgcatgccaacactttagaagaaattgcagatatggttcttgaccaacaagtgagctcaggtcagctgaatgaagatgtacgccatagggtccatgaggcattgatgaaacagcatcatcatcagaatcagaaaaaactcaccaacaggattcccattgttcgttcctttgctgatattggcaagaaacagtcagaaccaaattccatggacaaaaatgcaggtcaggttgtttctcctcagtctgctccagcctgtgttgaaaataaaaatgatgttagcagagaaaacagcactgttgactttagcaaggttgatctgcattttatgaaaaagattcctccaggtgctgaagcatcgaacatcttactgggagaactggagttcttggatcgaacagtagttgcgtttgtcaggttgtctccagctgtattgcttcaaggactggctgaagtcccaatcccaaccagatttttgttcattcttctgggacccctgggaaagggtcaacagtaccatgagattggcagatcaattgcaaccctaatgacagatgaggtatttcatgatgttgcctataaagctaaagatcgtaatgacttggtatcaggaattgatgagtttctggatcaggttactgttctccctcctggagaatgggatccaagcattcgaatagagcctcccaaaaatgttccttcccaggagaagaggaagattcctgctgtaccaaatggaacagcagctcatggggaagcagagccccacggaggacatagtggacctgaactccagcgaactggaaggatttttgggggacttattttagatatcaaaagaaaagctccatacttctggagtgacttcagagatgctttcagcctgcagtgcttagcatcttttctatttctctactgcgcgtgtatgtctcctgtcatcacgtttggaggactgctgggagaagcaactgaagggcgtataagtgcaattgaatctctctttggagcatccatgaccgggatagcctattctctctttggtggacagcctcttaccatattaggcagtacaggaccagttttggtgtttgaaaagattttgtttaaattttgcaaagaatatgggctgtcatacctatctttaagagctagcattggactttggactgcaactctatgtatcatacttgtggccacagatgctagttcccttgtctgctacatcactcggtttactgaagaagcttttgcttccctgatttgcatcattttcatttatgaggccctggagaagttgtttgaactcagtgaagcatatccaatcaacatgcataatgatctggaactgctgacacaatactcgtgtaactgtgtggaaccgcataatcccagcaatggcacattgaaggaatggagggaatccaatatttctgcctctgacataatttgggagaacctaactgtgtcagaatgcaaatcattgcatggagagtatgttggacgggcctgtggccatgatcacccatatgttccagatgttctattttggtctgtgatcctgttcttttccacagttactctgtcagccaccctgaagcagttcaagactagcagatattttccaaccaaggttcgatccatagtgagtgactttgctgtctttcttacaattctgtgtatggttttaattgactatgccattgggatcccatctccaaaactacaagtaccaagtgttttcaagcccactagagatgatcgtggctggtttgttacgcctttaggtccaaacccatggtggacagtaatagctgctataattccagctctgctttgtactattctaattttcatggaccaacagattacagctgtcatcatcaacaggaaagagcataagctaaagaaaggttgtgggtaccatctggacctattaatggtggctgtcatgctcggtgtatgctccatcatgggcctgccatggtttgtggctgccacagtcctctccatcactcatgtcaatagcctaaaactggaatcagaatgctcagctccaggagaacaacccaaatttctcggcattcgggagcaaagggttactgggcttatgatttttattcttatgggttcatcagtctttatgaccagtattctgaagtttattcccatgccagtgctatatggagtgtttctttatatgggtgcttcatctctaaagggaattcagttctttgataggataaagctcttctggatgccggcaaaacatcaaccagattttatatacctaaggcacgtaccgcttcgaaaagtgcatctcttcacaattattcagatgagttgccttggccttttgtggataataaaagtttcaagagctgctattgtctctcccatgatggtgttagccctggtatttgtaagaaagttgatggacttgttgttcacgaagcgggaactcagctggttggatgatttgatgcccgagagtaagaaaaagaaactggaaagtagctggaaagaagaagaacaatgtgtgctacctatggaagatgagggcacagtacaactcccattggaagggcactatagagatgatccatctgtgatcaatatatctgatgaaatgtcaaagactgccttgtggaggaaccttctgattactgccgataactcaaaagataaggagtcaagctttccttccaaaagctccccttcctaatcactctagaagctgattccccaaagcattgaaagccgaaaagagaagaaagctgactcagggaaaggtgttgacagggagacttgtctatgactcgatcttcaatttattttttacatatatatgagaagagtgtcacaattattaataaaactgctttgatcatgtattgtaaattctgtccctcaacccaaatccaccttcatactgtaagtagtgcaatacttgtttcatttctgtgtttaaacttctgagcagtgagacatccctgtgagcagatacaatagccaatgcaagaatctgtgtgttccttgctgtacgttagacatttgtaaactggattctgattgtcagttttatgagagcaatagcttccttaaagagataagtcatatttacctagtttgtattctcctactttagtgacctgaagatgcctgataatttcattcagaagaatttttgaaaggtagtcttacttctttttagtttttatagcttagcattagtgacttatttcaaaagacccaaatcaaaaagttagtttgaaagcattttttaataattgtatttatgcatttccttgatttaatatgataaatttaatacttaacaatttatatgtaactaaaacttaaagtcatttgaaaaatatatagaaacctatttacaacttgttaaggacaatcagacataatgcagagttaagtagtatttgcttaaaattcaagttgtgactaatgatcaaatactaggcttgtacgaaatgctttagaaaaactttgtaacagttttgtgggatttttcaatataaacctttatcagaaatatactaagtttgtctcccactgacaacagatgttttccaaataaacatattctatacataacttgtggaatgccacatggtgaatca

SEQ ID NO: 23818 - DNA, 1380 bp, Homo sapiens
aatgttttatacatatatatctttaatttttactttaatctcaggcctaatagaaattgtttctaccaaaaaccatacaggcaaatctacacctctcgttttaattttttttccactttaaactagtttattatttacttcaggtgttagccctggtatttgtaagaaagttgatggacttgttgttcacgaagcgggaactcagctggttggatgatttgatgcccgagagtaagaaaaagaaactggaaagtagctggaaagaagaagaacaatgtgtgctacctatggaagatgagggcacagtacaactcccattggaagggcactatagagatgatccatctgtgatcaatatatctgatgaaatgtcaaagactgccttgtggaggaaccttctgattactgccgataactcaaaagataaggagtcaagctttccttccaaaagctccccttcctaatcactctagaagctgattccccaaagcattgaaagccgaaaagagaagaaagctgactcagggaaaggtgttgacagggagacttgtctatgactcgatcttcaatttattttttacatatatatgagaagagtgtcacaattattaataaaactgctttgatcatgtattgtaaattctgtccctcaacccaaatccaccttcatactgtaagtagtgcaatacttgtttcatttctgtgtttaaacttctgagcagtgagacatccctgtgagcagatacaatagccaatgcaagaatctgtgtgttccttgctgtacgttagacatttgtaaactggattctgattgtcagttttatgagagcaatagcttccttaaagagataagtcatatttacctagtttgtattctcctactttagtgacctgaagatgcctgataatttcattcagaagaatttttgaaaggtagtcttacttctttttagtttttatagcttagcattagtgacttatttcaaaagacccaaatcaaaaagttagtttgaaagcattttttaataattgtatttatgcatttccttgatttaatatgataaatttaatacttaacaatttatatgtaactaaaacttaaagtcatttgaaaaatatatagaaacctatttacaacttgttaaggacaatcagacataatgcagagttaagtagtatttgcttaaaattcaagttgtgactaatgatcaaatactaggcttgtacgaaatgctttagaaaaactttgtaacagttttgtgggatttttcaatataaacctttatcagaaatatactaagtttgtctcccactgacaacagatgttttccaaataaacatattctatacataacttgtggaatgccacatggtgaatca

SEQ ID NO: 23819 - DNA, 210 bp, Homo sapiens
gatatcatttttgtcccacctatgtaaccatggtacttttgactgcacactgttttcctgtaatatgaaggtaggtgacctgcccccaaaagtgacaatctttggacagattatgtatgagatggaagtcatatttctttaggaaagtgacatttcacatctgctttaaatagaaaaacctttctaggtaaaaacagtgaagtgagaatg

SEQ ID NO: 23820 - DNA, 4276 bp, Homo sapiens
  misc_feature (371)..(371): n is a, c, g, or t
  misc_feature (400)..(400): n is a, c, g, or t
  misc_feature (957)..(958): n is a, c, g, or t
  misc_feature (1040)..(1041): n is a, c, g, or t
  misc_feature (1057)..(1058): n is a, c, g, or t
  misc_feature (1103)..(1104): n is a, c, g, or t
  misc_feature (3564)..(3564): n is a, c, g, or t
  misc_feature (3575)..(3575): n is a, c, g, or t
  misc_feature (3579)..(3579): n is a, c, g, or t
  misc_feature (3581)..(3581): n is a, c, g, or t
  misc_feature (3589)..(3589): n is a, c, g, or t
cgccaagatgcagcggcggctccggttgtcgccgggcgggccaggagcagcgcgacccgagccgggcagggggcgcccgccacggcacccgcgcgctcctagcgcccagacccgcctgcgggcccggatcctccttgccactgtcccacccgccgtccctgccactccaccctttgtgtcgccgcagcccggtgcccccggctctgcggaaccccggctgggccggaccctggcaaagcgccaggccccgcgtgggctcccggcgagcggttgatggcgagggggcgcggcgcggctctgtagcccgagttcccgacgctggaggcccggcccgcctcagccgcattgtcccgggccgcgcgcaccggccntgagctgcgccgccgcagcacccgccgcncccgcggggccatgcggagagccgccgggatggaggacttctccgcggaggaagaggagtcctggtacgaccagcaggacctggagcaggacttgcacctagctgcggagctggggaagactctgctggagaggaacaaggagctggaggggtccctgcagcagatgtactccaccaatgaggaacaggtgcaggagatcgagtacctaaccaagcagctggacacgctgcggcacgtgaacgagcagcacgccaaagtctatgagcagctggacctgacagcccgggacctggagctgaccaaccacaggctggtgctggagagtaaggctgcccagcagaagatccatgggctgacggagaccattgagccctccaggctcaggtggaggagctgcaggcccaggtggagcaactgagaggcctggaacagctgcgagtgctccgggagaagcgggaacgcaggcgtaccatccacaccttcccctgcctcaaggagctgtgcaccagcccccggtgcaaggatgctttccgcctacacagttcctccctggagnngcccgcggcccctggagcaggagaacgagcggctgcagaccctggtggggcgctgcgctcccaggtgagccaggagcggccnnaaggagcgggcggagnncgatacaccgcggtgctgcaggagtactcggagctggagcgccanngtgcgagatggaggcctgtcgcctgcgtgtgcagagctggaggccgagctgctggagctgcagcagatgaagcaggccaagacctacctactgggtccggacgaccacctggccgaggccctgctcgcacccctcacgcaggcccctgaggccgacgatccccagcccggccgcggggacgacttgggcgcccaggacggggtctcctcaccggcagcctctccaggccacgtggtgcgcaagagctgcagcgacactgcgctcaacgccatcgtggccaaagacccagccagccggcacgcgggcaacctcacactgcacgccaacagcgtgcgcaagcggggcatgtccatcctgcgggaggtggacgagcagtaccacgcgctgctggagaagtacgaggagctgctgagcaagtgccggcagcacggggccggagtgcggcacgccggcgtgcagacctcgcgccccatctcccgggacagctcgtggagggacctgcgcgggggtgaggagggccagggtgaggtcaaggcaggagagaagagcctgagccagcacgtggaggccgtggacaagcggctggagcagagccagcccgagtacaaggcgctcttcaaagagatcttctccaggatccagaagaccaaggctgacatcaacgccaccaaagtcaagacgcacagcagcaagtgacccttctccggcctgcagcctcccccagggtggaagccgtggggtccctcaggcctgggcggtgcagcttccagagagcgagcgccctttagcggcctgccaccacagcacgcggcctcctgatccggaagcacgcagcatgttccctgctgagcggaggcagcccacctgtcctgcctcccaggagcccttggccacctcgcgccagcccaaaggcgcagctctgagttcaaagccaaatgtccccactaccccagggatcccccagctcccccagcccctggcttcctgaccctgcgcctcaccctcagactggtgaccaggcttctgaaagccattctggatcagttggcttttttttttttttgggttaagtttgttttttctaagagatttgcaatgcaaggtctccttgaccccttgccacaactggaaacacttgaaaggggaccccagggccagctgtttcaggggtttcctggaccacccactgcttctccccaaccctgatgcgctgacattcccttagcaccagctgtcccacctccagggtcctgaccaggtcagagatgtcccctgccatgcagagcaggaagcctcagctgggcctggagtgtccctgctccagccctgccagggacaggtttctccctggatactcttggcccaccgcagatctgtagccagtcagaggaggaggagaaggagcccctcagcagagtggtgcagtttcgctcagagcttgtctccttggcttccaaccccagaaatgcctgctgggccttaagctttccaggggccggggcagtggggagcccccatcccttcacaccgccaccaactaaccaagcttggcctctgactcccgtctctgtgcttgcccccatctcagggaccatgatgtctcagtcactccacgctccccacaggccaaccctggcacaggtcatgtctgcagcccccagaatgttctggacatgcaccaccagccggtggtcccaatgtccacccctgcctccccttcactggggactggggttttcgccccatgctgcatcgtgttgtattgggatggggctgaggaacatgctccctccctccctcccataaaatgcctgctcttcacctcccacctttgtggggggcttttgaggacccagctgcgtcaggagttttgcttcaagatgtcagaaagtcaagttcagctaagagacacccaggtccccagcttgccctgagcagcccttcagggcttctggttccttctgccgcccttcctgagaccttagaaaccagaagagccatacagtcagtggaaggcgggggggccctggcctctgcaccgggatcccagtgggaaccttcatgccttatttatttctaatgggtaaaggggttttcttaccaagcatccctgacctcctggagacaccacctgctttccgggcggcactgtgatgggagctggtggcgactgagtccttctgtacgtgcaactgggaaacttttgtcctttgaggctaggcagctccctgccctccgtgtgtgtctgttatctgggggagaggagtgtggaagggttgggggaagagctccagcctgtctgctccccagctctgtagtggcagaccagcgtcacctttgaagtatacgtgagagaaatatatttacaaatgctttattctcttctttaataaaaaatgcaccagtattctaaaagcaaaaaaaaaaaaaaaaaaattcggagattagttcccccggtgntggggaggatngggncntcctacangaaagaattcagagattcccgagaagtacctggataccaggagagattcacatcgcgacagggcacgctatgggcaggagacctcgtgaaggagatctcacattgggagaaacacgctggggagaatgctcaggataactcgcttagactgtgtcgcaaaagggacctgacagcgtgggggcaactgcgcacgccgagaggcacatcaccgcggcgaacaaacagaacagaggaacctatcgcgcaaacatcacgagccccccagtggacgcaaagcaaaccgcgggcgtcatgacaccacaacgcaacaacatacgaccggcgctccccacacacgagaaacggaggttgaacaacacacacccagcgacacatccacggaaagctggacaccccgcaaggcaaaggcaacgaaagcggacacgccccacaggagcaatagggggcagcaacacgcaccaacggggaggataccaccagaacgacggcggcggcgacagccaccacagaggggaggccccgatatagaacacatcacgccaaagatataccaacgaaaccgaagcagaggagggggagctcccccaacaacgagaacacagaacaagagttcacatacaaccgccgttatgcccgcgggagccccgaacaacacgctaggagacaaccaacacggagacgaacagg

SEQ ID NO: 23821 - DNA, 443 bp, Homo sapiens
ccctgagaatcgtgggcaaaactttcacaacctggaaaatgttgaaagcaaccattccctatttttgtttgttttttattaaatcttgccacacacacacacacacacacacagacacacacaaaaagaacattccaggcagaaataacagtgcaaaggcttagctcctggcttacctctcctcccaggcctggaggctcccagtgtcttggttacattggggtcacctagagtagatgctcggaacatgaatgggcgtcctctgcctttgttctcatgctcgtgtttctcctatcctagacttgcacctagctgcggagctggggaagactctgctggagaggaacaaggagctggaggggtccctgcagcagatgtactccaccaatgaggaacaggtgcaggagatcgaggtgagggccctgcatgtgcttgcccacacc

SEQ ID NO: 23822 - DNA, 3526 bp, Homo sapiens
  misc_feature (371)..(371): n is a, c, g, or t
  misc_feature (400)..(400): n is a, c, g, or t
  misc_feature (957)..(958): n is a, c, g, or t
  misc_feature (1040)..(1041): n is a, c, g, or t
  misc_feature (1057)..(1058): n is a, c, g, or t
  misc_feature (1103)..(1104): n is a, c, g, or t
cgccaagatgcagcggcggctccggttgtcgccgggcgggccaggagcagcgcgacccgagccgggcagggggcgcccgccacggcacccgcgcgctcctagcgcccagacccgcctgcgggcccggatcctccttgccactgtcccacccgccgtccctgccactccaccctttgtgtcgccgcagcccggtgcccccggctctgcggaaccccggctgggccggaccctggcaaagcgccaggccccgcgtgggctcccggcgagcggttgatggcgagggggcgcggcgcggctctgtagcccgagttcccgacgctggaggcccggcccgcctcagccgcattgtcccgggccgcgcgcaccggccntgagctgcgccgccgcagcacccgccgcncccgcggggccatgcggagagccgccgggatggaggacttctccgcggaggaagaggagtcctggtacgaccagcaggacctggagcaggacttgcacctagctgcggagctggggaagactctgctggagaggaacaaggagctggaggggtccctgcagcagatgtactccaccaatgaggaacaggtgcaggagatcgagtacctaaccaagcagctggacacgctgcggcacgtgaacgagcagcacgccaaagtctatgagcagctggacctgacagcccgggacctggagctgaccaaccacaggctggtgctggagagtaaggctgcccagcagaagatccatgggctgacggagaccattgagccctccaggctcaggtggaggagctgcaggcccaggtggagcaactgagaggcctggaacagctgcgagtgctccgggagaagcgggaacgcaggcgtaccatccacaccttcccctgcctcaaggagctgtgcaccagcccccggtgcaaggatgctttccgcctacacagttcctccctggagnngcccgcggcccctggagcaggagaacgagcggctgcagaccctggtggggcgctgcgctcccaggtgagccaggagcggccnnaaggagcgggcggagnncgatacaccgcggtgctgcaggagtactcggagctggagcgccanngtgcgagatggaggcctgtcgcctgcgtgtgcagagctggaggccgagctgctggagctgcagcagatgaagcaggccaagacctacctactgggtccggacgaccacctggccgaggccctgctcgcacccctcacgcaggcccctgaggccgacgatccccagcccggccgcggggacgacttgggcgcccaggacggggtctcctcaccggcagcctctccaggccacgtggtgcgcaagagctgcagcgacactgcgctcaacgccatcgtggccaaagacccagccagccggcacgcgggcaacctcacactgcacgccaacagcgtgcgcaagcggggcatgtccatcctgcgggaggtggacgagcagtaccacgcgctgctggagaagtacgaggagctgctgagcaagtgccggcagcacggggccggagtgcggcacgccggcgtgcagacctcgcgccccatctcccgggacagctcgtggagggacctgcgcgggggtgaggagggccagggtgaggtcaaggcaggagagaagagcctgagccagcacgtggaggccgtggacaagcggctggagcagagccagcccgagtacaaggcgctcttcaaagagatcttctccaggatccagaagaccaaggctgacatcaacgccaccaaagtcaagacgcacagcagcaagtgacccttctccggcctgcagcctcccccagggtggaagccgtggggtccctcaggcctgggcggtgcagcttccagagagcgagcgccctttagcggcctgccaccacagcacgcggcctcctgatccggaagcacgcagcatgttccctgctgagcggaggcagcccacctgtcctgcctcccaggagcccttggccacctcgcgccagcccaaaggcgcagctctgagttcaaagccaaatgtccccactaccccagggatcccccagctcccccagcccctggcttcctgaccctgcgcctcaccctcagactggtgaccaggcttctgaaagccattctggatcagttggcttttttttttttttgggttaagtttgttttttctaagagatttgcaatgcaaggtctccttgaccccttgccacaactggaaacacttgaaaggggaccccagggccagctgtttcaggggtttcctggaccacccactgcttctccccaaccctgatgcgctgacattcccttagcaccagctgtcccacctccagggtcctgaccaggtcagagatgtcccctgccatgcagagcaggaagcctcagctgggcctggagtgtccctgctccagccctgccagggacaggtttctccctggatactcttggcccaccgcagatctgtagccagtcagaggaggaggagaaggagcccctcagcagagtggtgcagtttcgctcagagcttgtctccttggcttccaaccccagaaatgcctgctgggccttaagctttccaggggccggggcagtggggagcccccatcccttcacaccgccaccaactaaccaagcttggcctctgactcccgtctctgtgcttgcccccatctcagggaccatgatgtctcagtcactccacgctccccacaggccaaccctggcacaggtcatgtctgcagcccccagaatgttctggacatgcaccaccagccggtggtcccaatgtccacccctgcctccccttcactggggactggggttttcgccccatgctgcatcgtgttgtattgggatggggctgaggaacatgctccctccctccctcccataaaatgcctgctcttcacctcccacctttgtggggggcttttgaggacccagctgcgtcaggagttttgcttcaagatgtcagaaagtcaagttcagctaagagacacccaggtccccagcttgccctgagcagcccttcagggcttctggttccttctgccgcccttcctgagaccttagaaaccagaagagccatacagtcagtggaaggcgggggggccctggcctctgcaccgggatcccagtgggaaccttcatgccttatttatttctaatgggtaaaggggttttcttaccaagcatccctgacctcctggagacaccacctgctttccgggcggcactgtgatgggagctggtggcgactgagtccttctgtacgtgcaactgggaaacttttgtcctttgaggctaggcagctccctgccctccgtgtgtgtctgttatctgggggagaggagtgtggaagggttgggggaagagctccagcctgtctgctccccagctctgtagtggcagaccagcgtcacctttgaagtatacgtgagagaaatatatttacaaatgctttattctcttctttaataaaaaatgcaccagtattctaaaagcaaaaa

SEQ ID NO: 23823 - DNA, 2241 bp, Homo sapiens
  misc_feature (270)..(270): n is a, c, g, or t
  misc_feature (304)..(304): n is a, c, g, or t
cgacgcagtgcgccagacgtcgtaggacgatagttcccatttcgcatggcggcgccagtgctatcacaggccatatccccaagcgtctgcctgtgttgagcaaaaggttgagctcaaccgttagtcttgtgtaggatcgatattgactagaggcctagaggagctgccgcgattgtggtacaccgtcgtgactggctacgaagtgctatctctgcggagtactatcgtcgatgggaagccatccatgtctcctggtggggttgtaggacnaatcgccttagggactgaacgtcaccatgacagnagagatataaaagcctctgtagaccgtgacaatgatggaagagtcctgtaagactgtgactgagactggtgttcaagacagtcacgcgtgccgtagttcctatgcgtcgctcgtagcagtgaggatctttactcgcaagtgattcactattatgaccaaatgtttaggtacatcaggcagctacatgatcaagacgcacagcagcaagtgacccttctccggcctgcagcctcccccagggtggaagccgtggggtccctcaggcctgggcggtgcagcttccagagagcgagcgccctttagcggcctgccaccacagcacgcggcctcctgatccggaagcacgcagcatgttccctgctgagcggaggcagcccacctgtcctgcctcccaggagcccttggccacctcgcgccagcccaaaggcgcagctctgagttcaaagccaaatgtccccactaccccagggatcccccagctcccccagcccctggcttcctgaccctgcgcctcaccctcagactggtgaccaggcttctgaaagccattctggatcagttggcttttttttttttttgggttaagtttgttttttctaagagatttgcaatgcaaggtctccttgaccccttgccacaactggaaacacttgaaaggggaccccagggccagctgtttcaggggtttcctggaccacccactgcttctccccaaccctgatgcgctgacattcccttagcaccagctgtcccacctccagggtcctgaccaggtcagagatgtcccctgccatgcagagcaggaagcctcagctgggcctggagtgtccctgctccagccctgccagggacaggtttctccctggatactcttggcccaccgcagatctgtagccagtcagaggaggaggagaaggagcccctcagcagagtggtgcagtttcgctcagagcttgtctccttggcttccaaccccagaaatgcctgctgggccttaagctttccaggggccggggcagtggggagcccccatcccttcacaccgccaccaactaaccaagcttggcctctgactcccgtctctgtgcttgcccccatctcagggaccatgatgtctcagtcactccacgctccccacaggccaaccctggcacaggtcatgtctgcagcccccagaatgttctggacatgcaccaccagccggtggtcccaatgtccacccctgcctccccttcactggggactggggttttcgccccatgctgcatcgtgttgtattgggatggggctgaggaacatgctccctccctccctcccataaaatgcctgctcttcacctcccacctttgtggggggcttttgaggacccagctgcgtcaggagttttgcttcaagatgtcagaaagtcaagttcagctaagagacacccaggtccccagcttgccctgagcagcccttcagggcttctggttccttctgccgcccttcctgagaccttagaaaccagaagagccatacagtcagtggaaggcgggggggccctggcctctgcaccgggatcccagtgggaaccttcatgccttatttatttctaatgggtaaaggggttttcttaccaagcatccctgacctcctggagacaccacctgctttccgggcggcactgtgatgggagctggtggcgactgagtccttctgtacgtgcaactgggaaacttttgtcctttgaggctaggcagctccctgccctccgtgtgtgtctgttatctgggggagaggagtgtggaagggttgggggaagagctccagcctgtctgctccccagctctgtagtggcagaccagcgtcacctttgaagtatacgtgagagaaatatatttacaaatgctttattctcttctttaataaaaaatgcaccagtattctaaaagcaaaaa

SEQ ID NO: 23824 - DNA, 338 bp, Homo sapiens
ggggtttcaccacgttgtccaggctggtctcgaactcctgacctcaggtaatccatccgcctcggcctcctaaagttacacggttttaatacttgaaaaaatatttatgttttgtaaacatgttgttatgtttaaatatgaaattaaaaacaatttaaatcctctgattattaagccagggaactgcaaacattaaattttctgcctgcaattaagagatagtaattattgttttaaacactaatccaatttttaaaaatctatgcttgtaatacaggcagtttccaacttgacaaatgttttatggtctatatgagcaaccagtagaaaagtacaag

SEQ ID NO: 23825 - DNA, 458 bp, Homo sapiens
ctcagcaagaatttgctgagccgctgccctgtgccaggcagtgccacctgctctcagctcacacctggcattctgacagagggaggcagacagcaatggcccagagtgtcagagggggttagtgccgcagaccaggagtgagcggcgtcgggagggagtgcaagattccagcaggcggtatgacaaagcacagcacacaagatgaaatggattgggtgcacctgctcacaatgggggactagggagtgtctcaaagttatagtttcattttcaagaatgttctgatacctctgttactgtacctagatttgttttgagcctacgtttctttgaggtaattgaggggtgtctgatggagaatatatgatgaataggcacagaaaggaatgcgcacccaccaccagactcccagcactgcctgtgtaaaggagagatcaataggccaggagaaccagatc

SEQ ID NO: 23826 - DNA, 396 bp, Homo sapiens
cattctggccaacttggtgaaaccccgtctccactaaaaaacaaaaaaattagccgggcaagatggtgcgcgcctgtagtcccagccactcgggaggctgaggcagcggaatcgcttgaacccacccgccggaggttgcagtgagccgagatcgtgccacggcatccagcctggctacagagggagactctgtctcaaaaaaaaaaaaaaaaaaaaaaaaaaagtccaaagtcactgtaagtctgtgcccctccctgcacaagcacccccaccgcggctctcaccgggcaccccctttctccctgcttctcacttcttccgccaaactccaggtctttctccccgcgcggcccctctcccgagttcttctcgctccggactccaggtctttctccc

SEQ ID NO: 23827 - DNA, 594 bp, Homo sapiens
cgtacgaaccccgagccgccgccgccgccgccagcagcagctgcagcagtggcagctgcagtagcggcagcagccccagcctcaaggccagtttaagctatgaagaaggacatccctcacactctgaaacagatctccttcagagacagagttttgcagcctctcatcagcttcctggatatgctcccacacctcagcctactggtctttctggaatatttgatactagtgtgaacagtgccagcagtaacactaaagagtcttcagtgatgaattttctgtctactgctgaatcccgaactgctcaggctgctgcttcaggaactactctcttaccacaattcagggctccatcctggcagacaggcatgcattcctcagcagcaactgagctgtttgctactggacctttgccaagcactggaacacttccaccatctctctctgcttatcagcatcccaccaccttcagcaatagaaactttgctaccacttcacctttggtgcttcaggattcaacttttaacactacatcaaatggaattttaagtcatcatgaccctttgctacaaatcaagacttcccagggaactg

SEQ ID NO: 23828 - DNA, 578 bp, Homo sapiens
  misc_feature (16)..(16): n is a, c, g, or t
gtcaagatgcttatanaagcgtctctactcccttaactactttggatgctacttctgataaaaagaagaaaacagtttaagctatgaagaaggacatccctcacactctgaaacagatctccttcagagacagagttttgcagcctctcatcagcttcctggatatgctcccacacctcagcctactggtctttctggaatatttgatactagtgtgaacagtgccagcagtaacactaaagagtcttcagtgatgaattttctgtctactgctgaatcccgaactgctcaggctgctgcttcaggaactactctcttaccacaattcagggctccatcctggcagacaggcatgcattcctcagcagcaactgagctgtttgctactggacctttgccaagcactggaacacttccaccatctctctctgcttatcagcatcccaccaccttcagcaatagaaactttgctaccacttcacctttggtgcttcaggattcaacttttaacactacatcaaatggaattttaagtcatcatgaccctttgctacaaatcaagacttcccagggaactg

SEQ ID NO: 23829 - DNA, 836 bp, Homo sapiens
cttaatatggggctatttctcaagaaaaaatagtagcccctgtcttgtcccctaactcctcatagcagcaagtttgaagtttgctgatctacaaaaggtcctcaaatctggcctgaagcagcaatagtatctctccatttatccaaaaattcatgtttgtgtagtccttctctgttgtaattcccaaagcaagagtttttaagtgcaggagcatgtctgaaaatcaggacccccagggctcttgctcaatcccaagaaggttagagtggttcttagcttcagctgtcccatcctaaacgaggaggtgggattctggaatttctaaaagtcattcctactccactgccctataatttctaagaaaaaagccagccacttcgtcatagagttgggtattccacctcctctgaaacatgtatggagaacagcttgaaccttttcactgctcacctctgcttttagtgactaaggatagaaaggtcagaggcaaagtggcaaaggacttgaaaactaccttcaaaaactaactgcaaaaaccaaactactaatatcgtttggtggctgggcgcggtggctcacgcctgcaatcccaccactgtgggaggccgaggcgggcgaattgcctgagctcaggagtttgaaaccagcctgtgcaacacggtgaaacctcgtctctaataaaatacaaaaaattagctgggcttggcagagtgcacctgtagtcccggatactcaggaggctgagacaggagaactgcttgaacctgggaggtggagtttgccgtgagccaagatcgcgccactgcactccagcctggcaacagagactttgtctc

SEQ ID NO: 23830 - DNA, 304 bp, Homo sapiens
tctcctactttgcagaaacggtcatgttaaggtcaccaatgataaaatcctcagtcctcatctcactttttaatagcagtatagacacaagttaatcactcttttcttggaaacacttccttttgggacaacacattctcctcctggttttcctccaaactctggcttgttttccttctcaacttggctgatttatgtctcacctgcttgtcttgttaacattggagtatccaggctacaatcttagatctcttcttttctctctatttaaatttactaggtaatcttatcccatcccttgtta

SEQ ID NO: 23831 - DNA, 3435 bp, Homo sapiens
gtgtctcctgtctggctgtttttttgagacggagtctcactctgccgcccaggctggagtgcagtggaacgatctcggctcactgcaacctccacttcctgggttcaagccattctcctgcctcagcctccctagtagctgggattacaggcgcccaccaccacaccctgtctctactaaaaatacaacattagccaggcgtggtggtgcatgcctgtattcccagctactttggaggctgagacagaattgcttgaacccgggaggcggagggtgcagtgagccgagattgggccattgccctccagcctgggcaacaagagtgaaattacatctccaaaaaaaaaattttttttatttctcgagtttgagtgaaaggagcgacccggaggtgaggcagtggggcgtgtgggtgcgcatgagtgcgaacacacgtgggggtgcaagtgcatgtgtgtatgtgcacgcaggttgctcctaggggtgcaaaggcgcgcgcacgggtgcggggtgcgcgccccctcgcggcgccttcacggccctcccgcccctcgccctgcagagtacagcggccgccggcagccctaccccttcgagcgcatgatcttcggcgcctgcgctggcctcatcgggcagtcggcctcgtacccgctggatgtggtgcggcggcgcatgcagacggccggcgtcacgggctacccgcgcgcctccatcgcccgcacgctgcgcaccatcgtgcgggaggagggcgccgtgcgcggcctctacaaaggcttgagcatgaactgggtcaagggtcccatcgccgtgggcatcagcttcaccaccttcgacctcatgcagatcctgctgcggcacctgcagagctaggggaccctgagctgctctcaggacggtggaccggtgacccctttgtattctgggcccatggaacggtgggggggtgcgcttgattctacttcaggaggcacatggggcgctttatggaacgagcaggtgggcctgaggggcctgggctcagagtccacgtccaaacgcaaagctggcagccctggaagtgcagtgttggggcgatggtgtggggggtcccgcagctcccctcttccttcctctgcagacgctggcgctgtctgccggaggtgttgcccaaaaggccctagtggggcgtggtcagctccacctcctgatcctgtgtgtcctccgacatgctgctgattctagtgacccctgtccccaccaggctcagagccagactgcgcctggaccttcttgttctgactccacgtgcctgcccggcctccagggtgcgggggcgcctttcttgcaggcggaccctgcccaggatggggccagcctcgtgctcagctttggccacaaatgcagcccctggcccaccccaccctgccggccctgccttctccagtatttcccacatggccacgactcctcagtcactagagcctcctgctgggaacagtgtcccccagagcctcatgtctatcctagaccctgcaagcagctgggtccccaagagtgcatctccccctagagttgcctgcccatgcccacctgctttgtaaccttcccaggagattcatgcttgctctgcacagcagggctcgaggcccaggccatgacacggaactgcctcaggtttgggtcagacctgcatcctggggcatctgctgaaatgtgagcacacaaaccacctcctttggcccagaagccccccaggcctagcatctcagtgccccaaccctctgcccagctgtggtatccagcaggtccttgggtccccacttgagcaggcacttggctgggatatggagcaatttaaagcccacaggggttgttcagtttctatgaaatggagcatggggtgcctgctagcctcaatcccccgaagtgggagcctcatgatagagtatagcttgggggtgggaggtgaggaaaatctgaggtacccaggggaacccccagctaactggtctctcagaggagtcccccagggcccgccagctatcacagggactcagaaacacccatttcctaatgacatggtgagtttcttgatttcttttttttgtttgttttgttttggttttcaacttggctgaccccgggtctatgatctattcacatcgaacccctgactggtctgcctggtgccagggtgagcgtgaccgtgagtgttgctttcgacagctggctcagcacacgctgtgtgaagggatctgagcttgttcatctccagtcgtgacttcatttcccttccttctgtcctcctcctgttcttgccttggacctgcaggtgtgcagaccgctctctctgccttccttgcatgtggccaccagccatccctgatcttgtccccagaggcccaggcagcctgtgatggctgtgaggggctgtcccactgtgtgggtatcccttacccagcacttaaacttggcaggagaggcagggcaaccctcacagggagatgggagggcacccaactcccacaagcatgcaacagcagtaggaattgggggtctgccccaaggtgggtgagaccaaatgagtggatttggggccacaggctaggcaggagagacaaggggtaggtgggagggtcccccagtccctgctgaccccagtgtgtctccccggagatggctcctagctgagtgggacccggcaggagttggggacagtgctgtcccccacccctgcacacagccaggccctcaggctctgcggtcactcgcctccctgctggtcactggtcttggtctggagttatattttgatgccatgaagacactgtttatatctaatgtttatatattttaaagatttgtgccaagagagtatatttaataaaaacttaaatgacttcttctcctgctcctggctcttctttggctctgaccgcccccccatcttcccccatgaacccccaaacagggttgaagtgcttttgacacatttgtgataaaagttctgaataaaagtcttgaataaagaagtttttaaatgcaattgttgtttgaattaatacataccacaattttccagaaaacaccagctgtccacaagggtttacagtgaaaagtaggtgaacagttccctctgcagggggcctcctgtgaccattttctcttgtctcctcccacagagattctgtgcatacactcatccctttcaggatatatgtggccacccacaaaggcaggaggggccgtctctgtgcagccagcacagcccaaagtctcatgggcttgaacatggccttccttcccaagagccctgcactctggggctggctgaggcttcaggcctgaacgtcagtcaccatctgcaggggcagccaccagagggtctccagtggcaatcctggctcacttcacctgcagcccattggccagagcaacttggaggacccacccact

SEQ ID NO: 23832 - DNA, 3335 bp, Homo sapiens
gtgtctcctgtctggctgtttttttgagacggagtctcactctgccgcccaggctggagtgcagtggaacgatctcggctcactgcaacctccacttcctgggttcaagccattctcctgcctcagctactttggaggctgagacagaattgcttgaacccgggaggcggagggtgcagtgagccgagattgggccattgccctccagcctgggcaacaagagtgaaattacatctccaaaaaaaaaattttttttatttctcgagtttgagtgaaaggagcgacccggaggtgaggcagtggggcgtgtgggtgcgcatgagtgcgaacacacgtgggggtgcaagtgcatgtgtgtatgtgcacgcaggttgctcctaggggtgcaaaggcgcgcgcacgggtgcggggtgcgcgccccctcgcggcgccttcacggccctcccgcccctcgccctgcagagtacagcggccgccggcagccctaccccttcgagcgcatgatcttcggcgcctgcgctggcctcatcgggcagtcggcctcgtacccgctggatgtggtgcggcggcgcatgcagacggccggcgtcacgggctacccgcgcgcctccatcgcccgcacgctgcgcaccatcgtgcgggaggagggcgccgtgcgcggcctctacaaaggcttgagcatgaactgggtcaagggtcccatcgccgtgggcatcagcttcaccaccttcgacctcatgcagatcctgctgcggcacctgcagagctaggggaccctgagctgctctcaggacggtggaccggtgacccctttgtattctgggcccatggaacggtgggggggtgcgcttgattctacttcaggaggcacatggggcgctttatggaacgagcaggtgggcctgaggggcctgggctcagagtccacgtccaaacgcaaagctggcagccctggaagtgcagtgttggggcgatggtgtggggggtcccgcagctcccctcttccttcctctgcagacgctggcgctgtctgccggaggtgttgcccaaaaggccctagtggggcgtggtcagctccacctcctgatcctgtgtgtcctccgacatgctgctgattctagtgacccctgtccccaccaggctcagagccagactgcgcctggaccttcttgttctgactccacgtgcctgcccggcctccagggtgcgggggcgcctttcttgcaggcggaccctgcccaggatggggccagcctcgtgctcagctttggccacaaatgcagcccctggcccaccccaccctgccggccctgccttctccagtatttcccacatggccacgactcctcagtcactagagcctcctgctgggaacagtgtcccccagagcctcatgtctatcctagaccctgcaagcagctgggtccccaagagtgcatctccccctagagttgcctgcccatgcccacctgctttgtaaccttcccaggagattcatgcttgctctgcacagcagggctcgaggcccaggccatgacacggaactgcctcaggtttgggtcagacctgcatcctggggcatctgctgaaatgtgagcacacaaaccacctcctttggcccagaagccccccaggcctagcatctcagtgccccaaccctctgcccagctgtggtatccagcaggtccttgggtccccacttgagcaggcacttggctgggatatggagcaatttaaagcccacaggggttgttcagtttctatgaaatggagcatggggtgcctgctagcctcaatcccccgaagtgggagcctcatgatagagtatagcttgggggtgggaggtgaggaaaatctgaggtacccaggggaacccccagctaactggtctctcagaggagtcccccagggcccgccagctatcacagggactcagaaacacccatttcctaatgacatggtgagtttcttgatttcttttttttgtttgttttgttttggttttcaacttggctgaccccgggtctatgatctattcacatcgaacccctgactggtctgcctggtgccagggtgagcgtgaccgtgagtgttgctttcgacagctggctcagcacacgctgtgtgaagggatctgagcttgttcatctccagtcgtgacttcatttcccttccttctgtcctcctcctgttcttgccttggacctgcaggtgtgcagaccgctctctctgccttccttgcatgtggccaccagccatccctgatcttgtccccagaggcccaggcagcctgtgatggctgtgaggggctgtcccactgtgtgggtatcccttacccagcacttaaacttggcaggagaggcagggcaaccctcacagggagatgggagggcacccaactcccacaagcatgcaacagcagtaggaattgggggtctgccccaaggtgggtgagaccaaatgagtggatttggggccacaggctaggcaggagagacaaggggtaggtgggagggtcccccagtccctgctgaccccagtgtgtctccccggagatggctcctagctgagtgggacccggcaggagttggggacagtgctgtcccccacccctgcacacagccaggccctcaggctctgcggtcactcgcctccctgctggtcactggtcttggtctggagttatattttgatgccatgaagacactgtttatatctaatgtttatatattttaaagatttgtgccaagagagtatatttaataaaaacttaaatgacttcttctcctgctcctggctcttctttggctctgaccgcccccccatcttcccccatgaacccccaaacagggttgaagtgcttttgacacatttgtgataaaagttctgaataaaagtcttgaataaagaagtttttaaatgcaattgttgtttgaattaatacataccacaattttccagaaaacaccagctgtccacaagggtttacagtgaaaagtaggtgaacagttccctctgcagggggcctcctgtgaccattttctcttgtctcctcccacagagattctgtgcatacactcatccctttcaggatatatgtggccacccacaaaggcaggaggggccgtctctgtgcagccagcacagcccaaagtctcatgggcttgaacatggccttccttcccaagagccctgcactctggggctggctgaggcttcaggcctgaacgtcagtcaccatctgcaggggcagccaccagagggtctccagtggcaatcctggctcacttcacctgcagcccattggccagagcaacttggaggacccacccact

SEQ ID NO: 23833 - DNA, 3024 bp, Homo sapiens
gtgtctcctgtctggctgtttttttgagacggagtctcactctgccgcccaggctggagtgcagtggaacgatctcggctcactgcaacctccacttcctgggttcaagccattctcctgcctcagcctccctagtagctgggattacaggcgcccaccaccacaccctgtctctactaaaaatacaacattagccaggcgtggtggtgcatgcctgtattcccagctactttggaggctgagacagaattgcttgaacccgggaggcggagggtgcagtgagccgagattgggccattgccctccagcctgggcaacaagagtgaaattacatctccaaaaaaaaaattttttttatttctcgagtttgagtgaaaggagcgacccggaggtgaggcagtggggcgtgtgggtgcgcatgagtgcgaacacacgtgggggtgcaagtgcatgtgtgtatgtgcacgcaggttgctcctaggggtgcaaaggcgcgcgcacgggtgcggggtgcgcgccccctcgcggcgccttcacggccctcccgcccctcgccctgcagagtacagcggccgccggcagccctaccccttcgagcgcatgatcttcggcgcctgcgctggcctcatcgggcagtcggcctcgtacccgctggatgtggtgcggcggcgcatgcagacggccggcgtcacgggctacccgcgcgcctccatcgcccgcacgctgcgcaccatcgtgcgggaggagggcgccgtgcgcggcctctacaaaggcttgagcatgaactgggtcaagggtcccatcgccgtgggcatcagcttcaccaccttcgacctcatgcagatcctgctgcggcacctgcagagctaggggaccctgagctgctctcaggacggtggaccggtgacccctttgtattctgggcccatggaacggtgggggggtgcgcttgattctacttcaggaggcacatggggcgctttatggaacgagcaggtgggcctgaggggcctgggctcagagtccacgtccaaacgcaaagctggcagccctggaagtgcagtgttggggcgatggtgtggggggtcccgcagctcccctcttccttcctctgcagacgctggcgctgtctgccggaggtgttgcccaaaaggccctagtggggcgtggtcagctccacctcctgatcctgtgtgtcctccgacatgctgctgattctagtgacccctgtccccaccaggctcagagccagactgcgcctggaccttcttgttctgactccacgtgcctgcccggcctccagggtgcgggggcgcctttcttgcaggcggaccctgcccaggatggggccagcctcgtgctcagctttggccacaaatgcagcccctggcccaccccaccctgccggccctgccttctccagtatttcccacatggccacgactcctcagtcactagagcctcctgctgggaacagtgtcccccagagcctcatgtctatcctagaccctgcaagcagctgggtccccaagagtgcatctccccctagagttgcctgcccatgcccacctgctttgtaaccttcccaggagattcatgcttgctctgcacagcagggctcgaggcccaggccatgacacggaactgcctcaggtttgggtcagacctgcatcctggggcatctgctgaaatgtgagcacacaaaccacctcctttggcccagaagccccccaggcctagcatctcagtgccccaaccctctgcccagctgtggtatccagcaggtccttgggtccccacttgagcaggcacttggctgggatatggagcaatttaaagcccacaggggttgttcagtttctatgaaatggagcatggggtgcctgctagcctcaatcccccgaagtgggagcctcatgatagagtatagcttgggggtgggaggtgaggaaaatctgaggtacccaggggaacccccagctaactggtctctcagaggagtcccccagggcccgccagctatcacagggactcagaaacacccatttcctaatgacatggtgagtttcttgatttcttttttttgtttgttttgttttggttttcaacttggctgaccccgggtctatgatctattcacatcgaacccctgactggtctgcctggtgccagggtgagcgtgaccgtgagtgttgctttcgacagctggctcagcacacgctgtgtgaagggatctgagcttgttcatctccagtcgtgacttcatttcccttccttctgtcctcctcctgttcttgccttggacctgcaggtgtgcagaccgctctctctgccttccttgcatgtggccaccagccatccctgatcttgtccccagaggcccaggcagcctgtgatggctgtgaggggctgtcccactgtgtgggtatcccttacccagcacttaaacttggcaggagaggcagggcaaccctcacagggagatgggagggcacccaactcccacaagcatgcaacagcagtaggaattgggggtctgccccaaggtgggtgagaccaaatgagtggatttggggccacaggctaggcaggagagacaaggggtaggtgggagggtcccccagtccctgctgaccccagtgtgtctccccggagatggctcctagctgagtgggacccggcaggagttggggacagtgctgtcccccacccctgcacacagccaggccctcaggctctgcggtcactcgcctccctgctggtcactggtcttggtctggagttatattttgatgccatgaagacactgtttatatctaatgtttatatattttaaagatttgtgccaagagagtatatttaataaaaacttaaatgacttcttctcctgctcctggctcttctttggctctgaccgcccccccatcttcccccatgaacccccaaacagggttgaagtgcttttgacacatttgtgataaaagttctgaataaaagtcttgaataaagaagtttttaaatgca

SEQ ID NO: 23834 - DNA, 3381 bp, Homo sapiens
gtgtctcctgtctggctgtttttttgagacggagtctcactctgccgcccaggctggagtgcagtggaacgatctcggctcactgcaacctccacttcctgggttcaagccattctcctgcctcagcctccctagtagctgggattacaggcgcccaccaccacaccctgtctctactaaaaatacaacattagccaggcgtggtggtgcatgcctgtattcccagctactttggaggctgagacagaattgcttgaacccgggaggcggagggtgcagtgagccgagattgggccattgccctccagcctgggcaacaagagtgaaattacatctccaaaaaaaaaattttttttatttctcgagtttgagtgaaaggagcgacccggaggtgaggcagtggggcgtgtgggtgcgcatgagtgcgaacacacgtgggggtgcaagtgcatgtgtgtatgtgcacgcaggttgctcctaggggtgcaaaggcgcgcgcacgggtgcggggtgcgcgccccctcgcggcgccttcacggccctcccgcccctcgccctgcagagtacagcggccgccggcagccctaccccttcgagcgcatgatcttcggcgcctgcgctggcctcatcgggcagtcggcctcgtacccgctggatgtggtgcggcggcgcatgcagacggccggcgtcacgggctacccgcgcgcctccatcgcccgcacgctgcgcaccatcgtgcgggaggagggcgccgtgcgcggcctctacaaaggcttgagcatgaactgggtcaagggtcccatcgccgtgggcatcagcttcaccaccttcgacctcatgcagatcctgctgcggcacctgcagagctaggggaccctgagctgctctcaggacggtggaccggtgacccctttgtattctgggcccatggaacggtgggggggtgcgcttgattctacttcaggaggcacatggggcgctttatggaacgagcaggtgggcctgaggggcctgggctcagagtccacgtccaaacgcaaagctggcagccctggaagtgcagtgttggggcgatggtgtggggggtcccgcagctcccctcttccttcctctgcagacgctggcgctgtctgccggaggtgttgcccaaaaggccctagtggggcgtggtcagctccacctcctgatcctgtgtgtcctccgacatgctgctgattctagtgacccctgtccccaccaggctcagagccagactgcgcctggaccttcttgttctgactccacgtgcctgcccggcctccagggtgcgggggcgcctttcttgcaggcggaccctgcccaggatggggccagcctcgtgctcagctttggccacaaatgcagcccctggcccaccccaccctgccggccctgccttctccagtatttcccacatggccacgactcctcagtcactagagcctcctgctgggaacagtgtcccccagagcctcatgtctatcctagaccctgcaagcagctgggtccccaagagtgcatctccccctagagttgcctgcccatgcccacctgctttgtaaccttcccaggagattcatgcttgctctgcacagcagggctcgaggcccaggccatgacacggaactgcctcaggtttgggtcagacctgcatcctggggcatctgctgaaatgtgagcacacaaaccacctcctttggcccagaagccccccaggcctagcatctcagtgccccaaccctctgcccagctgtggtatccagcaggtccttgggtccccacttgagcaggcacttggctgggatatggagcaatttaaagcccacaggggttgttcagtttctatgaaatggagcatggggtgcctgctagcctcaatcccccgaagtgggagcctcatgatagagtatagcttgggggtgggaggtgaggcccagggcccgccagctatcacagggactcagaaacacccatttcctaatgacatggtgagtttcttgatttcttttttttgtttgttttgttttggttttcaacttggctgaccccgggtctatgatctattcacatcgaacccctgactggtctgcctggtgccagggtgagcgtgaccgtgagtgttgctttcgacagctggctcagcacacgctgtgtgaagggatctgagcttgttcatctccagtcgtgacttcatttcccttccttctgtcctcctcctgttcttgccttggacctgcaggtgtgcagaccgctctctctgccttccttgcatgtggccaccagccatccctgatcttgtccccagaggcccaggcagcctgtgatggctgtgaggggctgtcccactgtgtgggtatcccttacccagcacttaaacttggcaggagaggcagggcaaccctcacagggagatgggagggcacccaactcccacaagcatgcaacagcagtaggaattgggggtctgccccaaggtgggtgagaccaaatgagtggatttggggccacaggctaggcaggagagacaaggggtaggtgggagggtcccccagtccctgctgaccccagtgtgtctccccggagatggctcctagctgagtgggacccggcaggagttggggacagtgctgtcccccacccctgcacacagccaggccctcaggctctgcggtcactcgcctccctgctggtcactggtcttggtctggagttatattttgatgccatgaagacactgtttatatctaatgtttatatattttaaagatttgtgccaagagagtatatttaataaaaacttaaatgacttcttctcctgctcctggctcttctttggctctgaccgcccccccatcttcccccatgaacccccaaacagggttgaagtgcttttgacacatttgtgataaaagttctgaataaaagtcttgaataaagaagtttttaaatgcaattgttgtttgaattaatacataccacaattttccagaaaacaccagctgtccacaagggtttacagtgaaaagtaggtgaacagttccctctgcagggggcctcctgtgaccattttctcttgtctcctcccacagagattctgtgcatacactcatccctttcaggatatatgtggccacccacaaaggcaggaggggccgtctctgtgcagccagcacagcccaaagtctcatgggcttgaacatggccttccttcccaagagccctgcactctggggctggctgaggcttcaggcctgaacgtcagtcaccatctgcaggggcagccaccagagggtctccagtggcaatcctggctcacttcacctgcagcccattggccagagcaacttggaggacccacccact

SEQ ID NO: 23835 - DNA, 2877 bp, Homo sapiens
gtgtctcctgtctggctgtttttttgagacggagtctcactctgccgcccaggctggagtgcagtggaacgatctcggctcactgcaacctccacttcctgggttcaagccattctcctgcctcagcctccctagtagctgggattacaggcgcccaccaccacaccctgtctctactaaaaatacaacattagccaggcgtggtggtgcatgcctgtattcccagctactttggaggctgagacagaattgcttgaacccgggaggcggagggtgcagtgagccgagattgggccattgccctccagcctgggcaacaagagtgaaattacatctccaaaaaaaaaattttttttatttctcgagtttgagtgaaaggagcgacccggaggtgaggcagtggggcgtgtgggtgcgcatgagtgcgaacacacgtgggggtgcaagtgcatgtgtgtatgtgcacgcaggttgctcctaggggtgcaaaggcgcgcgcacgggtgcggggtgcgcgccccctcgcggcgccttcacggccctcccgcccctcgccctgcagagtacagcggccgccggcagccctaccccttcgagcgcatgatcttcggcgcctgcgctggcctcatcgggcagtcggcctcgtacccgctggatgtggtgcggcggcgcatgcagacggccggcgtcacgggctacccgcgcgcctccatcgcccgcacgctgcgcaccatcgtgcgggaggagggcgccgtgcgcggcctctacaaaggcttgagcatgaactgggtcaagggtcccatcgccgtgggcatcagcttcaccaccttcgacctcatgcagatcctgctgcggcacctgcagagctaggggaccctgagctgctctcaggacggtggaccggtgacccctttgtattctgggcccatggaacggtgggggggtgcgcttgattctacttcaggaggcacatggggcgctttatggaacgagcaggtgggcctgaggggcctgggctcagagtccacgtccaaacgcaaagctggcagccctggaagtgcagtgttggggcgatggtgtggggggtcccgcagctcccctcttccttcctctgcagacgctggcgctgtctgccggaggtgttgcccaaaaggccctagtggggcgtggtcagctccacctcctgatcctgtgtgtcctccgacatgctgctgattctagtgacccctgtccccaccaggctcagagccagactgcgcctggaccttcttgttctgactccacgtgcctgcccggcctccagggtgcgggggcgcctttcttgcaggcggaccctgcccaggatggggccagcctcgtgctcagctttggccacaaatgcagcccctggcccaccccaccctgccggccctgccttctccactaactggtctctcagaggagtcccccagggcccgccagctatcacagggactcagaaacacccatttcctaatgacatggtgagtttcttgatttcttttttttgtttgttttgttttggttttcaacttggctgaccccgggtctatgatctattcacatcgaacccctgactggtctgcctggtgccagggtgagcgtgaccgtgagtgttgctttcgacagctggctcagcacacgctgtgtgaagggatctgagcttgttcatctccagtcgtgacttcatttcccttccttctgtcctcctcctgttcttgccttggacctgcaggtgtgcagaccgctctctctgccttccttgcatgtggccaccagccatccctgatcttgtccccagaggcccaggcagcctgtgatggctgtgaggggctgtcccactgtgtgggtatcccttacccagcacttaaacttggcaggagaggcagggcaaccctcacagggagatgggagggcacccaactcccacaagcatgcaacagcagtaggaattgggggtctgccccaaggtgggtgagaccaaatgagtggatttggggccacaggctaggcaggagagacaaggggtaggtgggagggtcccccagtccctgctgaccccagtgtgtctccccggagatggctcctagctgagtgggacccggcaggagttggggacagtgctgtcccccacccctgcacacagccaggccctcaggctctgcggtcactcgcctccctgctggtcactggtcttggtctggagttatattttgatgccatgaagacactgtttatatctaatgtttatatattttaaagatttgtgccaagagagtatatttaataaaaacttaaatgacttcttctcctgctcctggctcttctttggctctgaccgcccccccatcttcccccatgaacccccaaacagggttgaagtgcttttgacacatttgtgataaaagttctgaataaaagtcttgaataaagaagtttttaaatgcaattgttgtttgaattaatacataccacaattttccagaaaacaccagctgtccacaagggtttacagtgaaaagtaggtgaacagttccctctgcagggggcctcctgtgaccattttctcttgtctcctcccacagagattctgtgcatacactcatccctttcaggatatatgtggccacccacaaaggcaggaggggccgtctctgtgcagccagcacagcccaaagtctcatgggcttgaacatggccttccttcccaagagccctgcactctggggctggctgaggcttcaggcctgaacgtcagtcaccatctgcaggggcagccaccagagggtctccagtggcaatcctggctcacttcacctgcagcccattggccagagcaacttggaggacccacccact

SEQ ID NO: 23836 - DNA, 2572 bp, Homo sapiens
gtgtctcctgtctggctgtttttttgagacggagtctcactctgccgcccaggctggagtgcagtggaacgatctcggctcactgcaacctccacttcctgggttcaagccattctcctgcctcagcctccctagtagctgggattacaggcgcccaccaccacaccctgtctctactaaaaatacaacattagccaggcgtggtggtgcatgcctgtattcccagctactttggaggctgagacagaattgcttgaacccgggaggcggagggtgcagtgagccgagattgggccattgccctccagcctgggcaacaagagtgaaattacatctccaaaaaaaaaattttttttatttctcgagtttgagtgaaaggagcgacccggaggtgaggcagtggggcgtgtgggtgcgcatgagtgcgaacacacgtgggggtgcaagtgcatgtgtgtatgtgcacgcaggttgctcctaggggtgcaaaggcgcgcgcacgggtgcggggtgcgcgccccctcgcggcgccttcacggccctcccgcccctcgccctgcagagtacagcggccgccggcagccctaccccttcgagcgcatgatcttcggcgcctgcgctggcctcatcgggcagtcggcctcgtacccgctggatgtggtgcggcggcgcatgcagacggccggcgtcacgggctacccgcgcgcctccatcgcccgcacgctgcgcaccatcgtgcgggaggagggcgccgtgcgcggcctctacaaaggcttgagcatgaactgggtcaagggtcccatcgccgtgggcatcagcttcaccaccttcgacctcatgcagatcctgctgcggcacctgcagagctaggggaccctgagctgctctcaggacggtggaccggtgacccctttgtattctgggcccatggaacggtgggggggtgcgcttgattctacttcaggaggcacatggggcgctttatggaacgagcaggtgggcctgaggggcctgggctcagagtccacgtccaaacgcaaagctggcagccctggaagtgcagtgttggggcgatggtgtggggggtcccgcagctcccctcttccttcctctgcagacgctggcgctgtctgccggaggtgttgcccaaaaggccctagtggggcgtggtcagctccacctcctgatcctgtgtgtcctccgacatgctgctgattctagtgacccctgtccccaccaggctcagagccagactgcgcctggaccttcttgttctgactccacgtgcctgcccggcctccagggtgcgggggcgcctttcttgcaggcggaccctgcccaggatggggccagcctcgtgctcagctttggccacaaatgcagcccctggcccaccccaccctgccggccctgccttctccagtatttcccacatggccacgactcctcagtcactagagcctcctgctgggaacagtgtcccccagagcctcatgtctatcctagaccctgcaagcagctgggtccccaagagtgcatctccccctagagttgcctgcccatgcccacctgctttgtaaccttcccaggagattcatgcttgctctgcacagcagggctcgaggcccaggccatgacacggaactgcctcaggtttgggtcagacctgcatcctggggcatctgctgaaatgtgagcacacaaaccacctcctttggcccagaagccccccaggcctagcatctcagtgccccaaccctctgcccagctgtggtatccagcaggtccttgggtccccacttgagcaggcacttggctgggatatggagcaatttaaagcccacaggggttgttcagtttctatgaaatggagcatggggtgcctgctagcctcaatcccccgaagtgggagcctcatgatagagtatagcttgggggtgggaggtgaggaaaatctgaggtacccaggggaacccccagctaactggtctctcagaggagtcccccagggcccgccagctatcacagggactcagaaacacccatttcctaatgacatggtgagtttcttgatttcttttttttgtttgttttgttttggttttcaacttggctgaccccgggtctatgatctattcacatcgaacccctgactggtctgcctggtgccagggtgagcgtgaccgtgagtgttgctttcgacagctggctcagcacacgctgtgtgaagggatctgagcttgttcatctccagtcgtgacttcatttcccttccttctgtcctcctcctgttcttgccttggacctgcaggtgtgcagaccgctctctctgccttccttgcatgtggccaccagccatccctgatcttgtccccagaggcccaggcagcctgtgatggctgtgaggggctgtcccactgtgtgggtatcccttacccagcacttaaacttggcaggagaggcagggcaaccatcttcccccatgaacccccaaacagggttgaagtgcttttgacacatttgtgataaaagttctgaataaaagtcttgaataaagaagtttttaaatgca

SEQ ID NO: 23837 - DNA, 308 bp, Homo sapiens
tctaagagttgtacagtttttgctcttacatttagatctttgatctattatgggttgatttttgtacatggtgttatgtaaaggttctagttttcttgcccttgaatatccagctttcccaatatcatttggtgagaacactgtcccttccccattgaatgatcttggcacactcgatgaaaatcatttggccatatatgcaagaatttctttctgggctattatacttcattaatttctatgtcctcctttatgccagtaccacactgtattgattactggggctttgtagtaaatgctgaaatcag

SEQ ID NO: 23838 - DNA, 1052 bp, Homo sapiens
ttattaacattgaaatcatggccaacagctctgtaaatcatgcctcaatgaagattatctcacacttgtattttctctgtagtctttgctccttgaacactagacagcactttagcactacgcttagggactgttttcaacagtgaaatcaccaatagcaagcacaaaaatgagaaaaacatggcactaaatagaccatgaaaaggacacttgtttacactatgtaagctgaaactagaatgtgcacgtcagtagactcacatttttcaccattgtgcacatgtctgcaatgacagtggaagtgctatgagtaatgattttggggatacaaataaatgttagtgagtagatgaatttgtaaatatagtatcctcaactaatgaggagcaacctttgttataggtagatatgtatatgcacatattatgtctataatttgaaaagcagattctcaggggtaggttgtatgttataactaaactgttaaagttttctctctgaaacattatatactttgtatcataatgtctttgtagtcaagcacataagtgtttgaaaatagaacttgcacctttttagttcctcctcaaagtttaaaggactgataacatagtgaggcagttcatgttttttttctcaaaaacatgtttaggagtctgtactaagcagatcccagctttggtctgtagaaatgagggagagcggtatgttggttttagcttcaaacagtgacaaattgtcaggctcatataattaattcaatgtaaccttccaagtttttactaaaacctggggttggcttgttgaccacatgcatcaccataacaagcctttggtgctagtctgaggaatttaatactgattgataataagttggtttttgagtaggggacattgttttccctaaatgtccttggtacaaaatggacctaaaatggggtgttgagactgggagagcagagataacttgttgagataatgtaatcacgaggttatgggggctgggtaggaatgatagtgtgaatatggtgatgtgggtaagatttactgag

SEQ ID NO: 23839 - DNA, 318 bp, Homo sapiens
taatttaaatatatttacttaactggaatgaagaaactgagacaccaagattaagtaacttactcaggatcaagcaatcttactcctaagcctactctcttaactatgttgtaatgaaaaccctactgtttaagaaagctggagtaggtttgctaatatttgcaacataaaatggactaaatgatggtctgaaaaagggttacccagtctcccttttcctcctctgctccttacacctggaaaatatttagtatccaccaccccatcataggctcctctgtctatccttctcttgcccctagttcaatttgtcatgtt

SEQ ID NO: 23840 - DNA, 258 bp, Homo sapiens
gaaaagagtcattgcccacagtgaaggcagagaaagatgagaactagaaggagacactcaataatgtcagagtaaaatggagaaaataataaaaaaaagagagaaaggggagagagagtccacgataggaacagaagaaaatcctcacaccaccaagcctagcggagcagcagtgacggtacttaatgcagtccagcactcatctggtccctccacttagatatcatctagttgcaaagtccagatgtgattggatca

SEQ ID NO: 23841 - DNA, 220 bp, Homo sapiens
aacctgtgaggcagagtcttcagtgagccgagaacatgccgttgcactccagcctgggcaacagcgagactgcctcaaacaaacaaaaaaacttgctacattagaaaaatagtaagaaaaatgctaactatatatgttattaaagaaaccacccagaaaagtaatgcaaataaatgtattaaggaacaactacatttcaggttaattatatctagtataa

SEQ ID NO: 23842 - DNA, 420 bp, Homo sapiens
gcgcacctgtagtcccagctacttgggatgctaaagtgggaggattgcttgagctgagaagttcaaggctactaatgtgggctatgattgcaccactgcactccagcctggacaacataagagaaaaaaaagtaaatgttaattatctgaattgtctttgtaattgttgtccatttttctattagaatgtttgatttgtaaaggatctttgttaggaatattaaccctttgccatatttattgtaaatattttttcatttgtcttatatatgttttttctttttatttttgtcatacagaatatcttaatttttatgtagtcaaatttaacattattttactttgtgttctttttgtaactatctttgacctagtatttaataaaaaggggggaagggagcaggtagtggggaacagctt

SEQ ID NO: 23843 - DNA, 162 bp, Homo sapiens
gcgatgatagctcctaaaccgtagattaaatgagagaatactttccccataggattaagtaagataatgattgcatggaatgtcctgagcactgggcggggccaaacattccctaaatgtttgctttatgggaatataggggaatcctattcctatctttgc

SEQ ID NO: 23844 - DNA, 569 bp, Homo sapiens
catttttgtagatggggtctcactatgtgcccagactggtcttgaactcttgggctcaagcaatccccccacctcagtctcccaaagtgctaggattagaggtatgagctacttaccctggctgattctgtatatttttttttaaatcaccaaacttcctctgttgacgttttaaaagtaatgttatttatctttacaatatcagttggtcagaattgatgatgcttcttgtttgtatggatttttagtagtattgctaaggcatctcgggtttattagttgggaaccactgaaagggatatgatttagcctttactttcttagtttaatgacaaatatttctattatccaagggggcaaattcagtgccacatcacactttttcttttaaatcttaaaattacctcagatttttttttttgttttaagaaaactggaatgcaattatatattaaataaattttaactgccatcttgttgcatgtgtctgtttcatgtgagtgaatagtgtatcacttcagaaaaaccttgttcttttttttgatggactattaagtattttttcaact

SEQ ID NO: 23845 - DNA, 583 bp, Homo sapiens
tcaaatgtgaaaagtaacaagtggcaacattcttgttaaaaactcatatagaaagttggtcatttgcaaaacaggtctgccaaaggaaaaaaaaaaaaaaacaaaaaaacaacaacaacacatacacatttagaggttttaaaagcctattctggtttttcaagcagggtatacagaaacaaaacatcaaattaaatgactttaactcaactagaagtaggaattaatattattcctttctctgacattcaaagctcatcaggcaaagttctcaagacagtattttcttggcttacactacttgagacaaaagtatttcctagtgattaacattacgtgaccctttcaaacctgagcaaagctcgcctaactattctaaaatggtattacaaattgagtattccttattgaaatgtctgggaacagaagtgtttcaaactttttcggattctgaaatagttgcatgaaatttactggttgagcatcctgaatctgaaaatctgaaatccgaaatactccaatgagcactctcagtatcgtgctggtgctcaaaaagtttcagattttggagcattttgggttg

SEQ ID NO: 23846 - DNA, 421 bp, Homo sapiens
tgaagagtctcgtggtgagaaagacagaattcctagccaggaaaatgccccgtgcttgccccttggaggcaggtgctcaccacggcagggtctatctaggtgtttattaaggtgtctcaccacgtatcgcccggattcaccagagatgcagaggcggaggatacgttcctgtttacattgatacatagttacataggtgaagagctttacagtgaggaagcggctcacgcggccatgagggacccaggcaggagctgctgttgctgccccaggtgcgattccttcctcctcagggagggctcagctccccgctgcagccaggtgggcccaggcaggcctccttggcctacagcgcagacggccaagtgctggtcacggccattgcatctacaccaccctttctcagcagcaactccacgag

SEQ ID NO: 23847 - DNA, 615 bp, Homo sapiens
gcactcacctaatagagacacagttgggaaaggggtagccaccagtggctctctcactagtgtccgtggagttgagatggagccgtgtgtggagggagagcattgtctggcagcaacttttgtttcttgagagtttccagaatatgctagaatgtgcgacagagaaccacgactaatcagcaaacagagctcagaatggaagatggagaaggttctcagggaaactggggcttcagtgaaccatgacctgtccatttcttgggctgaagaggagatttgttcaaacatagggtgacttctcatcctggttttagtcccttgtcctgggaaatgcctcagtcccgggaaaacgatgatggctggccaccgtacttaaactctagagagacgattcccagggacgcgttccctctctccaaacctctcttcagtgttgatggtgccttggttcccccatccactctgcgaatgcccttggaacacaccaggcctagctctccacgggtttcaacaggcagtagccaccattggtggagagacttctgggtctccagcttcatgggtactttcaactaattatctctgctcctcagacctaccctacaaagtgtgtat

SEQ ID NO: 23848 - DNA, 167 bp, Homo sapiens
ttcttcaatgacaacactgatgcaaagtcctaacagcagtcttggatgatgcgcttttagctgttttataaaaatctgtgtctggtattaatacaagctgttcaatcagaatattgctcataaaattctatttgttttagagttttatattacttcctgcattttcc

SEQ ID NO: 23849 - DNA, 476 bp, Homo sapiens
gatctggaaacctgagggctataggctgcgtccaggcgcaggaagtctggcatggtgtcctggacactggacacagctatccctggcttctctctacctcgtgctctggagtcaggcagaaacctttctactttctggagttgctgagaaggttcagtgataccagcatgaagctcctagaagaagggctggtgcatagctgctgctcagggtggcacagcccctccacagtcctgcccacatgtgagttgccccttcacaccactccctaacactgccctcaccaaagatgcaagcctggtatctcaaccagagaggcatctttcaacatggcaagcaagattactccaaaaaaatgccacttaccatacctttggtgtactgcctctagaggcaaagtttaccgctttactgtcatgaaatagactgtgacttgtgatttatcatttatgtgaccaattatagttacaatcatg

SEQ ID NO: 23850 - DNA, 262 bp, Homo sapiens
ggatttaaattttatttcaaattttgtatttgttaaattaaataataatttactcatatgatttaaaataataaaatattttcataagcatactttttcatacatagttttaaaagatatttagaaaatatcaaagtattattgtttatagtttaaatgtgcaatttctatattattttggatgttggaatatcaacaggagtaatcgatagtatttaaaactttttatatatccatgattgtggtaagcattgagggtcat

SEQ ID NO: 23851 - DNA, 5223 bp, Homo sapiens
  misc_feature (2766)..(2766): n is a, c, g, or t
ctcggggccacggtccccccgcagcgctagtcccgggcccgcgagcaccggcccccgccacccgcaggttgcggagggaggagggcgggagcgggcggcgcggagccgggaggcgggggaggggccggcgtccgaggcggcggcggcggcggctggagcagcctctggcagcagcggggagaatgggagtgcggggcgccagaccgccgcggggtgtcacggccgccacgaagcctgcgaggcgcggggccggcgcccgcggcttttaaacccgggaaggcgcggcggcggcggcggcggcgggcagatcgcggcgcgcaccaggcgccggggcggcggccgaatggagagaaagggctcggcggccggggccaaggggaacccgagcccgcccgcggccggagaggggcagcggccaccgccgccgctgtgcgtcccgggcggcggcggaggagccccagcgaggggccaggtcggggcggcggccgagccggccgagctcatccgacgagcgcacgagttcaaaagccaaggggcgcagtgctacaaggacaagaaattccgtgaagccataggcaaataccaccgggcgttgctggagctgaaggggctgctgccgccccccggggaacgggagcgggactcgcgcgcggcctccccggctggggccctgaagcccggccgcctctcggaggagcagagcaagacggtggaagccatcgagatcgactgttacaacagcctggcagcctgcctgctccaggctgagctggtaaactatgaacgagtcaaggaatattgcctcaaagtcttgaagaaggaaggggagaacttcaaggccctttaccggtctggtgtggccttctaccaccttggggactatgacaaagcactctactacctgaaagaagcaaggacccaacaaccaacagacaccaacgtgattcggtatatccagctgacggagatgaaactcagccgatgctcccagagagaaaaagaagccatgtaaccaggaagcagctccagagctgcgcccacgcctgaccggggacttccaggcatcccctggcagagagccccgtcctggattctgtccctttctccccacttcttctggctcctcatttttcctcctgttgcaccccagctctttgtctcctcccagtacgaaaaggagagatgcaaatttggaatctggtaggtcgcccagacaatggagacatcctctcctctagcaggtcagcgactgagaggggcctgacttctgctgggacagctggagaggagtctcatgggctgggatgctgttgtggctttgactttggccagtgcttctgacagaggcggagcctggcaagtgtaccatcccacaggcagcaggcacacagcccatgggctggatccttccacactttcctgacagaccagaaccagagcatctcgaggcaactgttagaaatccagggacgagacaaacagagaagcgctggtgaagccaacatagagactgtcaatgtgtacactggagttcccacccccaccccccacccgtcacttagcccctgcctccttcccccactcgttgtcttggcttgtgctttctcctctccccatcggggatccgagactctgccaggattcacatgccactgaagcccactcagtgccctctggtgaccacacataccattcccccggactcccacccagcaggcagctgtgaccgcagaagggcaggatgaagtgggccaaggtttgggacaggttgactgtgtaggtgacagggagggaaagatgatggccaggggaaagagcatcgtataggctaggggattgaactgtggactgattcagtgtaaataaaaataaattaacaggtagtagttcctgtcagttctgttggaagcagcccactccctcacttttactccttcctccaaccctcaatcagagctacttacagccaggcaggatggggctttccccaaagcaattggccgtttgtccagtggcagacaatggtggctacagcctttgtgcttttaagagtgggctgggattgtggagactgcccaggggcttggctttgtcagaacttgtacaatcttcttttgatgaaattatctgaactcaacatctagcacatagaatgtgttcaacaaatgcttgttgaatgaataaattatgactgcagactggctctcctgccttaaactaatttcatcccagcctagtctcctgatgtctgtgctcgttatgctatgccatgttgcttcagtcaaacaagaaacacttactgagggcatattgtttgcccatcattgtgcaatatgctgtgggacatgggatgtcgtctcagtcttcaaggaaatggaagggttaagaaatgcatatgagattattaccaatgacacctttaatttatatgatgctttaaaattatcagagcactttcatgtatttttcgtgtgactagtgaaaaagacaatgttgtacaaaattaaaatatatacagatgcaataatgtgaatagttaggatttattaaatgcattatcttcagatctttacatgtataatctcatttctttcatgcagttactctgggatactgttcccatttgatgggtaagaatattgaaaaccagaaaaattaattatcccaaggttgcatggcctttagtggcatagctaggatttgaaccaggcctgcctgactccagagctctggctagtatctatgctatacttagttgcctctctntaagtataatattgggcaattataaccatttgagaacaggacaatatgtattaacctgaaaagtgttcatgatgtcagtgatagtacatggcctccttatgtatttactcaagggccccaaaagaccagaggccagaatccctagtagtcagagcagtgacaggtcagaaaaaggcagctgaggtccaatagttatgtctgtgtattgctcattctacttactgatggagccagcatgtatctcaacaactcacctagcattcatcacccatccccagcattgggaaagggtcacaattaagaccgaaaggaaacacaaagttaaatatgggttaattatgtaagcagatgccccaccacggcaggatccaatcacagccgaggggcccagaagagagcagcgtaagttatattcacatagttccccaaaggctttcaacgggggctacaggaaggtgctagaaatattgaggggcctgccattactcacctagagctcactctctggagaagaggaaaaggaagaagctatttcagctgccacattctccccaatccctactatattatgctgtctttcctcttcctcctagctggctttacatgaccctaacccaaaactaccctatggccccacacgggaatgtgttcaaacgccccgacccccacccccacccccattcccaagcctccaacttagaacgtttgtgatttggcagatggtttgttaggatctgaaggatgaagagaagggtagaggtcacctggagaatgagttcaaactgccagggtcttcccttggtctttgtgcgtcaggaaggactccgagtaattattccctatgcagagacaggagagaggtcttgtttacatgagtgtgctggggcagggctggacaatccaggatatgattgtagccatcccatgtagaaagatcaaaaaccagaacgaaatgaagacagcctctcagaacctcatagaacaagcgtccaggtcatctgcttgtttggtgacttagatatacaggcttactggaactccattcactgtgacctgaagttaaataatcccaaagagaaaaagctacctggggtattggttgatgtttggggtgatagggctgaattttctgtgcatttgtccaacaaaggctttagagcacaaaaccaggttcattctccctaccaaatcttcagcttccttctcctcatccctccccaaaacaagaactgtgatttaattccgtacgttgcggatgtcactgctgacctatgtagctggagtactaatcaggcatctgacctgcactgtcatcccctgcctggacttttgcgatggactctttgggggaaaaactaacgctttttaattattgtgaaagcatcatgtgtgtattgtagaagttttaggaaaaaaaggacaaaatccaatccataagcttaccacccaagacaaacgtgtattcttttgaatataccttttagttctttttggtgtaaatgtacacacgcacacacagttgtggatttttttaaacaaaaactggatacactgaatatactctttaataacttttcaagtgtgtatttatattttagaatatgtaatcctacacagatacaaaattcaaaaagtacaaactgctctgtagtcagaagtaaatcttctccctaccccgtctgccagcatctagtttccctctaatttattttgcatcctagtggagatgcttacacattgtcaaacatatgtatatattcttttatcacacacaaatggcagcatattggacactttttgttttttgctccttctgttccttcacttaataatatcacgaacattttcggcatatcaaactttctcaacagcatcttcattgtatggatggaccctttttttatcatcaatcctcaaatagtgattatttcatttgttcccaatcttcattgtaaatagtgttgcaactgacattcttgtagctaaattttgcacatgtctataacgatttccttaggataaactccaagaagagacttgcttggctatttttaagaattttgatacatgttgccaaccaccctccagaaagtttgtaccaaaacgctctcctatttggatcctagagagtaccctgtttcctgcaccctaacactaggtatcatcacttatcaaatctttcccaatttggtagctgggataatagtatgtcaatgttattttaactttctttgattcttcgcgaataacattttcatatgcttattgaccatttgtacttctttctttgtgaattttctatttatttgatattggtatgtttattatcaatttgtaattttattaagaatattatttttgtcaagaaatgctgcaaatatgctttccaagtgctttgctttcaaattttgtttatggtgctttttgacatacataaattcttaattctgcaattaa

SEQ ID NO: 23852 - DNA, 2572 bp, Homo sapiens
ctcggggccacggtccccccgcagcgctagtcccgggcccgcgagcaccggcccccgccacccgcaggttgcggagggaggagggcgggagcgggcggcgcggagccgggaggcgggggaggggccggcgtccgaggcggcggcggcggcggctggagcagcctctggcagcagcggggagaatgggagtgcggggcgccagaccgccgcggggtgtcacggccgccacgaagcctgcgaggcgcggggccggcgcccgcggcttttaaacccgggaaggcgcggcggcggcggcggcggcgggcagatcgcggcgcgcaccaggcgccggggcggcggccgaatggagagaaagggctcggcggccggggccaaggggaacccgagcccgcccgcggccggagaggggcagcggccaccgccgccgctgtgcgtcccgggcggcggcggaggagccccagcgaggggccaggtcggggcggcggccgagccggccgagctcatccgacgagcgcacgagttcaaaagccaaggggcgcagtgctacaaggacaagaaattccgtgaagccataggcaaataccaccgggcgttgctggagctgaaggggctgctgccgccccccggggaacgggagcgggactcgcgcgcggcctccccggctggggccctgaagcccggccgcctctcggaggagcagagcaagacggtggaagccatcgagatcgactgttacaacagcctggcagcctgcctgctccaggctgagctggtaaactatgaacgagtcaaggaatattgcctcaaagtcttgaagaaggaaggggagaacttcaaggccctttaccggtctggtgtggccttctaccaccttggggactatgacaaagcactctactacctgaaagaagcaaggacccaacaaccaacagacaccaacgtgattcggtatatccagctgacggagatgaaactcagccgatgctcccagagagaaaaagaagccatgtaaccaggaagcagctccagagctgcgcccacgcctgaccggggacttccaggcatcccctggcagagagccccgtcctggattctgtccctttctccccacttcttctggctcctcatttttcctcctgttgcaccccagctctttgtctcctcccagtacgaaaaggagagatgcaaatttggaatctggtaggtcgcccagacaatggagacatcctctcctctagcaggtcagcgactgagaggggcctgacttctgctgggacagctggagaggagtctcatgggctgggatgctgttgtggctttgactttggccagtgcttctgacagaggcggagcctggcaagtgtaccatcccacaggcagcaggcacacagcccatgggctggatccttccacactttcctgacagaccagaaccagagcatctcgaggcaactgttagaaatccagggacgagacaaacagagaagcgctggtgaagccaacatagagactgtcaatgtgtacactggagttcccacccccaccccccacccgtcacttagcccctgcctccttcccccactcgttgtcttggcttgtgctttctcctctccccatcggggatccgagactctgccaggattcacatgccactgaagcccactcagtgccctctggtgaccacacataccattcccccggactcccacccagcaggcagctgtgaccgcagaagggcaggatgaagtgggccaaggtttgggacaggttgactgtgtaggtgacagggagggaaagatgatggccaggggaaagagcatcgtataggctaggggattgaactgtggactgattcagtgtaaataaaaataaattaacaggtagtagttcctgtcagttctgttggaagcagcccactccctcacttttactccttcctccaaccctcaatcagagctacttacagccaggcaggatggggctttccccaaagcaattggccgtttgtccagtggcagacaatggtggctacagcctttgtgcttttaagagtgggctgggattgtggagactgcccaggggcttggctttgtcagaacttgtacaatcttcttttgatgaaattatctgaactcaacatctagcacatagaatgtgttcaacaaatgcttgttgaatgaataaattatgactgcagactggctctcctgccttaaactaatttcatcccagcctagtctcctgatgtctgtgctcgttatgctatgccatgttgcttcagtcaaacaagaaacacttactgagggcatattgtttgcccatcattgtgcaatatgctgtgggacatgggatgtcgtctcagtcttcaaggaaatggaagggttaagaaatgcatatgagattattaccaatgacacctttaatttatatgatgctttaaaattatcagagcactttcatgtatttttcgtgtgactagtgaaaaagacaatgttgtacaaaattaaaatatatacagatgcaataatgtgaatagttaggatttattaaatgcattatcttcagatcttta

SEQ ID NO: 23853 - DNA, 415 bp, Homo sapiens
tgacaatgcaggagagagagaggagaattattaaagcactgttctgcaataggcaagggtgagtgagtgggtctgggctagtggacatgttggccatggagaggggcccagaggctctgcctacaataatagatgggatggcagagcataagctggtaagaagggacatgggacttctctatttatttcatgtcatactgtccaagactgtacagtactgtagtggccttcattataaggccccagaccttcatgttttgtgtgcccttttatgacctatgtatagctcttcttcctttgctgtcatttctgtctcagtttgcctgactctacagccttcctccccaccccatttctaacttgcttctatttatgccatagattcaaacatccacaactaaggccattaaattac

SEQ ID NO: 23854 - DNA, 351 bp, Homo sapiens
ttaaaaaaaggtgtgagaaggagtcttaaaattaatgtcattaatcaagacagagcatgttcaaaagactgctttggtttcagagtcctggtgatatggtttgaaagtgtccccacccaaatttcgtcttgaattgtatttctcataatccccacgagtcatgggaggggcccactgggaggtaattgaatcatgggggcggttaccctcatgctattcttgtgatagttagtgggttctcacgagatctgatggttttataagggactttccccgctttgcttggcactcattctctcttttgccactctgtgaagaggtgccttctgccatgattgtgttcctgaggcc

SEQ ID NO: 23855 - DNA, 303 bp, Homo sapiens
gtccctgtctcatgacatagcaccattttgcagaaacattccttcagtaatctgttttattgtatttatcaatagtcatattaagtttcttggggaaaaacaagacaatagctatttttttggtagtatagaattttttactttcaatggtaaaaaaaaaaaaaaatccaactttaatgttaacaaattcaaagttactttgtaaaaagaatacgatgaccataatgtcaaaaagaccagtcaggcccagtgcggtggctcatgcctgtaatcccagcactgtgggaggccaaggcgggcgga

SEQ ID NO: 23856 - DNA, 455 bp, Homo sapiens
gccagacactcccataactcttcttgagctatcagtgtgatgaggctgctgcattctgcacagatgtggtgcacttgctctgagacatttgagtcccaaagcttagcctgagctttgcaactatggttgttgctgctgccaagatgatgcacgccagcaaagccaactaatcacattgacttgatcattataccaggagcacacttgactgtgagtgctccctggtccctcctctaccaccaaattatgaagaaaaaagggagagaaggaaaagctgagattttccaaatgagctatctgattaaaggattaaacaatgatttcatttaatttagagttaatgtgatcttaataggcttagagttctaaacctaacctgaccttggtgtttaaacaccctgtgccaagtggcaactacttcctttaaagggaaaaaaaaacctgaagaaaactaa

SEQ ID NO: 23857 - DNA, 540 bp, Homo sapiens
ggaaatcaaagacattttaaagtgattataaatctttgtacatgttgacaatattcaattcagttaaaggctttatcacggtacattgtgacctctctttaaatggttacattactttgagctctgaaaatttgttatacttacattgttctaattgttcataactaggaattcactgactttgctttaatgtatgctaggaaaactgaagtagataaatcatacttcccctttcagtctccttctctcttttggatttaattttaactcgaggtttattaattacagaagttacactcatgttgctgcaaatgtattttttctagttgttaatttgttcatgacattctgcttgatgatagtaatattatgatgaaggtgcctcagatatcaaaaaagatttcaagtctatagaacgtacctctagctacagagtcacaggatatgtgacagcaatgatattaggggatgctgagctggaaacccaattcagcaccagagacagaaatactgtattttgactcattcatcttacatgga

SEQ ID NO: 23858 - DNA, 413 bp, Homo sapiens
taattaaaacagtatggtactggtataaagacacatagattaatggaacagaatagagagttcacaaataaatccacacatgatacggtcaactgatgtttgacaagagtgccaagaatacgcaaagtggaaaggatagtctcttcaacaaatagtgttagcaaaactggatatccccatacaaaagaataaaattgggccccaatcttacatcatacacaaaaaatcaattcaaaatggattaaaaacttgaacataagaactgaaactgtaaaactttcagaagaaaacataggggaaagcttcatcacattagtcttggtaatgatttcatggatatgaaaatcacaggccacaaaagcaaaaatggacatgtgggattacaaaaccataaaagcttttgtacagccaaa

SEQ ID NO: 23859 - DNA, 494 bp, Homo sapiens
tatacggcaacatgacagagtaacttgatttctatgaaatgtagtaataaaaataggggcttgtatttgcttgacattggctttctttttaatttcattgtttatgatttatttttcatacacttaaaaaacatcatggtgcacaatggatttgagaaaaactggccctttacacgatgatttgagagcttggtatatgtggcatcaaaaatcccaggaaacaagtgaagaattaaaatagaagtctgcatgttttacctatccagcaaaaggtggaagtggaaaaagtccagagttccaactggatgggtcagttctctgccagatgttggtgtcctgtagacccggccagaggacatgctttgatactctgcccttggagatgcactcagtattgtcagaggaatacaggtccaaagtgaagaactatctgactgcaggggctgatggctcttctgggctggtgggatctacgtggagattgctgtgctcta

SEQ ID NO: 23860 - DNA, 176 bp, Homo sapiens
tgtgagtggggattactggggcgccagtcatgccttatttcttgagccacatgttgtgttggttacacgggtgttttccatttggggaagtttgttagctgcacacttagaatgtgtagacttcttcctatgtatgttattcttcaattttaaaaatgcattaaaaaataagtaaa

SEQ ID NO: 23861 - DNA, 3164 bp, Homo sapiens
aaaccggaacggggcccaacttctggggcctggagaagggaaacgaagtcccccccggtttcccgaggttgcctttcctcgggcatccctggggctgccgcgggacctcgcagggcggatataaagaaccgcggccttgggaagaggcggagaccggcttttaaagaaagaagtcctgggtcctgcggtctgcgggcgaggcaagggcgcttttctgcccacgctccccgtggcccatcgatcccccgcgcgtccgccgctgttctaaggagagaagtgggggccccccaggctcgcgcgtggagcgaagcagcatgggcagtcggtgcgcgctggccctggcggtgctctcggccttgctgtgtcaggtctggagctctggggtgttcgaactgaagctgcaggagttcgtcaacaagaaggggctgctggggaaccgcaactgctgccgcgggggcgcggggccaccgccgtgcgcctgccggaccttcttccgcgtgtgcctcaagcactaccaggccagcgtgtcccccgagccgccctgcacctacggcagcgccgtcacccccgtgctgggcgtcgactccttcagtctgcccgacggcgggggcgccgactccgcgttcagcaaccccatccgcttccccttcggcttcacctggccgggcaccttctctctgattattgaagctctccacacagattctcctgatgacctcgcaacagaaaacccagaaagactcatcagccgcctggccacccagaggcacctgacggtgggcgaggagtggtcccaggacctgcacagcagcggccgcacggacctcaagtactcctaccgcttcgtgtgtgacgaacactactacggagagggctgctccgttttctgccgtccccgggacgatgccttcggccacttcacctgtggggagcgtggggagaaagtgtgcaaccctggctggaaagggccctactgcacagagccgatctgcctgcctggatgtgatgagcagcatggattttgtgacaaaccaggggaatgcaagtgcagagtgggctggcagggccggtactgtgacgagtgtatccgctatccaggctgtctccatggcacctgccagcagccctggcagtgcaactgccaggaaggctgggggggccttttctgcaaccaggacctgaactactgcacacaccataagccctgcaagaatggagccacctgcaccaacacgggccaggggagctacacttgctcttgccggcctgggtacacaggtgccacctgcgagctggggattgacgagtgtgaccccagcccttgtaagaacggagggagctgcacggatctcgagaacagctactcctgtacctgcccacccggcttctacggcaaaatctgtgaattgagtgccatgacctgtgcggacggcccttgctttaacgggggtcggtgctcagacagccccgatggagggtacagctgccgctgccccgtgggctactccggcttcaactgtgagaagaaaattgactactgcagctcttcaccctgttctaatggtgccaagtgtgtggacctcggtgatgcctacctgtgccgctgccaggccggcttctcggggaggcactgtgacgacaacgtggacgactgcgcctcctccccgtgcgccaacgggggcacctgccgggatggcgtgaacgacttctcctgcacctgcccgcctggctacacgggcaggaactgcagtgcccccgtcagcaggtgcgagcacgcaccctgccacaatggggccacctgccacgagaggggccaccgctatgtgtgcgagtgtgcccgaggctacgggggtcccaactgccagttcctgctccccgagctgcccccgggcccagcggtggtggacctcactgagaagctagagggccagggcgggccattcccctgggtggccgtgtgcgccggggtcatccttgtcctcatgctgctgctgggctgtgccgctgtggtggtctgcgtccggctgaggctgcagaagcaccggcccccagccgacccctgccggggggagacggagaccatgaacaacctggccaactgccagcgtgagaaggacatctcagtcagcatcatcggggccacgcagatcaagaacaccaacaagaaggcggacttccacggggaccacagcgccgacaagaatggcttcaaggcccgctacccagcggtggactataacctcgtgcaggacctcaagggtgacgacaccgccgtcagggacgcgcacagcaagcgtgacaccaagtgccagccccagggctcctcaggggaggagaaggggaccccgaccacactcaggggtggagaagcatctgaaagaaaaaggccggactcgggctgttcaacttcaaaagacaccaagtaccagtcggtgtacgtcatatccgaggagaaggatgagtgcgtcatagcaactgaggtgtaaaatggaagtgagatggcaagactcccgtttctcttaaaataagtaaaattccaaggatatatgccccaacgaatgctgctgaagaggagggaggcctcgtggactgctgctgagaaaccgagttcagaccgagcaggttctcctcctgaggtcctcgacgcctgccgacagcctgtcgcggcccggccgcctgcggcactgccttccgtgacgtcgccgttgcactatggacagttgctcttaagagaatatatatttaaatgggtgaactgaattacgcataagaagcatgcactgcctgagtgtatattttggattcttatgagccagtcttttcttgaattagaaacacaaacactgcctttattgtcctttttgatacgaagatgtgctttttctagatggaaaagatgtgtgttattttttggatttgtaaaaatatttttcatgatatctgtaaagcttgagtattttgtgatgttcgttttttataatttaaattttggtaaatatgtacaaaggcacttcgggtctatgtgactatatttttttgtatataaatgtatttatggaatattgtgcaaatgttatttgagttttttactgttttgttaatgaagaaattcctttttaaaatatttttccaaaataaattttatgaatgacaaacagaaggcg

SEQ ID NO: 23862 - DNA, 3644 bp, Homo sapiens
agccagatcctctgcgcgcacccgcggagacccgacccggccgagggcagagcgcaggggaacccgggcagccgcggcgcagagcctcctcccacggcccggcccctccggtcctgcgcgtgtgtactggatggcattggctggattcatcggaaagacgcggatctttgctgtgacaccggagatcggagcccggagtgctcccggaacgaccgccgccgccgagtgacaccgggccgcgatccgcaggggccgccgcgcacacccgccgccgccgaccgtcccctcagcgcgcgccgctggccccggattatcgccttgcccgtgggatttccagaccgcggctttctaatcggctcgggaggaagctctgcagctctcttgggaattaagctcaatctctggactctctctctttctctttctccccctccctctcctgcgaagaagctcaagacaaaaccaggaagccggcgaccctcacctcctcgggggctgggaggaaggaggaaaacgaaagtcgccgccgccgcgctgtcccccgagagctgcctttcctcgggcatccctggggctgccgcgggacctcgcagggcggatataaagaaccgcggccttgggaagaggcggagaccggcttttaaagaaagaagtcctgggtcctgcggtctgcgggcgaggcaagggcgcttttctgcccacgctccccgtggcccatcgatcccccgcgcgtccgccgctgttctaaggagagaagtgggggccccccaggctcgcgcgtggagcgaagcagcatgggcagtcggtgcgcgctggccctggcggtgctctcggccttgctgtgtcaggtctggagctctggggtgttcgaactgaagctgcaggagttcgtcaacaagaaggggctgctggggaaccgcaactgctgccgcgggggcgcggggccaccgccgtgcgcctgccggaccttcttccgcgtgtgcctcaagcactaccaggccagcgtgtcccccgagccgccctgcacctacggcagcgccgtcacccccgtgctgggcgtcgactccttcagtctgcccgacggcgggggcgccgactccgcgttcagcaaccccatccgcttccccttcggcttcacctggccgggcaccttctctctgattattgaagctctccacacagattctcctgatgacctcgcaacagaaaacccagaaagactcatcagccgcctggccacccagaggcacctgacggtgggcgaggagtggtcccaggacctgcacagcagcggccgcacggacctcaagtactcctaccgcttcgtgtgtgacgaacactactacggagagggctgctccgttttctgccgtccccgggacgatgccttcggccacttcacctgtggggagcgtggggagaaagtgtgcaaccctggctggaaagggccctactgcacagagccgatctgcctgcctggatgtgatgagcagcatggattttgtgacaaaccaggggaatgcaagtgcagagtgggctggcagggccggtactgtgacgagtgtatccgctatccaggctgtctccatggcacctgccagcagccctggcagtgcaactgccaggaaggctgggggggccttttctgcaaccaggacctgaactactgcacacaccataagccctgcaagaatggagccacctgcaccaacacgggccaggggagctacacttgctcttgccggcctgggtacacaggtgccacctgcgagctggggattgacgagtgtgaccccagcccttgtaagaacggagggagctgcacggatctcgagaacagctactcctgtacctgcccacccggcttctacggcaaaatctgtgaattgagtgccatgacctgtgcggacggcccttgctttaacgggggtcggtgctcagacagccccgatggagggtacagctgccgctgccccgtgggctactccggcttcaactgtgagaagaaaattgactactgcagctcttcaccctgttctaatggtgccaagtgtgtggacctcggtgatgcctacctgtgccgctgccaggccggcttctcggggaggcactgtgacgacaacgtggacgactgcgcctcctccccgtgcgccaacgggggcacctgccgggatggcgtgaacgacttctcctgcacctgcccgcctggctacacgggcaggaactgcagtgcccccgtcagcaggtgcgagcacgcaccctgccacaatggggccacctgccacgagaggggccaccgctatgtgtgcgagtgtgcccgaggctacgggggtcccaactgccagttcctgctccccgagctgcccccgggcccagcggtggtggacctcactgagaagctagagggccagggcgggccattcccctgggtggccgtgtgcgccggggtcatccttgtcctcatgctgctgctgggctgtgccgctgtggtggtctgcgtccggctgaggctgcagaagcaccggcccccagccgacccctgccggggggagacggagaccatgaacaacctggccaactgccagcgtgagaaggacatctcagtcagcatcatcggggccacgcagatcaagaacaccaacaagaaggcggacttccacggggaccacagcgccgacaagaatggcttcaaggcccgctacccagcggtggactataacctcgtgcaggacctcaagggtgacgacaccgccgtcagggacgcgcacagcaagcgtgacaccaagtgccagccccagggctcctcaggggaggagaaggggaccccgaccacactcaggggtggagaagcatctgaaagaaaaaggccggactcgggctgttcaacttcaaaagacaccaagtaccagtcggtgtacgtcatatccgaggagaaggatgagtgcgtcatagcaactgaggtgtaaaatggaagtgagatggcaagactcccgtttctcttaaaataagtaaaattccaaggatatatgccccaacgaatgctgctgaagaggagggaggcctcgtggactgctgctgagaaaccgagttcagaccgagcaggttctcctcctgaggtcctcgacgcctgccgacagcctgtcgcggcccggccgcctgcggcactgccttccgtgacgtcgccgttgcactatggacagttgctcttaagagaatatatatttaaatgggtgaactgaattacgcataagaagcatgcactgcctgagtgtatattttggattcttatgagccagtcttttcttgaattagaaacacaaacactgcctttattgtcctttttgatacgaagatgtgctttttctagatggaaaagatgtgtgttattttttggatttgtaaaaatatttttcatgatatctgtaaagcttgagtattttgtgatgttcgttttttataatttaaattttggtaaatatgtacaaaggcacttcgggtctatgtgactatatttttttgtatataaatgtatttatggaatattgtgcaaatgttatttgagttttttactgttttgttaatgaagaaattcctttttaaaatatttttccaaaataaattttatgaatgacaaacagaaggcg

SEQ ID NO: 23863 - DNA, 3795 bp, Homo sapiens
agccagatcctctgcgcgcacccgcggagacccgacccggccgagggcagagcgcaggggaacccgggcagccgcggcgcagagcctcctcccacggcccggcccctccggtcctgcgcgtgtgtactggatggcattggctggattcatcggaaagacgcggatctttgctgtgacaccggagatcggagcccggagtgctcccggaacgaccgccgccgccgagtgacaccgggccgcgatccgcaggggccgccgcgcacacccgccgccgccgaccgtcccctcagcgcgcgccgctggccccggattatcgccttgcccgtgggatttccagaccgcggctttctaatcggctcgggaggaagctctgcagctctcttgggaattaagctcaatctctggactctctctctttctctttctccccctccctctcctgcgaagaagctcaagacaaaaccaggaagccggcgaccctcacctcctcgggggctgggaggaaggaggaaaacgaaagtcgccgccgccgcgctgtcccccgagagctgcctttcctcgggcatccctggggctgccgcgggacctcgcagggcggatataaagaaccgcggccttgggaagaggcggagaccggcttttaaagaaagaagtcctgggtcctgcggtctgcgggcgaggcaagggcgcttttctgcccacgctccccgtggcccatcgatcccccgcgcgtccgccgctgttctaaggagagaagtgggggccccccaggctcgcgcgtggagcgaagcagcatgggcagtcggtgcgcgctggccctggcggtgctctcggccttgctgtgtcaggtctggagctctggggtgttcgaactgaagctgcaggagttcgtcaacaagaaggggctgctggggaaccgcaactgctgccgcgggggcgcggggccaccgccgtgcgcctgccggaccttcttccgcgtgtgcctcaagcactaccaggccagcgtgtcccccgagccgccctgcacctacggcagcgccgtcacccccgtgctgggcgtcgactccttcagtctgcccgacggcgggggcgccgactccgcgttcagcaaccccatccgcttccccttcggcttcacctggccgggcaccttctctctgattattgaagctctccacacagattctcctgatgacctcgcaacagaaaacccagaaagactcatcagccgcctggccacccagaggcacctgacggtgggcgaggagtggtcccaggacctgcacagcagcggccgcacggacctcaagtactcctaccgcttcgtgtgtgacgaacactactacggagagggctgctccgttttctgccgtccccgggacgatgccttcggccacttcacctgtggggagcgtggggagaaagtgtgcaaccctggctggaaagggccctactgcacagagccgatctgcctgcctggatgtgatgagcagcatggattttgtgacaaaccaggggaatgcaagtgcagagtgggctggcagggccggtactgtgacgagtgtatccgctatccaggctgtctccatggcacctgccagcagccctggcagtgcaactgccaggaaggctgggggggccttttctgcaaccaggaccagggtaagccttctctccctgaggcagcctgctccctccagagcagccctggacttccctggctgtttgatcactggaaaaataaagtcttcctgcatttgatgtcgagcttcctatctcctacttttcctgtccccacccttcacagacctgaactactgcacacaccataagccctgcaagaatggagccacctgcaccaacacgggccaggggagctacacttgctcttgccggcctgggtacacaggtgccacctgcgagctggggattgacgagtgtgaccccagcccttgtaagaacggagggagctgcacggatctcgagaacagctactcctgtacctgcccacccggcttctacggcaaaatctgtgaattgagtgccatgacctgtgcggacggcccttgctttaacgggggtcggtgctcagacagccccgatggagggtacagctgccgctgccccgtgggctactccggcttcaactgtgagaagaaaattgactactgcagctcttcaccctgttctaatggtgccaagtgtgtggacctcggtgatgcctacctgtgccgctgccaggccggcttctcggggaggcactgtgacgacaacgtggacgactgcgcctcctccccgtgcgccaacgggggcacctgccgggatggcgtgaacgacttctcctgcacctgcccgcctggctacacgggcaggaactgcagtgcccccgtcagcaggtgcgagcacgcaccctgccacaatggggccacctgccacgagaggggccaccgctatgtgtgcgagtgtgcccgaggctacgggggtcccaactgccagttcctgctccccgagctgcccccgggcccagcggtggtggacctcactgagaagctagagggccagggcgggccattcccctgggtggccgtgtgcgccggggtcatccttgtcctcatgctgctgctgggctgtgccgctgtggtggtctgcgtccggctgaggctgcagaagcaccggcccccagccgacccctgccggggggagacggagaccatgaacaacctggccaactgccagcgtgagaaggacatctcagtcagcatcatcggggccacgcagatcaagaacaccaacaagaaggcggacttccacggggaccacagcgccgacaagaatggcttcaaggcccgctacccagcggtggactataacctcgtgcaggacctcaagggtgacgacaccgccgtcagggacgcgcacagcaagcgtgacaccaagtgccagccccagggctcctcaggggaggagaaggggaccccgaccacactcaggggtggagaagcatctgaaagaaaaaggccggactcgggctgttcaacttcaaaagacaccaagtaccagtcggtgtacgtcatatccgaggagaaggatgagtgcgtcatagcaactgaggtgtaaaatggaagtgagatggcaagactcccgtttctcttaaaataagtaaaattccaaggatatatgccccaacgaatgctgctgaagaggagggaggcctcgtggactgctgctgagaaaccgagttcagaccgagcaggttctcctcctgaggtcctcgacgcctgccgacagcctgtcgcggcccggccgcctgcggcactgccttccgtgacgtcgccgttgcactatggacagttgctcttaagagaatatatatttaaatgggtgaactgaattacgcataagaagcatgcactgcctgagtgtatattttggattcttatgagccagtcttttcttgaattagaaacacaaacactgcctttattgtcctttttgatacgaagatgtgctttttctagatggaaaagatgtgtgttattttttggatttgtaaaaatatttttcatgatatctgtaaagcttgagtattttgtgatgttcgttttttataatttaaattttggtaaatatgtacaaaggcacttcgggtctatgtgactatatttttttgtatataaatgtatttatggaatattgtgcaaatgttatttgagttttttactgttttgttaatgaagaaattcctttttaaaatatttttccaaaataaattttatgaatgacaaacagaaggcg

SEQ ID NO: 23864 - DNA, 1750 bp, Homo sapiens
agccagatcctctgcgcgcacccgcggagacccgacccggccgagggcagagcgcaggggaacccgggcagccgcggcgcagagcctcctcccacggcccggcccctccggtcctgcgcgtgtgtactggatggcattggctggattcatcggaaagacgcggatctttgctgtgacaccggagatcggagcccggagtgctcccggaacgaccgccgccgccgagtgacaccgggccgcgatccgcaggggccgccgcgcacacccgccgccgccgaccgtcccctcagcgcgcgccgctggccccggattatcgccttgcccgtgggatttccagaccgcggctttctaatcggctcgggaggaagctctgcagctctcttgggaattaagctcaatctctggactctctctctttctctttctccccctccctctcctgcgaagaagctcaagacaaaaccaggaagccggcgaccctcacctcctcgggggctgggaggaaggaggaaaacgaaagtcgccgccgccgcgctgtcccccgagagctgcctttcctcgggcatccctggggctgccgcgggacctcgcagggcggatataaagaaccgcggccttgggaagaggcggagaccggcttttaaagaaagaagtcctgggtcctgcggtctgcgggcgaggcaagggcgcttttctgcccacgctccccgtggcccatcgatcccccgcgcgtccgccgctgttctaaggagagaagtgggggccccccaggctcgcgcgtggagcgaagcagcatgggcagtcggtgcgcgctggccctggcggtgctctcggccttgctgtgtcaggtctggagctctggggtgttcgaactgaagctgcaggagttcgtcaacaagaaggggctgctggggaaccgcaactgctgccgcgggggcgcggggccaccgccgtgcgcctgccggaccttcttccgcgtgtgcctcaagcactaccaggccagcgtgtcccccgagccgccctgcacctacggcagcgccgtcacccccgtgctgggcgtcgactccttcagtctgcccgacggcgggggcgccgactccgcgttcagcaaccccatccgcttccccttcggcttcacctggccgggcaccttctctctgattattgaagctctccacacagattctcctgatgacctcgcaacagaaaacccagaaagactcatcagccgcctggccacccagaggcacctgacggtgggcgaggagtggtcccaggacctgcacagcagcggccgcacggacctcaagtactcctaccgcttcgtgtgtgacgaacactactacggagagggctgctccgttttctgccgtccccgggacgatgccttcggccacttcacctgtggggagcgtggggagaaagtgtgcaaccctggctggaaagggccctactgcacagagcgtgagtctctgggaaggcaccgctggctcactcgtccacgaacacggaccacgcgcagggacggggcttcctgagccacggggggcttgggactgtagagatgttctggtggggaaactgaggcccagaggacagaagtggattgctataagtcacagctcgtcagtgggggggttgggtcaacgcagacattttaacatcccaggctgtgtttatccactatcggaactgcctttcttaatcagggaggattttagagacagggccaggggtcaggaagtaaagc

SEQ ID NO: 23865 - DNA, 3172 bp, Homo sapiens
gaattccattttaagttatacaaaactgattaccataagtgcggtcgactgcttttatttttacgttgtgtgtgttggaaaaatgctaaaacatcagtctacaattctatatattgttattaaagattaatccaaccagcaacccaaggacatataagcgatttccactattgcatcagagcactcggcaggaaaggcctagccacggggaacattagaagctacagaagcattgcagagaagagaagatcccccgcgcgtccgccgctgttctaaggagagaagtgggggccccccaggctcgcgcgtggagcgaagcagcatgggcagtcggtgcgcgctggccctggcggtgctctcggccttgctgtgtcaggtctggagctctggggtgttcgaactgaagctgcaggagttcgtcaacaagaaggggctgctggggaaccgcaactgctgccgcgggggcgcggggccaccgccgtgcgcctgccggaccttcttccgcgtgtgcctcaagcactaccaggccagcgtgtcccccgagccgccctgcacctacggcagcgccgtcacccccgtgctgggcgtcgactccttcagtctgcccgacggcgggggcgccgactccgcgttcagcaaccccatccgcttccccttcggcttcacctggccgggcaccttctctctgattattgaagctctccacacagattctcctgatgacctcgcaacagaaaacccagaaagactcatcagccgcctggccacccagaggcacctgacggtgggcgaggagtggtcccaggacctgcacagcagcggccgcacggacctcaagtactcctaccgcttcgtgtgtgacgaacactactacggagagggctgctccgttttctgccgtccccgggacgatgccttcggccacttcacctgtggggagcgtggggagaaagtgtgcaaccctggctggaaagggccctactgcacagagccgatctgcctgcctggatgtgatgagcagcatggattttgtgacaaaccaggggaatgcaagtgcagagtgggctggcagggccggtactgtgacgagtgtatccgctatccaggctgtctccatggcacctgccagcagccctggcagtgcaactgccaggaaggctgggggggccttttctgcaaccaggacctgaactactgcacacaccataagccctgcaagaatggagccacctgcaccaacacgggccaggggagctacacttgctcttgccggcctgggtacacaggtgccacctgcgagctggggattgacgagtgtgaccccagcccttgtaagaacggagggagctgcacggatctcgagaacagctactcctgtacctgcccacccggcttctacggcaaaatctgtgaattgagtgccatgacctgtgcggacggcccttgctttaacgggggtcggtgctcagacagccccgatggagggtacagctgccgctgccccgtgggctactccggcttcaactgtgagaagaaaattgactactgcagctcttcaccctgttctaatggtgccaagtgtgtggacctcggtgatgcctacctgtgccgctgccaggccggcttctcggggaggcactgtgacgacaacgtggacgactgcgcctcctccccgtgcgccaacgggggcacctgccgggatggcgtgaacgacttctcctgcacctgcccgcctggctacacgggcaggaactgcagtgcccccgtcagcaggtgcgagcacgcaccctgccacaatggggccacctgccacgagaggggccaccgctatgtgtgcgagtgtgcccgaggctacgggggtcccaactgccagttcctgctccccgagctgcccccgggcccagcggtggtggacctcactgagaagctagagggccagggcgggccattcccctgggtggccgtgtgcgccggggtcatccttgtcctcatgctgctgctgggctgtgccgctgtggtggtctgcgtccggctgaggctgcagaagcaccggcccccagccgacccctgccggggggagacggagaccatgaacaacctggccaactgccagcgtgagaaggacatctcagtcagcatcatcggggccacgcagatcaagaacaccaacaagaaggcggacttccacggggaccacagcgccgacaagaatggcttcaaggcccgctacccagcggtggactataacctcgtgcaggacctcaagggtgacgacaccgccgtcagggacgcgcacagcaagcgtgacaccaagtgccagccccagggctcctcaggggaggagaaggggaccccgaccacactcaggggtggagaagcatctgaaagaaaaaggccggactcgggctgttcaacttcaaaagacaccaagtaccagtcggtgtacgtcatatccgaggagaaggatgagtgcgtcatagcaactgaggtgtaaaatggaagtgagatggcaagactcccgtttctcttaaaataagtaaaattccaaggatatatgccccaacgaatgctgctgaagaggagggaggcctcgtggactgctgctgagaaaccgagttcagaccgagcaggttctcctcctgaggtcctcgacgcctgccgacagcctgtcgcggcccggccgcctgcggcactgccttccgtgacgtcgccgttgcactatggacagttgctcttaagagaatatatatttaaatgggtgaactgaattacgcataagaagcatgcactgcctgagtgtatattttggattcttatgagccagtcttttcttgaattagaaacacaaacactgcctttattgtcctttttgatacgaagatgtgctttttctagatggaaaagatgtgtgttattttttggatttgtaaaaatatttttcatgatatctgtaaagcttgagtattttgtgatgttcgttttttataatttaaattttggtaaatatgtacaaaggcacttcgggtctatgtgactatatttttttgtatataaatgtatttatggaatattgtgcaaatgttatttgagttttttactgttttgttaatgaagaaattcctttttaaaatatttttccaaaataaattttatgaatgacaaacagaaggcg

SEQ ID NO: 23866 - DNA, 3762 bp, Homo sapiens
agccagatcctctgcgcgcacccgcggagacccgacccggccgagggcagagcgcaggggaacccgggcagccgcggcgcagagcctcctcccacggcccggcccctccggtcctgcgcgtgtgtactggatggcattggctggattcatcggaaagacgcggatctttgctgtgacaccggagatcggagcccggagtgctcccggaacgaccgccgccgccgagtgacaccgggccgcgatccgcaggggccgccgcgcacacccgccgccgccgaccgtcccctcagcgcgcgccgctggccccggattatcgccttgcccgtgggatttccagaccgcggctttctaatcggctcgggaggaagctctgcagctctcttgggaattaagctcaatctctggactctctctctttctctttctccccctccctctcctgcgaagaagctcaagacaaaaccaggaagccggcgaccctcacctcctcgggggctgggaggaaggaggaaaacgaaagtcgccgccgccgcgctgtcccccgagagctgcctttcctcgggcatccctggggctgccgcgggacctcgcagggcggatataaagaaccgcggccttgggaagaggcggagaccggcttttaaagaaagaagtcctgggtcctgcggtctgcgggcgaggcaagggcgcttttctgcccacgctccccgtggcccatcgatcccccgcgcgtccgccgctgttctaaggagagaagtgggggccccccaggctcgcgcgtggagcgaagcagcatgggcagtcggtgcgcgctggccctggcggtgctctcggccttgctgtgtcaggtctggagctctggggtgttcgaactgaagctgcaggagttcgtcaacaagaaggggctgctggggaaccgcaactgctgccgcgggggcgcggggccaccgccgtgcgcctgccggaccttcttccgcgtgtgcctcaagcactaccaggccagcgtgtcccccgagccgccctgcacctacggcagcgccgtcacccccgtgctgggcgtcgactccttcagtctgcccgacggcgggggcgccgactccgcgttcagcaaccccatccgcttccccttcggcttcacctggccgggcaccttctctctgattattgaagctctccacacagattctcctgatgacctcgcaacagaaaacccagaaagactcatcagccgcctggccacccagaggcacctgacggtgggcgaggagtggtcccaggacctgcacagcagcggccgcacggacctcaagtactcctaccgcttcgtgtgtgacgaacactactacggagagggctgctccgttttctgccgtccccgggacgatgccttcggccacttcacctgtggggagcgtggggagaaagtgtgcaaccctggctggaaagggccctactgcacagagccgatctgcctgcctggatgtgatgagcagcatggattttgtgacaaaccaggggaatgcaagtgcagagtgggctggcagggccggtactgtgacgagtgtatccgctatccaggctgtctccatggcacctgccagcagccctggcagtgcaactgccaggaaggctgggggggccttttctgcaaccaggacctgaactactgcacacaccataagccctgcaagaatggagccacctgcaccaacacgggccaggggagctacacttgctcttgccggcctgggtacacaggtgccacctgcgagctggggattgacgagtgtgaccccagcccttgtaagaacggagggagctgcacggtgagtcggaggctccatggcatctcacccggaagctggggtgccctggtgttgaatggagtgtgtgggctccttggagcaactttggaaagccttttctgacctctccatcgtgtaggatctcgagaacagctactcctgtacctgcccacccggcttctacggcaaaatctgtgaattgagtgccatgacctgtgcggacggcccttgctttaacgggggtcggtgctcagacagccccgatggagggtacagctgccgctgccccgtgggctactccggcttcaactgtgagaagaaaattgactactgcagctcttcaccctgttctaatggtgccaagtgtgtggacctcggtgatgcctacctgtgccgctgccaggccggcttctcggggaggcactgtgacgacaacgtggacgactgcgcctcctccccgtgcgccaacgggggcacctgccgggatggcgtgaacgacttctcctgcacctgcccgcctggctacacgggcaggaactgcagtgcccccgtcagcaggtgcgagcacgcaccctgccacaatggggccacctgccacgagaggggccaccgctatgtgtgcgagtgtgcccgaggctacgggggtcccaactgccagttcctgctccccgagctgcccccgggcccagcggtggtggacctcactgagaagctagagggccagggcgggccattcccctgggtggccgtgtgcgccggggtcatccttgtcctcatgctgctgctgggctgtgccgctgtggtggtctgcgtccggctgaggctgcagaagcaccggcccccagccgacccctgccggggggagacggagaccatgaacaacctggccaactgccagcgtgagaaggacatctcagtcagcatcatcggggccacgcagatcaagaacaccaacaagaaggcggacttccacggggaccacagcgccgacaagaatggcttcaaggcccgctacccagcggtggactataacctcgtgcaggacctcaagggtgacgacaccgccgtcagggacgcgcacagcaagcgtgacaccaagtgccagccccagggctcctcaggggaggagaaggggaccccgaccacactcaggggtggagaagcatctgaaagaaaaaggccggactcgggctgttcaacttcaaaagacaccaagtaccagtcggtgtacgtcatatccgaggagaaggatgagtgcgtcatagcaactgaggtgtaaaatggaagtgagatggcaagactcccgtttctcttaaaataagtaaaattccaaggatatatgccccaacgaatgctgctgaagaggagggaggcctcgtggactgctgctgagaaaccgagttcagaccgagcaggttctcctcctgaggtcctcgacgcctgccgacagcctgtcgcggcccggccgcctgcggcactgccttccgtgacgtcgccgttgcactatggacagttgctcttaagagaatatatatttaaatgggtgaactgaattacgcataagaagcatgcactgcctgagtgtatattttggattcttatgagccagtcttttcttgaattagaaacacaaacactgcctttattgtcctttttgatacgaagatgtgctttttctagatggaaaagatgtgtgttattttttggatttgtaaaaatatttttcatgatatctgtaaagcttgagtattttgtgatgttcgttttttataatttaaattttggtaaatatgtacaaaggcacttcgggtctatgtgactatatttttttgtatataaatgtatttatggaatattgtgcaaatgttatttgagttttttactgttttgttaatgaagaaattcctttttaaaatatttttccaaaataaattttatgaatgacaaacagaaggcg

SEQ ID NO: 23867 - DNA, 2586 bp, Homo sapiens
aacggctatgagaatttacagatagtagtttaaaaagagttggcacaggaaatgatagtatagttcaatggttctcaaatgttgcctcatcctagaatcactcagggagtgatttttgagatgctgacactggtgctgccctaacacccaagaagccagaacctctggtggggcccaggcccaggctgcagctcccaaggtgacccagtgttctgctaatctggagaaccagaggctcactggtgctgcgggaagatggtttctagggtgagaatgtccactgcaaagccagcaacagtcaacgtccatctgagtcttctgcttttctcaccagggtaagccttctctccctgaggcagcctgctccctccagagcagccctggacttccctggctgtttgatcactggaaaaataaagtcttcctgcatttgatgtcgagcttcctatctcctacttttcctgtccccacccttcacagacctgaactactgcacacaccataagccctgcaagaatggagccacctgcaccaacacgggccaggggagctacacttgctcttgccggcctgggtacacaggtgccacctgcgagctggggattgacgagtgtgaccccagcccttgtaagaacggagggagctgcacggtgagtcggaggctccatggcatctcacccggaagctggggtgccctggtgttgaatggagtgtgtgggctccttggagcaactttggaaagccttttctgacctctccatcgtgtaggatctcgagaacagctactcctgtacctgcccacccggcttctacggcaaaatctgtgaattgagtgccatgacctgtgcggacggcccttgctttaacgggggtcggtgctcagacagccccgatggagggtacagctgccgctgccccgtgggctactccggcttcaactgtgagaagaaaattgactactgcagctcttcaccctgttctaatggtgccaagtgtgtggacctcggtgatgcctacctgtgccgctgccaggccggcttctcggggaggcactgtgacgacaacgtggacgactgcgcctcctccccgtgcgccaacgggggcacctgccgggatggcgtgaacgacttctcctgcacctgcccgcctggctacacgggcaggaactgcagtgcccccgtcagcaggtgcgagcacgcaccctgccacaatggggccacctgccacgagaggggccaccgctatgtgtgcgagtgtgcccgaggctacgggggtcccaactgccagttcctgctccccgagctgcccccgggcccagcggtggtggacctcactgagaagctagagggccagggcgggccattcccctgggtggccgtgtgcgccggggtcatccttgtcctcatgctgctgctgggctgtgccgctgtggtggtctgcgtccggctgaggctgcagaagcaccggcccccagccgacccctgccggggggagacggagaccatgaacaacctggccaactgccagcgtgagaaggacatctcagtcagcatcatcggggccacgcagatcaagaacaccaacaagaaggcggacttccacggggaccacagcgccgacaagaatggcttcaaggcccgctacccagcggtggactataacctcgtgcaggacctcaagggtgacgacaccgccgtcagggacgcgcacagcaagcgtgacaccaagtgccagccccagggctcctcaggggaggagaaggggaccccgaccacactcaggggtggagaagcatctgaaagaaaaaggccggactcgggctgttcaacttcaaaagacaccaagtaccagtcggtgtacgtcatatccgaggagaaggatgagtgcgtcatagcaactgaggtgtaaaatggaagtgagatggcaagactcccgtttctcttaaaataagtaaaattccaaggatatatgccccaacgaatgctgctgaagaggagggaggcctcgtggactgctgctgagaaaccgagttcagaccgagcaggttctcctcctgaggtcctcgacgcctgccgacagcctgtcgcggcccggccgcctgcggcactgccttccgtgacgtcgccgttgcactatggacagttgctcttaagagaatatatatttaaatgggtgaactgaattacgcataagaagcatgcactgcctgagtgtatattttggattcttatgagccagtcttttcttgaattagaaacacaaacactgcctttattgtcctttttgatacgaagatgtgctttttctagatggaaaagatgtgtgttattttttggatttgtaaaaatatttttcatgatatctgtaaagcttgagtattttgtgatgttcgttttttataatttaaattttggtaaatatgtacaaaggcacttcgggtctatgtgactatatttttttgtatataaatgtatttatggaatattgtgcaaatgttatttgagttttttactgttttgttaatgaagaaattcctttttaaaatatttttccaaaataaattttatgaatgacaaacagaaggcg

SEQ ID NO: 23868 - DNA, 894 bp, Homo sapiens
ttgccgcagcgggaggagtaacagctgttcacacacacaggcttcatccactctatccggggtaggacaggcaggcctctgtgcaggcccaggtcctggaaactaaaagaggagcacagcagaccatctgcaaacatactctgtttgctgctaaggatggcactcggtaacttccaggcagccagtacacctgcatcctctccacccggctgggtgtttgagcggtgttttcctagcacagggaccagcatgggctgactaggcacccaccgctgctaagcgtcacccagtgattgtaacgggcactctgactcctcacagtgcaggctctgggcagagaggcctggagggaaaggccagcacagagcagccactcacagggacaaacaccaccctaagccttgggagcccgactaacccagacccaacactctcccaaccttcctgacagccaggggtgaggggaacctgtctcgtggctcccacgagggcaggctcaaccttgaggaggctggtgccctcggacctggtcacagcatgagccggtaacagaggactcaccccaaggcccagcaaagcaagacatgagctcagagcccataggagcatcagaaccctgagtaacacaggttctaaatctaacttctcggaggcaccaagcatgagctctgaatcagcagcctcaagggtgccctggtgctccaaaaaagctgtcccaggagagaggagcaagcctggaggaggcgccccggaccacccccgagacctgccaatgggaagaactcctgaaaggaccggactgtttccaataatctaactgtcccacaacaaagctcaagaatttttacaggaatgtagatatccatcacctaacaaggtgaaactcaaaataca

SEQ ID NO: 23869 - DNA, 419 bp, Homo sapiens
ctgcctccaatctgaacttcctctcgcctcctgtgtctaaaaaaagatgtaccaaaaagtggaggaggtcaggaaaaagcaaactaattgttaagtataatatggcttgttgtttttgtatttacattttcatggattccctcccccgcccaccatttgactaggacttactaattagtgattgatatatgtctttcttaacacagaactcagcagccaaaagaaaagatttgtcaataccacaaatgcatcatcattttaggtgagtggcatgaaaaatgtgggcaaaggcagtcagaaaataatcaggacccagaatctgtaggtcaaatatatttcaccccactttctaaactatatccaatttggttcttcattaagcctgcaaacaagtagaactactcattctccaagttcct

SEQ ID NO: 23870 - DNA, 403 bp, Homo sapiens
accaataaagtagctaccacttactgagtacttacaatgaatctttagattagaactcttcttcatcggggcaaggacccatttgtccccagtatccacaatagctccaagcacagtatgtgctcaaaacatatcagtacatgtaataaattgatgccagccacaatgcaaaaatctttacatgcattcctaatttaatctcaacactctcctcatcacttaccacacatacaaacacacagcttggtgaaagcagtatctttagcccccattttgcaaatgatgaaaccaatattacgagggttgaatggctgggcctggtgatgcacacctgtaatcccagcattttgggaggccaagaggaatcgcttgagctcaggagttcaagagcagcgtggccgac

SEQ ID NO: 23871 - DNA, 394 bp, Homo sapiens
agccaccccaaatattttctttttctacctgttttatatctcgtgatgttcagtcaccaaagggattgttcacaagattgtcttttctgaaggaagacatttaatgtaatatattaatttaaagatgaatctcttcaaaatggttaggaataagtatgactcccacacgataggtaatggctccttcaaatgagttaggccggctaggggggaaatgatttctcagccatcgctaggttcatggtcgagtcccttaggaacaaatgacagattaaccagaggaaaagtgtgcaagtttacgtaagattaagttttaccaggacacagggagccttcaggaaagaaaaactcaagagaaacaggaaatcctgtgtcaattggatgctgtctgatg

SEQ ID NO: 23872 - DNA, 412 bp, Homo sapiens
ggtagagaaaaatttatctttgtgaaagattagttttatggaggggattaactccagttttctttagtggttgtcagagatcttggagctgtggatccttatctaaaagaaaaaaaagtgtagcagttcagatctgtgtaaggaaaatttgtgaaagtctgaaacctaacaaaaggattactgaatagcttcagtggaacccaggtgctggctagagcaattttcttggttactactctgtagtctgtagctttcattgtttttgatgtattttacaaccttgtaagttgtgaataacaataatacaaattattcttgcccttttacatgcaaaggatgtttgttggaagtacaatggttttctttttctcttttgtggaagaagccagttttttatctgttaagcaaattc

SEQ ID NO: 23873 - DNA, 603 bp, Homo sapiens
cgcttggttgtgcctgctgtgtaccgaggcgtggggcatggcggcacggctgtgagcgcacagtccagccacagaaggaggcttcaagaatctttgcggtgctgccatctggacatctgtgtcattgaagtcacaggaggaggcttcaagaatcttcgaggtgctgccatctggacatctgtgtcattttgataacgtgtgtgagatcagtggaggggagccttaggaaaatcggctgtggtttaataaactgaacttcccgctgctttgagccggagcctcctggactggaaaggcgtgggcctcatggccacctccggcctgcgcagctgggtctgcactctcacaactgtgctgagcccacgcttgtgcccttactagtggcctgacctctgcgctgtggagaagggtggatattgtcgccaactctcagacttcttgtgtgtgttcagaaagtacccaaacggattcaaaggaataattagcgtatcctgtaagatatgaatcttaattcctaaattacatatttagcagattgtccaaaatagcacttgtaatggcaacattcaattagtttaaaaaatgtatattattgcaacactc

SEQ ID NO: 23874 - DNA, 398 bp, Homo sapiens
tgcattttctttctgagataaaaacttatttttaattgtattctgaattacttataacacattgttattagagctctggtttcagctaccaactgtaaagaaaaactttagcctttctagagttctttagagagcagttcatctcttcgaatcatcacacaaaaataattatctctggtgttgttttaataaaaagaaggcaagctccaagtgaagggaggagagtgggggtagagaggatggattcaggcttgaatagctgtgagaagaatgctttacccaatgagcccagcgccgggcttttttcccctaagacctcggaagtgaaattcttatgctgatatggttataactgattaccagctagtcagcacttcagtgaatttaaagttttattg

SEQ ID NO: 23875 - DNA, 390 bp, Homo sapiens
ctcaggtggcacccacttttcctggaggtctctgcttaagtggccctcagacatgcccagctggctgccgctctgacctgggatgaaagtctcccctcccccttcccactctgttcctttatgccgtgtcctacagtcttggatcatgtgctcatgggcagccctggccttccctgtatcaggcttctggaggcagaggctgtctgctgtgctcatctgggtccccagcacctgcacgttgctgggtactccaaacaggttgtcgcttgctcagggactgggcaggcagtgaagtggtgtcattgtctggggtgaatacctgagatttgttgtgagccaagatcgcgccactgcactccagcctgggcgatagatggagacttggtctca

SEQ ID NO: 23876 - DNA, 382 bp, Homo sapiens
tttttttgtaactcactcaaggcaacacagtgagttgtgtgagtaagcagactaactggattcgaattcagatccattctgttcacaattacacacactgcatgtctcctccactagaacaaagaaagggcagtaatcatctttatgtgttccccacacctagaacagatcatagcacagagtaagtagctgctaaataaatatttgcagaattaaatgtgtaacttcagagcgaattttgcctcaacctccattgctctgtgaacaccacgcttcatcttacttctgctcctggatgtcctagttaacttctctttccctgcacaaacatgtgcaccccaccacgatgtataccttttgttcttttctttttttcccttca

SEQ ID NO: 23877 - DNA, 392 bp, Homo sapiens
ttatagaccatgaccaagtcgacggatttatccctggaatgcaaggtggttcaacatataaaaacggatcaatgcaataacaccacattaacagaatgaagaaaaaatctatatgataatctgaactgacgcagaaaaagcatttaacaaaattcaataccctttcacaataaagcactcaacaaagtgggcataaaaggaaattacctcaacataataagggccatgtgagaaaagcacacagctaatatattcaatggtgagactgaaagctttcctgtaagatcaggaacaagactatgcctgcttttgctacttctattcaacacagtattggaagttctagtcagagcaattcgtcaataaaaaaaaaaagtctacgcaaattggaa

SEQ ID NO: 23878 - DNA, 627 bp, Homo sapiens
cgagctcggttccccgtgttctggggttggatcattggcctgacgtttgcaaattgaggaaccttagggcaaatcagtgaacttctgaactgccttcgtcttcagttatatggggatttccccacttttgagatccttgtaaggattatatgagatgaagagatgagacaaggtatataaaagtcctagcacagagcgtgtcatataatatggcttcacaagtaccctcatctcctttccagtcgttttttgtttttgtttttgtttttttgagaccatctcactctgttgcccaggctggagtgcctcttcatttttatttctttattcagcaagtattgatcaaatgtgctttgtaccaggtactgagctcttcgttgggatataatggtgatcaaggagattgtagattctggcagggaaaactgacatcaaacacggcgacccgacatagtgagaccctgtctctactagaagaactttaaaaatcacctaggtgtgggccgggcacggtggctaacgcctgtaatcccagcactttgagatgctgaggcaggtggatcacgaggtcaggagatcgagaccatcctggataacacggagaaaccccgtctctactaaaaatac

SEQ ID NO: 23879 - DNA, 1063 bp, Homo sapiens
gtccttcactgccaaacatacctggggttggatcattggcctgacgtttgcaaattgaggaaccttagggcaaatcagtgaacttctgaactgccttcgtcttcagttatatggggatttccccacttttgagatccttgtaaggattatatgagatgaagagatgagacaaggtatataaaagtcctagcacagagcgtgtcatataatatggcttcacaagtaccctcatctcctttccagtcgttttttgtttttgtttttgtttttttgggcgacagaatgagactccatctcaaaaaaaaaaaagaaaccaaggatatagaataaaacaagagtgtagatttgggcattgaggccttcaaattggattgttctcaatgtccagaagaaaaaaaaaatttagaagagacccaaatcagaaaacaaaagttgggctgaattcaatgcgaattattttctagctcaatattaatactgcttatgtcagctgaatttcagcctttcaataacagctagtcaagtatttttttagttggttcctattgatcgtcatcttattttagtggaatccattatattgaagatgtcaagttcctcatttcccatacaaagaatgtgagattcatctttcttgaatctttgctaagtgttgaaggggacttttggcatcttttcaggaggactataattgggccctctaactaaaaagtctcctatgccccttagatagatgagatttttttttttgaccttgtacccaccaacattggtgggaggctcagaagggactgtgtttgtaactttgtagcactttctaaacagtgacctgttgtatgggcattataggacagtccgtggggtggggcgggggatgggggagatggacaaatgaggtctggtttaaagaatgagaagtgtgaccaggcatggtgactcatgcctgtaatccagcactttgggatgctgaggcaggagaatcgcttgaaccagggaggtggaggttgcagtgagctgagattgcgccactgcactccagcctgggtgacagagactctgtctc

SEQ ID NO: 23880 - DNA, 815 bp, Homo sapiens
gatcacgccactgcactccagcctgggcgacagaatgagactccatctcaaaaaaaaaaaagaaaccaaggatatagaataaaacaagagtgtagatttgggcattgaggccttcaaattggattgttctcaatgtccagaagaaaaaaaaaatttagaagagacccaaatcagaaaacaaaagttgggctgaattcaatgcgaattattttctagctcaatattaatactgcttatgtcagctgaatttcagcctttcaataacagctagtcaagtatttttttagttggttcctattgatcgtcatcttattttagtggaatccattatattgaagatgtcaagttcctcatttcccatacaaagaatgtgagattcatctttcttgaatctttgctaagtgttgaaggggacttttggcatcttttcaggaggactataattgggccctctaactaaaaagtctcctatgccccttagatagatgagatttttttttttgaccttgtacccaccaacattggtgggaggctcagaagggactgtgtttgtaactttgtagcactttctaaacagtgacctgttgtatgggcattataggacagtccgtggggtggggcgggggatgggggagatggacaaatgaggtctggtttaaagaatgagaagtgtgaccaggcatggtgactcatgcctgtaatccagcactttgggatgctgaggcaggagaatcgcttgaaccagggaggtggaggttgcagtgagctgagattgcgccactgcactccagcctgggtgacagagactctgtctc

SEQ ID NO: 23881 - DNA, 656 bp, Homo sapiens
accaatagaacagtgagttagctctatgtttcactgttcagggtttcacaagagtcctaagcaaaagcatttggaaaatagtcagaagggataaaagagaaaataaataaaagtttgatccgatgtcttctacttttttatgatttaagcctgccatctacgaagacagcgtaagtctaacaacaaaaccatgtgttcaattcactaagtcagtgaaaggaaatatatagggaatcagcaatggttgaacaaaatgccaagatggtaaattaggaaaagcactgaacagtgcctcatccaacagttttcctatcacttccatgtggctttttctgagtgtgaacagaatgacatttgatgatcgcgtcaccatgtgcgtaccccagtagtttgccaatccctgtggtagggctcactttctgctttgtccaatccatgtgtcctcatcctgattactgctctgctagcatctgcttgaacttactaaattgaagctctcatacatatttagtaaacttacatttaccaagttcacagggcagatttctgccttctagaagtttctaatcttttcttgaatactcgtaagtaaatatagcagtttatagatgctttccaaatttggaaagcacaaaacagtctcctgagagtacaaa

SEQ ID NO: 23882 - DNA, 811 bp, Homo sapiens
ttcatctgcaatcaaatctcaggattaaggatgtcgtattacatcaaatcattacaggaagtatgactgtatcagcggctttttacaaaaacaaacctccagatcacaaaaggaagctgtgtttgtgtactgacacgaagtgttacgtagcagccaggagaggaaggatagcagccgacttggatccatttttgaggaattatttctgtaaggtgtcatggaattgtaagttacaaaaataaggcttttgtaaacagaatctccattccagaaggacggactccaaaatgctacttaatgaaattcatgggaatgttatggtgatggaaatcccaaatgacatgtagattttatatgcaaacaatcccactgcttgtaactcctggcagtgtgtacttaccaaaatcttgatcacacttaggtctcttgctatatatagaaccacatctgatccttatacagtgttgcaagatatatgtccttgctttcccatggttcttaagtgagtcttaagcttggatttgctccagcagaatggtggtttgtgtttctcaaggctgagctactatttggtgcatgtcggaaatctcacactaactgtggatactctgtcatcactgaacccaatcatacaatgaccagacagctttaaatacctacttttgtatgctatgaattcatccgtttacttgtcaaatcctttatttccatatgtgtctccatcaccttttttttctctccggataaatggaattactgtaacttgtgaaacaatggcaaacactataaagctaattttacagtcttgagt

SEQ ID NO: 23883 - DNA, 362 bp, Homo sapiens
gtcgacgcagtctgtgatgatggagagagtgatgtcatatggtttggcaaatgaactgcaatccttcacattccctttgacaaagttgaatacgtgccaaacccatttagcctttctctgccactgctttaactttcctttttttactctcaaaacccctaggttccacttataccgaacaggagtgatttagaaatcatgtaactaactttcttggattaataaaaagttaccaagtaactctacatgtgctttcatttctctttaggagattagcgtttgaggatggataaatgtatagttgtgtgcggcataacaacatttccatcaacatcacactgtacatacagtgatggttccat

SEQ ID NO: 23884 - DNA, 875 bp, Homo sapiens
ttggggatctatgcacatgagtaattggtctatattgtgcatgccatattaagcatctctcagtttttaatattcgaaaatgctttccttacgctgaaatttcctgtttcaaaaaaacaggaaatgtaaattgagaaccctgtatttgcatagcattgaagaaaaagagaaacctgtctctcctgctacttccttccctcccctcatcaatcaataccttattcttaagccacactgaattcttttttctcactattatttggggacctaagacctccttaccacgttgtaccttctgcctcggatcagcaaggtctttgctgctggtgtagagctaggattttgtcagttaaaaagtggaatgtggagctcttaagcgcaggggcactggagccagactgtctggatttgaattctggctctgccaattaccagctctgtgaccttgagcaaggtcactgattttttttgtgcctcagatttatctgttaagtggcagtaataagtgtacctacctcccagggaaggtgtgaggattaaataaattaatatatgtaaaatgcttcaaacagtatctggtgcatggcaagcactcataaagttcgctattattcatgcttttaaaactttactgtggccctcattcaatttgcagatgaaaaatctttctttggaagcagcataggggaagagcatgagcttcagagtcaaacagatgttggagaaattcttaaccactctgaacttgtttttttatctgttaaatggagataaccttacctatcttgcaaagttgttttgcatttgacgcttattattttatatatatgatttcattcgagatataaataaaaattatataaaaatgtgaaaat

SEQ ID NO: 23885 - DNA, 2122 bp, Homo sapiens
atgagtgagtgaaggggaaatgagggctgaaggggtggaaggaatgtggtaaactcctaggtagaaggaacagcaggtgcgaaactgtgcgggaagagatgggaatcagagaaattttaagcagttccctgttcctggagcactttcccagggtgattgtagggtttgatgacataatagcatgcacactactgtgaatggtaactcgccatgtaagttaagatattgttatgcagacctgtacctaccagtcacttactatatcttttgatagtcaaagaaaaaggaaggataatttcgaagaaagacttcgtgggacggcttctgtgacttacatgctgggtcctgggacctcaccccatcctctacactagttttgtacagtccatgttcgtggcctgagaaggcgtggtgttgccttgaccacgaatctcattggcctttcaaaggggaaactgttgtaggattggctgtggagatagcaagaggcctgccccctgtcgctgattgggtgagagcggccaaccccctgcctccgtctctcggcggccccacgggggcctgttggttggcaaccgatttgcttcctccggtgcgtggctgcggggttgcacctgtgaagcgaagacaacctgctaggaccctgataggcgtacacctctcactcccactcacgcgccgacgacatgggcttgtctccgttactcatccaagtttgtcttgagactgggctgtgagccggcactgcagtgaaacgccgcagatgaggaagtgcccaagtcttccttcgggaagttctcgtttagaggagtcaggagaaaaagtcattgttatatcccaactttagaagccgcttatcttggtaccgttctgaggttctagaaagcaagtaacttatatcagtttactaagtgtgggaaagtgacccataacttcaaacatctgcctcagagtaaacctgaggcatttggggacaagtgtcagaccctccgctgcctatcatgcacggcagagcttacctcttgctgcacagagacttctgtgatctcaaggagaacaattataagggtatcactgctaagcctgtaagtgaagatatgatggaatgggaagttgaaattgaaggtctacagaattcagtttggcagggtttagtcttccaactgacaatacattttacatcggagtacaactatgctcctccagttgtgaaatttataacaattccgtttcatccaaatgtagacccacacactggtcagccctgtatagactttttggacaaccctgagaagtggaatacaaactatacattgagcagcatcttacttgccctacaggttatgctttctaatccagtgctagagaatccagtgaatttggaagcagccagaatactggttaaagatgaatctctgtacagaacaattctaagacttttcaacaggccattacaaatgaaagatgacagccaggagttacctaaagacccacgtaaatgtatcagaccaattaaaacaacctcatttagtgattactaccagacatggtccagaatagctacatcaaaagccacagaatactacagaactccattgctcaaagttccaaatttcattggacagtattacaaatggaagaaaatggatctacagcatcagaaagaatggaatttaaagtattccgttatcaagtgttggcttgctagaaaaagaatgcctcatgaagtcactcactcaatggaagaaattaagctctgcccaactctaaatgaaatttttcttgagtcaccaactgcaataaatagcatcacagacatttatgaaacagaagaggaggggtggaagagtgacacttcattatatgaaaatgacacagatgagcccagggaagaggaagtggaagatctgatctcctggaccaatactctcaatacaaatacttcagaagattaagcagaacattatcagattcaaaaaataaacagcctccgccatagcccagcgttgtggagcaattttggaagactctcagaacttggatttcattttttttaagttgttctcacccactcactgcaagtacaaattagaaatataagtacaaatcagtaaaaatgttg

SEQ ID NO: 23886 - DNA, 2033 bp, Homo sapiens
atgagtgagtgaaggggaaatgagggctgaaggggtggaaggaatgtggtaaactcctaggtagaaggaacagcaggtgcgaaactgtgcgggaagagatgggaatcagagaaattttaagcagttccctgttcctggagcactttcccagggtgattgtagggtttgatgacataatagcatgcacactactgtgaatggtaactcgccatgtaagttaagatattgttatgcagacctgtacctaccagtcacttactatatcttttgatagtcaaagaaaaaggaaggataatttcgaagaaagacttcgtgggacggcttctgtgacttacatgctgggtcctgggacctcaccccatcctctacactagttttgtacagtccatgttcgtggcctgagaaggcgtggtgttgccttgaccacgaatctcattggcctttcaaaggggaaactgttgtaggattggctgtggagatagcaagaggcctgccccctgtcgctgattgggtgagagcggccaaccccctgcctccgtctctcggcggccccacgggggcctgttggttggcaaccgatttgcttcctccggtgcgtggctgcggggttgcacctgtgaagcgaagacaacctgctaggaccctgataggcgtacacctctcactcccactcacgcgccgacgacatgggcttgtctccgttactcatccaagtttgtcttgagactgggctgtgagccggcactgcagtgaaacgccgcagatgaggaagtgcccaagtcttccttcgggaagttctcgtttagaggagtcaggagaaaaagtcattgttatatcccaactttagaagccgcttatcttggtaccgttctgaggttctagaaagcaagtaacttatatcagtttactaagtgtgggaaagtgacccataacttcaaacatctgcctcagagtaaacctgaggcatttggggacaagtgtcagaccctccgctgcctatcatgcacggcagagcttacctcttgctgcacagagacttctgtgatctcaaggagaacaattataagggtatcactgctaagcctgtaagtgaagatatgatggaatgggaagttgaaattgaaggtctacagaattcagtttggcagggtttagtcttccaactgacaatacattttacatcggagtacaactatgctcctccagttgtgaaatttataacaattccgtttcatccaaatgtagacccacacactggtcagccctgtatagactttttggacaaccctgagaagtggaatacaaactatacattgagcagcatcttacttgccctacaggttatgctttctaatccagtgctagagaatccagtgaatttggaagcagccagaatactggttaaagatgaatctctgtacagaacaattctaagacttttcaacaggccattacaaatgaaagatgacagccaggagttacctaaagacccacgtaaatgtatcagtgctcaaagttccaaatttcattggacagtattacaaatggaagaaaatggatctacagcatcagaaagaatggaatttaaagtattccgttatcaagtgttggcttgctagaaaaagaatgcctcatgaagtcactcactcaatggaagaaattaagctctgcccaactctaaatgaaatttttcttgagtcaccaactgcaataaatagcatcacagacatttatgaaacagaagaggaggggtggaagagtgacacttcattatatgaaaatgacacagatgagcccagggaagaggaagtggaagatctgatctcctggaccaatactctcaatacaaatacttcagaagattaagcagaacattatcagattcaaaaaataaacagcctccgccatagcccagcgttgtggagcaattttggaagactctcagaacttggatttcattttttttaagttgttctcacccactcactgcaagtacaaattagaaatataagtacaaatcagtaaaaatgttg

SEQ ID NO: 23887 - DNA, 1898 bp, Homo sapiens
atgagtgagtgaaggggaaatgagggctgaaggggtggaaggaatgtggtaaactcctaggtagaaggaacagcaggtgcgaaactgtgcgggaagagatgggaatcagagaaattttaagcagttccctgttcctggagcactttcccagggtgattgtagggtttgatgacataatagcatgcacactactgtgaatggtaactcgccatgtaagttaagatattgttatgcagacctgtacctaccagtcacttactatatcttttgatagtcaaagaaaaaggaaggataatttcgaagaaagacttcgtgggacggcttctgtgacttacatgctgggtcctgggacctcaccccatcctctacactagttttgtacagtccatgttcgtggcctgagaaggcgtggtgttgccttgaccacgaatctcattggcctttcaaaggggaaactgttgtaggattggctgtggagatagcaagaggcctgccccctgtcgctgattgggtgagagcggccaaccccctgcctccgtctctcggcggccccacgggggcctgttggttggcaaccgatttgcttcctccggtgcgtggctgcggggttgcacctgtgaagcgaagacaacctgctaggaccctgataggcgtacacctctcactcccactcacgcgccgacgacatgggcttgtctccgttactcatccaagtttgtcttgagactgggctgtgagccggcactgcagtgaaacgccgcagatgaggaagtgcccaagtcttccttcgggaagttctcgtttagaggagtcaggagaaaaagtcattgttatatcccaactttagaagccgcttatcttggtaccgttctgaggttctagaaagcaagtaacttatatcagtttactaagtgtgggaaagtgacccataacttcaaacatctgcctcagagtaaacctgaggcatttggggacaagtgtcagaccctccgctgcctatcatgcacggcagagcttacctcttgctgcacagagacttctgtgatctcaaggagaacaattataagggtatcactgctaagcctgtaagtgaagatatgatggaatgggaagttgaaattgaaggtctacagaattcagtttggcagggtttagtcttccaactgacaatacattttacatcggagtacaactatgctcctccagttgtgaaatttataacaattccgtttcatccaaatgtagacccacacactggtcagccctgtatagactttttggacaaccctgagaagtggaatacaaactatacattgagcagcatcttacttgccctacaggttatgctttctaatccagtgctagagaatccagtgaatttggaagcagccagaatactggttaaagatgaatctctgtacagaacaattctaagacttttcaacaggccattacaaatgaaagatgacagccaggagttacctaaagacccacgtaaatgtatcagaccaattaaaacaacctcatttagtgattactaccagacatggtccagaatagctacatcaaaagccacagaatactacagaactccattgctcaaagttccaaatttcattggacagtattacaaatggaagaaaatggatctacagcatcagaaagaatggaatttaaaatgaaaaatctttctttggaagcagcataggggaagagcatgagcttcagagtcaaacagatgttggagaaattcttaaccactctgaacttgtttttttatctgttaaatggagataaccttacctatcttgcaaagttgttttgcatttgacgcttattattttatatatatgatttcattcgagatataaataaaaattatataaaaatgtgaaaat

SEQ ID NO: 23888 - DNA, 1809 bp, Homo sapiens
atgagtgagtgaaggggaaatgagggctgaaggggtggaaggaatgtggtaaactcctaggtagaaggaacagcaggtgcgaaactgtgcgggaagagatgggaatcagagaaattttaagcagttccctgttcctggagcactttcccagggtgattgtagggtttgatgacataatagcatgcacactactgtgaatggtaactcgccatgtaagttaagatattgttatgcagacctgtacctaccagtcacttactatatcttttgatagtcaaagaaaaaggaaggataatttcgaagaaagacttcgtgggacggcttctgtgacttacatgctgggtcctgggacctcaccccatcctctacactagttttgtacagtccatgttcgtggcctgagaaggcgtggtgttgccttgaccacgaatctcattggcctttcaaaggggaaactgttgtaggattggctgtggagatagcaagaggcctgccccctgtcgctgattgggtgagagcggccaaccccctgcctccgtctctcggcggccccacgggggcctgttggttggcaaccgatttgcttcctccggtgcgtggctgcggggttgcacctgtgaagcgaagacaacctgctaggaccctgataggcgtacacctctcactcccactcacgcgccgacgacatgggcttgtctccgttactcatccaagtttgtcttgagactgggctgtgagccggcactgcagtgaaacgccgcagatgaggaagtgcccaagtcttccttcgggaagttctcgtttagaggagtcaggagaaaaagtcattgttatatcccaactttagaagccgcttatcttggtaccgttctgaggttctagaaagcaagtaacttatatcagtttactaagtgtgggaaagtgacccataacttcaaacatctgcctcagagtaaacctgaggcatttggggacaagtgtcagaccctccgctgcctatcatgcacggcagagcttacctcttgctgcacagagacttctgtgatctcaaggagaacaattataagggtatcactgctaagcctgtaagtgaagatatgatggaatgggaagttgaaattgaaggtctacagaattcagtttggcagggtttagtcttccaactgacaatacattttacatcggagtacaactatgctcctccagttgtgaaatttataacaattccgtttcatccaaatgtagacccacacactggtcagccctgtatagactttttggacaaccctgagaagtggaatacaaactatacattgagcagcatcttacttgccctacaggttatgctttctaatccagtgctagagaatccagtgaatttggaagcagccagaatactggttaaagatgaatctctgtacagaacaattctaagacttttcaacaggccattacaaatgaaagatgacagccaggagttacctaaagacccacgtaaatgtatcagtgctcaaagttccaaatttcattggacagtattacaaatggaagaaaatggatctacagcatcagaaagaatggaatttaaaatgaaaaatctttctttggaagcagcataggggaagagcatgagcttcagagtcaaacagatgttggagaaattcttaaccactctgaacttgtttttttatctgttaaatggagataaccttacctatcttgcaaagttgttttgcatttgacgcttattattttatatatatgatttcattcgagatataaataaaaattatataaaaatgtgaaaat

SEQ ID NO: 23889 - DNA, 463 bp, Homo sapiens
gtagcactgtcccagatcactccaaagaggcccaggaccctctgtcgaggcgggatgacaacctgaaaccagggccgtgcttggtgtccctctgctgctggttcaccccaacaagggtgggccgccagatcccctccaagtctaaggcatgctctccttgctgctgagagagctggtggcattttacaggtaaccactcacagctgcatccctctccaggaggccctcttagccaaaagaagctgccttgcctaagagaatgcccctccctaaggacagcagacattcagtgactgattgctgtgggggcacaaaggccaagcgcgggccatctgcaggccatcccactctcgagtttttcaggctgaggccctgctgggacttcactgcggttcagcttctccctctgcctaattccaccccctcaccctgagagcacttcacagtaaaccttctgcacgta

SEQ ID NO: 23890 - DNA, 434 bp, Homo sapiens
caggcctaacctattataataattgcctctgaaatactaataaaatactatattataggtagatatcaggggagaagacagaatgaagaaattatttttgagtctgttttgcagccaattagattgattctctaatttcataactgacagtataaattgctggtaaaaatgttgacaaacaggccgggtaatcctagcactttgggaggctgaggtgggcggattacgaggtcaggagttcaacactagcctggccagcatggagaaaccccgtctctactaaaaatacaaaaattagccaggcgtggtggcatgcacctgtaatcccagctactcaggaggctgaggcaggagaatcgcttgaacccaggaggcggaggctgcgtgagccaagatcgcgccactgcactccagagagagactccatctcaaaa

SEQ ID NO: 23891 - DNA, 1382 bp, Homo sapiens
aagagaatttcacatattttctggttcagagctcactcatgaaaagacagggatttcttcaaggccaaagcagtgagtataggtcccagcctttagttcctctgaccctgggtggtaatgtgagcatgacctattaaccctgaaaattttcaaacaaatatcagagtaacttaggacctagaatagattgcacgttcaatgatgggacttacatgctctttttcctttccttccctgcctctatcctgtttgattttaacagcactcgcaaacaaaattacatgatgaatttttcacgacaacatgggctcagacatttctacaacagaagacgaaggtcacttaggcgatacccatgaagaatcaaaaagtttattttttttcttccaacatgtgatgtgttgctctccattcttttaaatctcgcactacatctgatatcaggaaatatctgtgaaggacttggtgattacctgaaagcccttctcaagaccgagtgtacaccactttcccacactgtgaactaatgacaagtgacttatttgctcataagtaaatgtcttcatgttgatgtgtccgtgaaagttgtgatctgttgtaatatcagttacagtggcagtattgacaataagaaacagtttaacagaaaaatgaaatttaagcacaaaaaatttaagagattttatgtttaaaatggcatttagcacagtatttaacattcttggtcacaaagctatttaagtggactgtatttcagctatgtctcatgttttatatgattaaattatcattgtttgtcctttatgtattctcttctacaatacaacacattgaaactgtatttacttgttatgttgtaatattttgctgctgaatttggggctacttatattctgcagaaaattaattgaaatacctattcaagaagatagttgtaaagatattgtatctcctttaatatactccttaaaaatgtatgttggtttagcgttgttttgtggataagaaaaatgcttgaccctgaaatattttctactttaaattgtggatgaagaccctatctcccacaaataagttcccatttccttgtctaaagatctttttttaagtgttctgtggctgatttactaacagtaactgccattttttgtctgtgataacagagtgatttgtaaaacagtggttgttttttcattgtgttttcttcgtggattgttttttctgcgggtcatattcataccttctgatgaagttgtacaacaccagcaacattataatggccctgtagctctgaatgctatttgtgtaactgaaaggttgcactctagggtgaaccaagctataaaagcccatgcttaaataaaaattatgtccaaaagcca

SEQ ID NO: 23892 - DNA, 11581 bp, Homo sapiens
  misc_feature (144)..(144): n is a, c, g, or t
cacgcgtgggctcggcgggggcccgctcccaggcccgctcccgagcccgttccgctcccgtccgccttcttctcgccttctctccgcgtggctcctccgtcccggcgtctccaaaactgaatgagcgagcggcgcgtagggcgncggcggcggcggcggcggcggcggcggcggcatggagcgcagtggctgggcccggcagactttcctcctagcgctgttgctgggggcgacgctgagggcgcgcgcggcggctggctattacccccgcttttcgcccttctttttcctgtgcacccaccacggggagctggaaggggatggggagcagggcgaggtgctcatttccctgcatattgcgggcaaccccacctactacgttccgggacaagaataccatgtgacaatttcaacaagcaccttttttgacggcttgctggtgacaggactatacacatctacaagtgttcaggcatcacagagcattggaggttccagtgctttcggatttgggatcatgtctgaccaccagtttggtaaccagtttatgtgcagtgtggtagcctctcacgtgagtcacctgcccacaaccaacctcagtttcatctggattgctccacctgcgggcacaggctgtgtgaatttcatggctacagcaacacaccggggccaggttattttcaaagatgctttagcccagcagttgtgtgaacaaggagctccaacagatgtcactgtgcacccacatctagctgaaatacatagtgacagcattatcctgagagatgactttgactcctaccaccaactgcaattaaatccaaatatatgggttgaatgtaacaactgtgagactggagaacagtgtggcgcgattatgcatggcaatgccgtcaccttctgtgaaccatatggcccacgagaactgattaccacaggccttaatacaacaacagcttctgtcctccaattttccattgggtcaggttcatgtcgctttagttattcagaccccagcatcatcgtgttatatgccaagaataactctgcggactggattcagctagagaaaattagagccccttccaatgtcagcacaatcatccatatcctctaccttcctgaggacgccaaaggggagaatgtccaatttcagtggaagcaggaaaatcttcgtgtaggtgaagtgtatgaagcctgctgggccttagataacatcttgatcatcaattcagctcacagacaagtcgttttagaagatagtctcgacccagtggacacaggcaactggcttttcttcccaggagctacagttaagcatagctgtcagtcagatgggaactccatttatttccatggaaatgaaggcagcgagttcaattttgccaccaccagggatgtagatctttccacagaagatattcaagagcaatggtcagaagaatttgagagccagcctacaggatgggatgtcttgggagctgtcattggtacagaatgtggaacgatagaatcaggcttatcaatggtcttcctcaaagatggagagaggaaattatgcactccatccatggacactaccggttatgggaacctgaggttttactttgtgatgggaggaatttgtgaccctggaaattctcatgaaaatgacataatcctgtatgcaaaaattgaaggaagaaaagagcatataacactggataccctttcctattcctcatataaggttccgtctttggtttctgtggtcatcaatcctgaacttcagactcctgctaccaaattttgtctcaggcaaaagaaccatcaaggacataataggaatgtctgggctgtagactttttccatgtcttgcctgttctcccttctacaatgtctcacatgatacagttttccatcaatctgggatgtggaacgcatcagcctggtaacagtgtcagcttggaattttctaccaaccatgggcgctcctggtccctccttcacactgaatgcttacctgagatctgtgctggaccccacctcccccacagcactgtctactcctctgaaaactacagtgggtggaaccgaataacaattccccttcctaacgcagcactaacccggaacaccaggattcgctggagacaaacaggaccaatccttggaaacatgtgggcaattgataatgtttatattggcccgtcatgtctcaaattctgttctggcagaggacagtgcactagacatggttgcaagtgtgaccctggattttctggcccagcttgtgagatggcatcccagacattcccaatgtttatttctgaaagctttggcagttccaggctctcctcttaccataacttttactctatccgtggtgctgaagtcagctttggttgtggtgtcttggccagtggtaaggccctggttttcaacaaagaagggcggcgtcagctaattacatctttccttgacagctcacaatccaggtttctccagttcacactgagactggggagcaaatctgttctgagcacgtgcagagcccctgatcagcctggtgaaggagttttgctgcattattcttatgataatgggataacttggaaactcctggagcattattcatatctcagctatcatgagcccagaataatctccgtagaactaccaggtgatgcaaagcagtttggaattcagttcagatggtggcaaccgtatcattcttcccagagagaagatgtatgggctattgatgagattatcatgacatctgtgcttttcaacagcattagtcttgactttaccaatcttgtggaggtcactcagtctctgggattctaccttggaaatgttcagccatactgtggccacgactggaccctttgttttacaggagattctaaacttgcctcaagtatgcgctatgtggaaacacaatcaatgcagataggagcatcctatatgattcagttcagtttggtgatgggatgtggccagaaatacaccccacacatggacaaccaggtgaagctggagtactcaaccaaccacggccttacctggcacctcgtccaagaagaatgccttccaagtatgccaagttgtcaggaatttacatcagcaagtatttaccatgccagtgagtttacacagtggaggagagtcatagtgcttcttccccagaaaacttggtccagtgctacccgtttccgctggagccagagctattacacagctcaagacgagtgggctttggacagcatttacattgggcagcagtgccccaacatgtgcagtgggcatggctcatgcgatcatggcatatgcaggtgtgaccaggggtaccaaggcactgaatgccacccagaagctgcccttccgtccacaattatgtcagattttgagaaccagaatggctgggagtctgactggcaagaagttattgggggagaaattgtaaaaccagaacaagggtgtggtgtcatctcttctggatcatctctgtacttcagcaaggctgggaaaagacagctggtgagttgggacctggatacttcttgggtggactttgtccagttctacatccagataggcggagagagtgcttcatgcaacaagcctgacagcagagaggagggcgtcctccttcagtacagcaacaatgggggcatccagtggcacctgctagcagagatgtacttttcagacttcagcaaacccagatttgtctatctggagcttccagctgctgccaagaccccttgcaccaggttccgctggtggcagcccgtgttctcaggggaggactatgaccagtgggcagtcgatgacatcatcattctgtccgagaagcagaagcagatcatcccagttatcaatccaactttacctcagaacttttatgagaagccagcttttgattaccctatgaatcagatgagtgtgtggttgatgttggctaatgaaggaatggttaaaaatgaaaccttctgtgctgccacaccatcagcaatgatatttggaaaatcagatggagatcgatttgcagtaactcgagatttgaccctgaaacctggatatgtgctacagttcaagctaaacataggttgtgccaatcaattcagcagtactgctccagttcttcttcagtactctcatgatgctggtatgtcctggtttctggtgaaagaaggctgttacccggcttctgcaggcaaaggatgcgaaggaaactccagagaactaagtgagcccaccatgtatcacacaggggactttgaagaatggacaagaatcaccattgttattccaaggtctcttgcatccagcaagaccagattccgatggatccaggagagcagctcacagaaaaacgtgcctccatttggtttagatggagtgtacatatccgagccttgtcccagttactgcagtggccatggggactgcatttcaggagtgtgtttctgtgacctgggatatactgctgcacaaggaacctgtgtgtcaaatgtccccaatcacaatgagatgttcgataggtttgaggggaagctcagccctctgtggtacaagataacaggtgcccaggttggaactggctgtggaacacttaacgatggcaaatctctctacttcaatggccctgggaaaagggaagcccggacggtccctctggacaccaggaatatcagacttgttcaattttatatacaaattggaagcaaaacttcaggcattacctgcatcaaaccaagaactagaaatgaagggcttattgttcagtattcaaatgacaatgggatactctggcatttgcttcgagagttggacttcatgtccttcctggaaccacagatcatttccattgacctgccacaggacgcgaagacacctgcaacggcatttcgatggtggcaaccgcaacatgggaagcattcagcccagtgggctttggatgatgttcttataggaatgaatgacagctctcaaactggatttcaagacaaatttgatggctctatagatttgcaagccaactggtatcgaatccaaggaggtcaagttgatattgactgtctctctatggatactgctctgatattcactgaaaacataggaaaacctcgttatgctgagacctgggattttcatgtgtcagcatctacctttttgcagtttgaaatgagcatgggctgtagcaagcccttcagcaactcccacagtgtacagctccagtattctctgaacaatggcaaggactggcatcttgtcaccgaagagtgtgttcctccaaccattggctgtctgcattacacggaaagttcaatttacacctcggaaagattccagaattggaagcggatcactgtctaccttccactctccaccatttctcccaggacccggttcagatggattcaggccaactacactgtgggggctgattcctgggcgattgataatgttgtactggcctcagggtgcccttggatgtgctcaggacgagggatttgtgatgctggacgctgtgtgtgtgaccggggctttggtggaccctattgtgttcctgttgttcctctgccctcgattcttaaagacgatttcaatgggaatttacatcctgacctttggcctgaagtgtatggtgcagagagggggaatctgaatggtgaaaccatcaaatctggaacatctctaatttttaaaggggaaggactaaggatgcttatttcaagagatctagattgtacaaatacaatgtatgtccagttttcacttagatttatagcaaaaagtaccccagagagatctcactctattctgttacaattctccatcagtggaggaatcacttggcacctgatggatgaattttactttcctcaaacaacgaatatacttttcatcaatgttcccttgccatacactgcccaaaccaatgctacaagattcagactctggcaaccttataataacggtaagaaagaagaaatctggattgttgatgacttcattatcgatggaaataatgtaaacaaccctgtgatgctcttggatacatttgattttgggcccagagaagacaattggtttttctatcctggtggtaacatcggtctttattgtccatattcttcaaagggggcacctgaagaagattcagctatggtgtttgtttcaaatgaagttggtgagcattccattaccacccgtgacctaaatgtgaatgagaacaccatcatacaatttgagatcaacgttggctgttcgactgatagctcatccgcggatccagtgagactggaattttcaagggacttcggggcgacctggcaccttctgctgcccctctgctaccacagcagcagccacgtcagctctttatgctccaccgagcaccaccccagcagcacctactacgcaggaaccatgcagggctggaggagggaggtcgtgcactttgggaagctgcacctttgtggatctgtccgtttcagatggtaccagggattttaccctgccggctctcagccagtgacatgggccattgataatgtctacatcggtccccagtgtgaggagatgtgtaatggacaggggagctgtatcaatggaaccaaatgtatatgtgaccctggctactcaggtccaacctgtaaaataagcaccaaaaatcctgattttctcaaagatgatttcgaaggtcagctagaatctgatagattcttattaatgagtggtgggaaaccatctcgaaagtgtggaatcctttctagtggaaacaacctctttttcaatgaagatggcttgcgcatgttgatgacacgagacctggatttatcacatgctagatttgtgcagttcttcatgagactgggatgtggtaaaggcgttcctgaccccaggagtcaacccgtgctcctacagtattctctcaacggtggcctctcgtggagtcttcttcaggagttccttttcagcaattccagcaatgtgggcaggtacattgccctggagatacccttgaaagcccgttctggttctactcgccttcgctggtggcaaccgtctgagaatgggcacttctacagcccctgggttatcgatcagattcttattggaggaaatatttctggtaatacggtcttggaagatgatttcacaacccttgatagtaggaaatggctgcttcacccaggaggcaccaagatgcccgtgtgtggctctactggtgatgccctggtcttcattgaaaaggccagcacccgttacgtggtcagcacagacgttgccgtgaatgaggattccttcctacagatagacttcgctgcctcctgctcagtcacagactcttgttatgcgattgaattggaatactcagtagatcttggattgtcatggcacccattggtaagggactgtctgcctaccaatgtggaatgcagtcgctatcatctgcaacggatcctggtgtcagacactttcaacaagtggactagaatcactctgcctctccctccttataccaggtcccaagccactcgtttccgttggcatcaaccagctccttttgacaagcagcagacatgggcaatagataatgtctatatcggggatggctgcatagacatgtgcagtggccatgggagatgcatccagggaaactgcgtctgtgatgaacagtggggtggcctgtactgtgatgaccccgagacctctcttccaacccaactcaaagacaacttcaatcgagctccatccagtcagaactggctgactgtgaacggagggaaattgagtacagtgtgtggagccgtggcgtcgggaatggctctccatttcagtgggggttgtagtcgattattagtcactgtggatctaaacctcactaatgctgagttcatccaattttacttcatgtatgggtgcctgattacaccaaacaaccgtaaccaaggtgttctcttggaatattctgtcaatggaggcattacctggaacctgctcatggagattttctatgaccagtacagtaagcccggatttgtgaatatccttctccctcctgatgctaaagagattgccactcgcttccgctggtggcagccaagacatgacggcctggatcagaacgactgggccattgacaatgtcctcatctcaggctctgctgaccaaaggaccgttatgctggacaccttcagcagcgccccagtaccccagcacgagcgctcccctgcagatgccggccctgtcgggaggatcgcctttgacatgtttatggaagacaaaacttcagtgaatgagcactggctattccatgatgattgtacagtagaaagattctgtgactcccctgatggtgtgatgctctgtggcagtcatgatggacgggaggtgtatgcagtgacccatgacctgactcccactgaaggctggattatgcaattcaagatctcagttggatgtaaggtgtctgaaaaaattgcccagaatcaaattcatgtgcagtattctactgacttcggtgtgagttggaattatctggtccctcagtgcttgcctgctgacccaaaatgctctggaagtgtttctcagccatctgtattctttccaactaaagggtggaaaaggatcacctacccacttcctgaaagcttagtgggaaatccggtaaggtttaggttctatcagaagtactcagacatgcagtgggcaatcgataatttctacctgggccctggatgcttggacaactgcaggggccatggagattgcttaagggaacagtgcatctgtgatccgggatactcagggccaaactgctacttgacccacactctgaagactttcctgaaggaacgctttgacagtgaagaaatcaaacctgacttatggatgtccttagaaggtggaagtacttgcactgagtgtggaattcttgccgaggacactgcactctattttgggggatccactgtgagacaagcggttacacaagatttggatcttcgaggtgcaaagttcctgcaatactgggggcgcatcggtagtgagaacaacatgacctcttgccatcgtcccatctgccggaaggaaggcgtgctgttggactactctaccgatggaggaattacctggactttgctccatgagatggattaccagaaatacatttctgttagacacgactacatacttcttcctgaagatgccctcaccaacacaactcgacttcgctggtggcagccttttgtgatcagcaatggaattgtggtctctggggtggagcgtgctcagtgggcactggacaacattttgattggtggagcagaaatcaatcccagccaattggtggacacttttgatgatgaaggcacttcccatgaagaaaactggagtttttaccctaatgctgtaaggacagcaggattttgtggcaatccatcctttcacctctattggccaaataaaaagaaggacaagactcacaatgctctctcctcccgagaactcattatacagccaggatacatgatgcagtttaaaattgtggtgggttgtgaagccacttcttgtggtgaccttcattccgtaatgctggaatacactaaggatgcaagatcggattcctggcagctcgtacagacccagtgccttccttcctcttctaacagcattggctgctcccctttccagttccatgaagccaccatctacaactctgtcaacagctcaagctggaaaagaatcaccatccagctgcctgaccatgtctcctctagtgcaacacagttccgctggatccagaagggagaagaaactgagaagcaaagctgggcaattgaccacgtgtacattggagaggcttgccccaagctctgcagcgggcacggatactgcacgaccggtgccatctgcatctgcgacgagagcttccaaggtgatgactgctctgttttcagtcacgaccttcccagttatattaaagataattttgagtccgcaagagtcaccgaggcaaactgggagaccattcaaggtggagtcataggaagtggctgtgggcagctggccccctacgcccatggagactcactgtactttaatggctgtcagatcaggcaagcagctaccaagcctctggatctcactcgagcaagcaaaatcatgtttgttttgcaaattgggagcatgtcgcagacggacagctgcaacagtgacctgagtggcccccacgctgtggacaaggcagtgctgctgcaatacagcgtcaacaacgggatcacctggcatgtcatcgcccagcaccagccaaaggacttcacacaagctcagagagtgtcttacaatgtccccctggaggcacggatgaaaggagtcttactgcgctggtggcaaccacgccacaatggaacaggtcatgatcaatgggctttggaccatgtggaggtcgtcctagtaagcactcgcaaacaaaattacatgatgaatttttcacgacaacatgggctcagacatttctacaacagaagacgaaggtcacttaggcgatacccatgaagaatcaaaaagtttattttttttcttccaacatgtgatgtgttgctctccattcttttaaatctcgcactacatctgatatcaggaaatatctgtgaaggacttggtgattacctgaaagcccttctcaagaccgagtgtacaccactttcccacactgtgaactaatgacaagtgacttatttgctcataagtaaatgtcttcatgttgatgtgtccgtgaaagttgtgatctgttgtaatatcagttacagtggcagtattgacaataagaaacagtttaacagaaaaatgaaatttaagcacaaaaaatttaagagattttatgtttaaaatggcatttagcacagtatttaacattcttggtcacaaagctatttaagtggactgtatttcagctatgtctcatgttttatatgattaaattatcattgtttgtcctttatgtattctcttctacaatacaacacattgaaactgtatttacttgttatgttgtaatattttgctgctgaatttggggctacttatattctgcagaaaattaattgaaatacctattcaagaagatagttgtaaagatattgtatctcctttaatatactccttaaaaatgtatgttggtttagcgttgttttgtggataagaaaaatgcttgaccctgaaatattttctactttaaattgtggatgaagaccctatctcccacaaataagttcccatttccttgtctaaagatctttttttaagtgttctgtggctgatttactaacagtaactgccattttttgtctgtgataacagagtgatttgtaaaacagtggttgttttttcattgtgttttcttcgtggattgttttttctgcgggtcatattcataccttctgatgaagttgtacaacaccagcaacattataatggccctgtagctctgaatgctatttgtgtaactgaaaggttgcactctagggtgaaccaagctataaaagcccatgcttaaataaaaattatgtccaaaagcca

SEQ ID NO: 23893 - DNA, 5205 bp, Homo sapiens
tagattagatatggcatttagcttcctttcattctctattccttcagttgcctaagcttataaaaataaacaacataacagaaggactaggtcctgctcatagaggattctgccatatggatagagggactttatcaagcgtgatacaaggttataattctctgaaaaggaaaatgtgcaaattagcattggtgccacatgcagtagttcccaaatcctctttcttgcctttgaagaaaaaaataaatcaatctcccccacatccttatagactgctccaaaggatctttatacataataagatgtatatcaaatagaactcaaagaacctgttaacaaaccgtagagttcatgcaaagaattggaactgaaatgccttagggtacaactgtccttaaatagaaattttacatggaaaataatcacacataagccaaattttgcttcccagcttgggtacatgtcgtttgcaaaggcacagtttggccaatgtaggctgtgaatggttttgtcaatcctttgatttgttttgtgtagtttcttgccagatgggcaagcagacataaacaagagcattctgaaaggcccctcacattctgctggccgtccagtgccagttctgagcaggccaacagatcaaaacaaacaaacaaacaaacgaaaaaggcagaactttccatttcttaaaactaaatggaaaatttgggattttttaaaaatacatttcagattcttattggaggaaatatttctggtaatacggtcttggaagatgatttcacaacccttgatagtaggaaatggctgcttcacccaggaggcaccaagatgcccgtgtgtggctctactggtgatgccctggtcttcattgaaaaggccagcacccgttacgtggtcagcacagacgttgccgtgaatgaggattccttcctacagatagacttcgctgcctcctgctcagtcacagactcttgttatgcgattgaattggaatactcagtagatcttggattgtcatggcacccattggtaagggactgtctgcctaccaatgtggaatgcagtcgctatcatctgcaacggatcctggtgtcagacactttcaacaagtggactagaatcactctgcctctccctccttataccaggtcccaagccactcgtttccgttggcatcaaccagctccttttgacaagcagcagacatgggcaatagataatgtctatatcggggatggctgcatagacatgtgcagtggccatgggagatgcatccagggaaactgcgtctgtgatgaacagtggggtggcctgtactgtgatgaccccgagacctctcttccaacccaactcaaagacaacttcaatcgagctccatccagtcagaactggctgactgtgaacggagggaaattgagtacagtgtgtggagccgtggcgtcgggaatggctctccatttcagtgggggttgtagtcgattattagtcactgtggatctaaacctcactaatgctgagttcatccaattttacttcatgtatgggtgcctgattacaccaaacaaccgtaaccaaggtgttctcttggaatattctgtcaatggaggcattacctggaacctgctcatggagattttctatgaccagtacagtaagcccggatttgtgaatatccttctccctcctgatgctaaagagattgccactcgcttccgctggtggcagccaagacatgacggcctggatcagaacgactgggccattgacaatgtcctcatctcaggctctgctgaccaaaggaccgttatgctggacaccttcagcagcgccccagtaccccagcacgagcgctcccctgcagatgccggccctgtcgggaggatcgcctttgacatgtttatggaagacaaaacttcagtgaatgagcactggctattccatgatgattgtacagtagaaagattctgtgactcccctgatggtgtgatgctctgtggcagtcatgatggacgggaggtgtatgcagtgacccatgacctgactcccactgaaggctggattatgcaattcaagatctcagttggatgtaaggtgtctgaaaaaattgcccagaatcaaattcatgtgcagtattctactgacttcggtgtgagttggaattatctggtccctcagtgcttgcctgctgacccaaaatgctctggaagtgtttctcagccatctgtattctttccaactaaagggtggaaaaggatcacctacccacttcctgaaagcttagtgggaaatccggtaaggtttaggttctatcagaagtactcagacatgcagtgggcaatcgataatttctacctgggccctggatgcttggacaactgcaggggccatggagattgcttaagggaacagtgcatctgtgatccgggatactcagggccaaactgctacttgacccacactctgaagactttcctgaaggaacgctttgacagtgaagaaatcaaacctgacttatggatgtccttagaaggtggaagtacttgcactgagtgtggaattcttgccgaggacactgcactctattttgggggatccactgtgagacaagcggttacacaagatttggatcttcgaggtgcaaagttcctgcaatactgggggcgcatcggtagtgagaacaacatgacctcttgccatcgtcccatctgccggaaggaaggcgtgctgttggactactctaccgatggaggaattacctggactttgctccatgagatggattaccagaaatacatttctgttagacacgactacatacttcttcctgaagatgccctcaccaacacaactcgacttcgctggtggcagccttttgtgatcagcaatggaattgtggtctctggggtggagcgtgctcagtgggcactggacaacattttgattggtggagcagaaatcaatcccagccaattggtggacacttttgatgatgaaggcacttcccatgaagaaaactggagtttttaccctaatgctgtaaggacagcaggattttgtggcaatccatcctttcacctctattggccaaataaaaagaaggacaagactcacaatgctctctcctcccgagaactcattatacagccaggatacatgatgcagtttaaaattgtggtgggttgtgaagccacttcttgtggtgaccttcattccgtaatgctggaatacactaaggatgcaagatcggattcctggcagctcgtacagacccagtgccttccttcctcttctaacagcattggctgctcccctttccagttccatgaagccaccatctacaactctgtcaacagctcaagctggaaaagaatcaccatccagctgcctgaccatgtctcctctagtgcaacacagttccgctggatccagaagggagaagaaactgagaagcaaagctgggcaattgaccacgtgtacattggagaggcttgccccaagctctgcagcgggcacggatactgcacgaccggtgccatctgcatctgcgacgagagcttccaaggtgatgactgctctgttttcagtcacgaccttcccagttatattaaagataattttgagtccgcaagagtcaccgaggcaaactgggagaccattcaaggtggagtcataggaagtggctgtgggcagctggccccctacgcccatggagactcactgtactttaatggctgtcagatcaggcaagcagctaccaagcctctggatctcactcgagcaagcaaaatcatgtttgttttgcaaattgggagcatgtcgcagacggacagctgcaacagtgacctgagtggcccccacgctgtggacaaggcagtgctgctgcaatacagcgtcaacaacgggatcacctggcatgtcatcgcccagcaccagccaaaggacttcacacaagctcagagagtgtcttacaatgtccccctggaggcacggatgaaaggagtcttactgcgctggtggcaaccacgccacaatggaacaggtcatgatcaatgggctttggaccatgtggaggtcgtcctagtaagcactcgcaaacaaaattacatgatgaatttttcacgacaacatgggctcagacatttctacaacagaagacgaaggtcacttaggcgatacccatgaagaatcaaaaagtttattttttttcttccaacatgtgatgtgttgctctccattcttttaaatctcgcactacatctgatatcaggaaatatctgtgaaggacttggtgattacctgaaagcccttctcaagaccgagtgtacaccactttcccacactgtgaactaatgacaagtgacttatttgctcataagtaaatgtcttcatgttgatgtgtccgtgaaagttgtgatctgttgtaatatcagttacagtggcagtattgacaataagaaacagtttaacagaaaaatgaaatttaagcacaaaaaatttaagagattttatgtttaaaatggcatttagcacagtatttaacattcttggtcacaaagctatttaagtggactgtatttcagctatgtctcatgttttatatgattaaattatcattgtttgtcctttatgtattctcttctacaatacaacacattgaaactgtatttacttgttatgttgtaatattttgctgctgaatttggggctacttatattctgcagaaaattaattgaaatacctattcaagaagatagttgtaaagatattgtatctcctttaatatactccttaaaaatgtatgttggtttagcgttgttttgtggataagaaaaatgcttgaccctgaaatattttctactttaaattgtggatgaagaccctatctcccacaaataagttcccatttccttgtctaaagatctttttttaagtgttctgtggctgatttactaacagtaactgccattttttgtctgtgataacagagtgatttgtaaaacagtggttgttttttcattgtgttttcttcgtggattgttttttctgcgggtcatattcataccttctgatgaagttgtacaacaccagcaacattataatggccctgtagctctgaatgctatttgtgtaactgaaaggttgcactctagggtgaaccaagctataaaagcccatgcttaaataaaaattatgtccaaaagcca

SEQ ID NO: 23894 - DNA, 10408 bp, Homo sapiens
  misc_feature (144)..(144): n is a, c, g, or t
cacgcgtgggctcggcgggggcccgctcccaggcccgctcccgagcccgttccgctcccgtccgccttcttctcgccttctctccgcgtggctcctccgtcccggcgtctccaaaactgaatgagcgagcggcgcgtagggcgncggcggcggcggcggcggcggcggcggcggcatggagcgcagtggctgggcccggcagactttcctcctagcgctgttgctgggggcgacgctgagggcgcgcgcggcggctggctattacccccgcttttcgcccttctttttcctgtgcacccaccacggggagctggaaggggatggggagcagggcgaggtgctcatttccctgcatattgcgggcaaccccacctactacgttccgggacaagaataccatgtgacaatttcaacaagcaccttttttgacggcttgctggtgacaggactatacacatctacaagtgttcaggcatcacagagcattggaggttccagtgctttcggatttgggatcatgtctgaccaccagtttggtaaccagtttatgtgcagtgtggtagcctctcacgtgagtcacctgcccacaaccaacctcagtttcatctggattgctccacctgcgggcacaggctgtgtgaatttcatggctacagcaacacaccggggccaggttattttcaaagatgctttagcccagcagttgtgtgaacaaggagctccaacagatgtcactgtgcacccacatctagctgaaatacatagtgacagcattatcctgagagatgactttgactcctaccaccaactgcaattaaatccaaatatatgggttgaatgtaacaactgtgagactggagaacagtgtggcgcgattatgcatggcaatgccgtcaccttctgtgaaccatatggcccacgagaactgattaccacaggccttaatacaacaacagcttctgtcctccaattttccattgggtcaggttcatgtcgctttagttattcagaccccagcatcatcgtgttatatgccaagaataactctgcggactggattcagctagagaaaattagagccccttccaatgtcagcacaatcatccatatcctctaccttcctgaggacgccaaaggggagaatgtccaatttcagtggaagcaggaaaatcttcgtgtaggtgaagtgtatgaagcctgctgggccttagataacatcttgatcatcaattcagctcacagacaagtcgttttagaagatagtctcgacccagtggacacaggcaactggcttttcttcccaggagctacagttaagcatagctgtcagtcagatgggaactccatttatttccatggaaatgaaggcagcgagttcaattttgccaccaccagggatgtagatctttccacagaagatattcaagagcaatggtcagaagaatttgagagccagcctacaggatgggatgtcttgggagctgtcattggtacagaatgtggaacgatagaatcaggcttatcaatggtcttcctcaaagatggagagaggaaattatgcactccatccatggacactaccggttatgggaacctgaggttttactttgtgatgggaggaatttgtgaccctggaaattctcatgaaaatgacataatcctgtatgcaaaaattgaaggaagaaaagagcatataacactggataccctttcctattcctcatataaggttccgtctttggtttctgtggtcatcaatcctgaacttcagactcctgctaccaaattttgtctcaggcaaaagaaccatcaaggacataataggaatgtctgggctgtagactttttccatgtcttgcctgttctcccttctacaatgtctcacatgatacagttttccatcaatctgggatgtggaacgcatcagcctggtaacagtgtcagcttggaattttctaccaaccatgggcgctcctggtccctccttcacactgaatgcttacctgagatctgtgctggaccccacctcccccacagcactgtctactcctctgaaaactacagtgggtggaaccgaataacaattccccttcctaacgcagcactaacccggaacaccaggattcgctggagacaaacaggaccaatccttggaaacatgtgggcaattgataatgtttatattggcccgtcatgtctcaaattctgttctggcagaggacagtgcactagacatggttgcaagtgtgaccctggattttctggcccagcttgtgagatggcatcccagacattcccaatgtttatttctgaaagctttggcagttccaggctctcctcttaccataacttttactctatccgtggtgctgaagtcagctttggttgtggtgtcttggccagtggtaaggccctggttttcaacaaagaagggcggcgtcagctaattacatctttccttgacagctcacaatccaggtttctccagttcacactgagactggggagcaaatctgttctgagcacgtgcagagcccctgatcagcctggtgaaggagttttgctgcattattcttatgataatgggataacttggaaactcctggagcattattcatatctcagctatcatgagcccagaataatctccgtagaactaccaggtgatgcaaagcagtttggaattcagttcagatggtggcaaccgtatcattcttcccagagagaagatgtatgggctattgatgagattatcatgacatctgtgcttttcaacagcattagtcttgactttaccaatcttgtggaggtcactcagtctctgggattctaccttggaaatgttcagccatactgtggccacgactggaccctttgttttacaggagattctaaacttgcctcaagtatgcgctatgtggaaacacaatcaatgcagataggagcatcctatatgattcagttcagtttggtgatgggatgtggccagaaatacaccccacacatggacaaccaggtgaagctggagtactcaaccaaccacggccttacctggcacctcgtccaagaagaatgccttccaagtatgccaagttgtcaggaatttacatcagcaagtatttaccatgccagtgagtttacacagtggaggagagtcatagtgcttcttccccagaaaacttggtccagtgctacccgtttccgctggagccagagctattacacagctcaagacgagtgggctttggacagcatttacattgggcagcagtgccccaacatgtgcagtgggcatggctcatgcgatcatggcatatgcaggtgtgaccaggggtaccaaggcactgaatgccacccagaagctgcccttccgtccacaattatgtcagattttgagaaccagaatggctgggagtctgactggcaagaagttattgggggagaaattgtaaaaccagaacaagggtgtggtgtcatctcttctggatcatctctgtacttcagcaaggctgggaaaagacagctggtgagttgggacctggatacttcttgggtggactttgtccagttctacatccagataggcggagagagtgcttcatgcaacaagcctgacagcagagaggagggcgtcctccttcagtacagcaacaatgggggcatccagtggcacctgctagcagagatgtacttttcagacttcagcaaacccagatttgtctatctggagcttccagctgctgccaagaccccttgcaccaggttccgctggtggcagcccgtgttctcaggggaggactatgaccagtgggcagtcgatgacatcatcattctgtccgagaagcagaagcagatcatcccagttatcaatccaactttacctcagaacttttatgagaagccagcttttgattaccctatgaatcagatgagtgtgtggttgatgttggctaatgaaggaatggttaaaaatgaaaccttctgtgctgccacaccatcagcaatgatatttggaaaatcagatggagatcgatttgcagtaactcgagatttgaccctgaaacctggatatgtgctacagttcaagctaaacataggttgtgccaatcaattcagcagtactgctccagttcttcttcagtactctcatgatgctggtatgtcctggtttctggtgaaagaaggctgttacccggcttctgcaggcaaaggatgcgaaggaaactccagagaactaagtgagcccaccatgtatcacacaggggactttgaagaatggacaagaatcaccattgttattccaaggtctcttgcatccagcaagaccagattccgatggatccaggagagcagctcacagaaaaacgtgcctccatttggtttagatggagtgtacatatccgagccttgtcccagttactgcagtggccatggggactgcatttcaggagtgtgtttctgtgacctgggatatactgctgcacaaggaacctgtgtgtcaaatgtccccaatcacaatgagatgttcgataggtttgaggggaagctcagccctctgtggtacaagataacaggtgcccaggttggaactggctgtggaacacttaacgatggcaaatctctctacttcaatggccctgggaaaagggaagcccggacggtccctctggacaccaggaatatcagacttgttcaattttatatacaaattggaagcaaaacttcaggcattacctgcatcaaaccaagaactagaaatgaagggcttattgttcagtattcaaatgacaatgggatactctggcatttgcttcgagagttggacttcatgtccttcctggaaccacagatcatttccattgacctgccacaggacgcgaagacacctgcaacggcatttcgatggtggcaaccgcaacatgggaagcattcagcccagtgggctttggatgatgttcttataggaatgaatgacagctctcaaactggatttcaagacaaatttgatggctctatagatttgcaagccaactggtatcgaatccaaggaggtcaagttgatattgactgtctctctatggatactgctctgatattcactgaaaacataggaaaacctcgttatgctgagacctgggattttcatgtgtcagcatctacctttttgcagtttgaaatgagcatgggctgtagcaagcccttcagcaactcccacagtgtacagctccagtattctctgaacaatggcaaggactggcatcttgtcaccgaagagtgtgttcctccaaccattggctgtctgcattacacggaaagttcaatttacacctcggaaagattccagaattggaagcggatcactgtctaccttccactctccaccatttctcccaggacccggttcagatggattcaggccaactacactgtgggggctgattcctgggcgattgataatgttgtactggcctcagggtgcccttggatgtgctcaggacgagggatttgtgatgctggacgctgtgtgtgtgaccggggctttggtggaccctattgtgttcctgttgttcctctgccctcgattcttaaagacgatttcaatgggaatttacatcctgacctttggcctgaagtgtatggtgcagagagggggaatctgaatggtgaaaccatcaaatctggaacatctctaatttttaaaggggaaggactaaggatgcttatttcaagagatctagattgtacaaatacaatgtatgtccagttttcacttagatttatagcaaaaagtaccccagagagatctcactctattctgttacaattctccatcagtggaggaatcacttggcacctgatggatgaattttactttcctcaaacaacgaatatacttttcatcaatgttcccttgccatacactgcccaaaccaatgctacaagattcagactctggcaaccttataataacggtaagaaagaagaaatctggattgttgatgacttcattatcgatggaaataatgtaaacaaccctgtgatgctcttggatacatttgattttgggcccagagaagacaattggtttttctatcctggtggtaacatcggtctttattgtccatattcttcaaagggggcacctgaagaagattcagctatggtgtttgtttcaaatgaagttggtgagcattccattaccacccgtgacctaaatgtgaatgagaacaccatcatacaatttgagatcaacgttggctgttcgactgatagctcatccgcggatccagtgagactggaattttcaagggacttcggggcgacctggcaccttctgctgcccctctgctaccacagcagcagccacgtcagctctttatgctccaccgagcaccaccccagcagcacctactacgcaggaaccatgcagggctggaggagggaggtcgtgcactttgggaagctgcacctttgtggatctgtccgtttcagatggtaccagggattttaccctgccggctctcagccagtgacatgggccattgataatgtctacatcggtccccagtgtgaggagatgtgtaatggacaggggagctgtatcaatggaaccaaatgtatatgtgaccctggctactcaggtccaacctgtaaaataagcaccaaaaatcctgattttctcaaagatgatttcgaaggtcagctagaatctgatagattcttattaatgagtggtgggaaaccatctcgaaagtgtggaatcctttctagtggaaacaacctctttttcaatgaagatggcttgcgcatgttgatgacacgagacctggatttatcacatgctagatttgtgcagttcttcatgagactgggatgtggtaaaggcgttcctgaccccaggagtcaacccgtgctcctacagtattctctcaacggtggcctctcgtggagtcttcttcaggagttccttttcagcaattccagcaatgtgggcaggtacattgccctggagatacccttgaaagcccgttctggttctactcgccttcgctggtggcaaccgtctgagaatgggcacttctacagcccctgggttatcgatcagattcttattggaggaaatatttctggtaatacggtcttggaagatgatttcacaacccttgatagtaggaaatggctgcttcacccaggaggcaccaagatgcccgtgtgtggctctactggtgatgccctggtcttcattgaaaaggccagcacccgttacgtggtcagcacagacgttgccgtgaatgaggattccttcctacagatagacttcgctgcctcctgctcagtcacagactcttgttatgcgattgaattggaatactcagtagatcttggattgtcatggcacccattggtaagggactgtctgcctaccaatgtggaatgcagtcgctatcatctgcaacggatcctggtgtcagacactttcaacaagtggactagaatcactctgcctctccctccttataccaggtcccaagccactcgtttccgttggcatcaaccagctccttttgacaagcagcagacatgggcaatagataatgtctatatcggggatggctgcatagacatgtgcagtggccatgggagatgcatccagggaaactgcgtctgtgatgaacagtggggtggcctgtactgtgatgaccccgagacctctcttccaacccaactcaaagacaacttcaatcgagctccatccagtcagaactggctgactgtgaacggagggaaattgagtacagtgtgtggagccgtggcgtcgggaatggctctccatttcagtgggggttgtagtcgattattagtcactgtggatctaaacctcactaatgctgagttcatccaattttacttcatgtatgggtgcctgattacaccaaacaaccgtaaccaaggtgttctcttggaatattctgtcaatggaggcattacctggaacctgctcatggagattttctatgaccagtacagtaagcccggatttgtgaatatccttctccctcctgatgctaaagagattgccactcgcttccgctggtggcagccaagacatgacggcctggatcagaacgactgggccattgacaatgtcctcatctcaggctctgctgaccaaaggaccgttatgctggacaccttcagcagcgccccagtaccccagcacgagcgctcccctgcagatgccggccctgtcgggaggatcgcctttgacatgtttatggaagacaaaacttcagtgaatgagcactggctattccatgatgattgtacagtagaaagattctgtgactcccctgatggtgtgatgctctgtggcagtcatgatggacgggaggtgtatgcagtgacccatgacctgactcccactgaaggctggattatgcaattcaagatctcagttggatgtaaggtgtctgaaaaaattgcccagaatcaaattcatgtgcagtattctactgacttcggtgtgagttggaattatctggtccctcagtgcttgcctgctgacccaaaatgctctggaagtgtttctcagccatctgtattctttccaactaaagggtggaaaaggatcacctacccacttcctgaaagcttagtgggaaatccggtaaggtttaggttctatcagaagtactcagacatgcagtgggcaatcgataatttctacctgggccctggatgcttggacaactgcaggggccatggagattgcttaagggaacagtgcatctgtgatccgggatactcagggccaaactgctacttgacccacactctgaagactttcctgaaggaacgctttgacagtgaagaaatcaaacctgacttatggatgtccttagaaggtggaagtacttgcactgagtgtggaattcttgccgaggacactgcactctattttgggggatccactgtgagacaagcggttacacaagatttggatcttcgaggtgcaaagttcctgcaatactgggggcgcatcggtagtgagaacaacatgacctcttgccatcgtcccatctgccggaaggaaggcgtgctgttggactactctaccgatggaggaattacctggactttgctccatgagatggattaccagaaatacatttctgttagacacgactacatacttcttcctgaagatgccctcaccaacacaactcgacttcgctggtggcagccttttgtgatcagcaatggaattgtggtctctggggtggagcgtgctcagtgggcactggacaacattttgattggtggagcagaaatcaatcccagccaattggtggacacttttgatgatgttaggcgatacccatgaagaatcaaaaagtttattttttttcttccaacatgtgatgtgttgctctccattcttttaaatctcgcactacatctgatatcaggaaatatctgtgaaggacttggtgattacctgaaagcccttctcaagaccgagtgtacaccactttcccacactgtgaactaatgacaagtgacttatttgctcataagtaaatgtcttcatgttgatgtgtccgtgaaagttgtgatctgttgtaatatcagttacagtggcagtattgacaataagaaacagtttaacagaaaaatgaaatttaagcacaaaaaatttaagagattttatgtttaaaatggcatttagcacagtatttaacattcttggtcacaaagctatttaagtggactgtatttcagctatgtctcatgttttatatgattaaattatcattgtttgtcctttatgtattctcttctacaatacaacacattgaaactgtatttacttgttatgttgtaatattttgctgctgaatttggggctacttatattctgcagaaaattaattgaaatacctattcaagaagatagttgtaaagatattgtatctcctttaatatactccttaaaaatgtatgttggtttagcgttgttttgtggataagaaaaatgcttgaccctgaaatattttctactttaaattgtggatgaagaccctatctcccacaaataagttcccatttccttgtctaaagatctttttttaagtgttctgtggctgatttactaacagtaactgccattttttgtctgtgataacagagtgatttgtaaaacagtggttgttttttcattgtgttttcttcgtggattgttttttctgcgggtcatattcataccttctgatgaagttgtacaacaccagcaacattataatggccctgtagctctgaatgctatttgtgtaactgaaaggttgcactctagggtgaaccaagctataaaagcccatgcttaaataaaaattatgtccaaaagcca

SEQ ID NO: 23895 - DNA, 6910 bp, Homo sapiens
  misc_feature (144)..(144): n is a, c, g, or t
cacgcgtgggctcggcgggggcccgctcccaggcccgctcccgagcccgttccgctcccgtccgccttcttctcgccttctctccgcgtggctcctccgtcccggcgtctccaaaactgaatgagcgagcggcgcgtagggcgncggcggcggcggcggcggcggcggcggcggcatggagcgcagtggctgggcccggcagactttcctcctagcgctgttgctgggggcgacgctgagggcgcgcgcggcggctggctattacccccgcttttcgcccttctttttcctgtgcacccaccacggggagctggaaggggatggggagcagggcgaggtgctcatttccctgcatattgcgggcaaccccacctactacgttccgggacaagaataccatgtgacaatttcaacaagcaccttttttgacggcttgctggtgacaggactatacacatctacaagtgttcaggcatcacagagcattggaggttccagtgctttcggatttgggatcatgtctgaccaccagtttggtaaccagtttatgtgcagtgtggtagcctctcacgtgagtcacctgcccacaaccaacctcagtttcatctggattgctccacctgcgggcacaggctgtgtgaatttcatggctacagcaacacaccggggccaggttattttcaaagatgctttagcccagcagttgtgtgaacaaggagctccaacagatgtcactgtgcacccacatctagctgaaatacatagtgacagcattatcctgagagatgactttgactcctaccaccaactgcaattaaatccaaatatatgggttgaatgtaacaactgtgagactggagaacagtgtggcgcgattatgcatggcaatgccgtcaccttctgtgaaccatatggcccacgagaactgattaccacaggccttaatacaacaacagcttctgtcctccaattttccattgggtcaggttcatgtcgctttagttattcagaccccagcatcatcgtgttatatgccaagaataactctgcggactggattcagctagagaaaattagagccccttccaatgtcagcacaatcatccatatcctctaccttcctgaggacgccaaaggggagaatgtccaatttcagtggaagcaggaaaatcttcgtgtaggtgaagtgtatgaagcctgctgggccttagataacatcttgatcatcaattcagctcacagacaagtcgttttagaagatagtctcgacccagtggacacaggcaactggcttttcttcccaggagctacagttaagcatagctgtcagtcagatgggaactccatttatttccatggaaatgaaggcagcgagttcaattttgccaccaccagggatgtagatctttccacagaagatattcaagagcaatggtcagaagaatttgagagccagcctacaggatgggatgtcttgggagctgtcattggtacagaatgtggaacgatagaatcaggcttatcaatggtcttcctcaaagatggagagaggaaattatgcactccatccatggacactaccggttatgggaacctgaggttttactttgtgatgggaggaatttgtgaccctggaaattctcatgaaaatgacataatcctgtatgcaaaaattgaaggaagaaaagagcatataacactggataccctttcctattcctcatataaggttccgtctttggtttctgtggtcatcaatcctgaacttcagactcctgctaccaaattttgtctcaggcaaaagaaccatcaaggacataataggaatgtctgggctgtagactttttccatgtcttgcctgttctcccttctacaatgtctcacatgatacagttttccatcaatctgggatgtggaacgcatcagcctggtaacagtgtcagcttggaattttctaccaaccatgggcgctcctggtccctccttcacactgaatgcttacctgagatctgtgctggaccccacctcccccacagcactgtctactcctctgaaaactacagtgggtggaaccgaataacaattccccttcctaacgcagcactaacccggaacaccaggattcgctggagacaaacaggaccaatccttggaaacatgtgggcaattgataatgtttatattggcccgtcatgtctcaaattctgttctggcagaggacagtgcactagacatggttgcaagtgtgaccctggattttctggcccagcttgtgagatggcatcccagacattcccaatgtttatttctgaaagctttggcagttccaggctctcctcttaccataacttttactctatccgtggtgctgaagtcagctttggttgtggtgtcttggccagtggtaaggccctggttttcaacaaagaagggcggcgtcagctaattacatctttccttgacagctcacaatccaggtttctccagttcacactgagactggggagcaaatctgttctgagcacgtgcagagcccctgatcagcctggtgaaggagttttgctgcattattcttatgataatgggataacttggaaactcctggagcattattcatatctcagctatcatgagcccagaataatctccgtagaactaccaggtgatgcaaagcagtttggaattcagttcagatggtggcaaccgtatcattcttcccagagagaagatgtatgggctattgatgagattatcatgacatctgtgcttttcaacagcattagtcttgactttaccaatcttgtggaggtcactcagtctctgggattctaccttggaaatgttcagccatactgtggccacgactggaccctttgttttacaggagattctaaacttgcctcaagtatgcgctatgtggaaacacaatcaatgcagataggagcatcctatatgattcagttcagtttggtgatgggatgtggccagaaatacaccccacacatggacaaccaggtgaagctggagtactcaaccaaccacggccttacctggcacctcgtccaagaagaatgccttccaagtatgccaagttgtcaggaatttacatcagcaagtatttaccatgccagtgagtttacacagtggaggagagtcatagtgcttcttccccagaaaacttggtccagtgctacccgtttccgctggagccagagctattacacagctcaagacgagtgggctttggacagcatttacattgggcagcagtgccccaacatgtgcagtgggcatggctcatgcgatcatggcatatgcaggtgtgaccaggggtaccaaggcactgaatgccacccagaagctgcccttccgtccacaattatgtcagattttgagaaccagaatggctgggagtctgactggcaagaagttattgggggagaaattgtaaaaccagaacaagggtgtggtgtcatctcttctggatcatctctgtacttcagcaaggctgggaaaagacagctggtgagttgggacctggatacttcttgggtggactttgtccagttctacatccagataggcggagagagtgcttcatgcaacaagcctgacagcagagaggagggcgtcctccttcagtacagcaacaatgggggcatccagtggcacctgctagcagagatgtacttttcagacttcagcaaacccagatttgtctatctggagcttccagctgctgccaagaccccttgcaccaggttccgctggtggcagcccgtgttctcaggggaggactatgaccagtgggcagtcgatgacatcatcattctgtccgagaagcagaagcagatcatcccagttatcaatccaactttacctcagaacttttatgagaagccagcttttgattaccctatgaatcagatgagtgtgtggttgatgttggctaatgaaggaatggttaaaaatgaaaccttctgtgctgccacaccatcagcaatgatatttggaaaatcagatggagatcgatttgcagtaactcgagatttgaccctgaaacctggatatgtgctacagttcaagctaaacataggttgtgccaatcaattcagcagtactgctccagttcttcttcagtactctcatgatgctggtatgtcctggtttctggtgaaagaaggctgttacccggcttctgcaggcaaaggatgcgaaggaaactccagagaactaagtgagcccaccatgtatcacacaggggactttgaagaatggacaagaatcaccattgttattccaaggtctcttgcatccagcaagaccagattccgatggatccaggagagcagctcacagaaaaacgtgcctccatttggtttagatggagtgtacatatccgagccttgtcccagttactgcagtggccatggggactgcatttcaggagtgtgtttctgtgacctgggatatactgctgcacaaggaacctgtgtgtcaaatgtccccaatcacaatgagatgttcgataggtttgaggggaagctcagccctctgtggtacaagataacaggtgcccaggttggaactggctgtggaacacttaacgatggcaaatctctctacttcaatggccctgggaaaagggaagcccggacggtccctctggacaccaggaatatcagacttgttcaattttatatacaaattggaagcaaaacttcaggcattacctgcatcaaaccaagaactagaaatgaagggcttattgttcagtattcaaatgacaatgggatactctggcatttgcttcgagagttggacttcatgtccttcctggaaccacagatcatttccattgacctgccacaggacgcgaagacacctgcaacggcatttcgatggtggcaaccgcaacatgggaagcattcagcccagtgggctttggatgatgttcttataggaatgaatgacagctctcaaactggatttcaagacaaatttgatggctctatagatttgcaagccaactggtatcgaatccaaggaggtcaagttgatattgactgtctctctatggatactgctctgatattcactgaaaacataggaaaacctcgttatgctgagacctgggattttcatgtgtcagcatctacctttttgcagtttgaaatgagcatgggctgtagcaagcccttcagcaactcccacagtgtacagctccagtattctctgaacaatggcaaggactggcatcttgtcaccgaagagtgtgttcctccaaccattggctgtctgcattacacggaaagttcaatttacacctcggaaagattccagaattggaagcggatcactgtctaccttccactctccaccatttctcccaggacccggttcagatggattcaggccaactacactgtgggggctgattcctgggcgattgataatgttgtactggcctcagggtgcccttggatgtgctcaggacgagggatttgtgatgctggacgctgtgtgtgtgaccggggctttggtggaccctattgtgttcctgttgttcctctgccctcgattcttaaagacgatttcaatgggaatttacatcctgacctttggcctgaagtgtatggtgcagagagggggaatctgaatggtgaaaccatcaaatctggaacatctctaatttttaaaggggaaggactaaggatgcttatttcaagagatctagattgtacaaatacaatgtatgtccagttttcacttagatttatagcaaaaagtaccccagagagatctcactctattctgttacaattctccatcagtggaggaatcacttggcacctgatggatgaattttactttcctcaaacaacgaatatacttttcatcaatgttcccttgccatacactgcccaaaccaatgctacaagattcagactctggcaaccttataataacggtaagaaagaagaaatctggattgttgatgacttcattatcgatggaaataatgtaaacaaccctgtgatgctcttggatacatttgattttgggcccagagaagacaattggtttttctatcctggtggtaacatcggtctttattgtccatattcttcaaagggggcacctgaagaagattcagctatggtgtttgtttcaaatgaagttggtgagcattccattaccacccgtgacctaaatgtgaatgagaacaccatcatacaatttgagatcaacgttggctgttcgactgatagctcatccgcggatccagtgagactggaattttcaagggacttcggggcgacctggcaccttctgctgcccctctgctaccacagcagcagccacgtcagctctttatgctccaccgagcaccaccccagcagcacctactacgcaggaaccatgcagggctggaggagggaggtcgtgcactttgggaagctgcacctttgtgggtaaggacccgctgcttgacgccacatttgtttctcctttgacagtttattcctgaagtcatcgttcacttgccactttatcatggggaaatttccacctgacgtttcttcctctgttctcaagcagatcagtggatatttaaaatgtaggacacggagctgacataactactaatttctagttggaaggtagatttgaacaggacaccatgggctgcaccctgtagtggggttcacatccttgtgaaattctgttagatcaattagaacacaacaaaaataaggttttccacgcgttcctcctgcctactcccacctgacaatataaatgcagctagaatattatgactttcaaacacctgcctatgtctgtcatgcagggagagtgtatatagggagcatagaagcccacagaatattcctggtgtctcat

SEQ ID NO: 23896 - DNA, 3717 bp, Homo sapiens
  misc_feature (144)..(144): n is a, c, g, or t
cacgcgtgggctcggcgggggcccgctcccaggcccgctcccgagcccgttccgctcccgtccgccttcttctcgccttctctccgcgtggctcctccgtcccggcgtctccaaaactgaatgagcgagcggcgcgtagggcgncggcggcggcggcggcggcggcggcggcggcatggagcgcagtggctgggcccggcagactttcctcctagcgctgttgctgggggcgacgctgagggcgcgcgcggcggctggctattacccccgcttttcgcccttctttttcctgtgcacccaccacggggagctggaaggggatggggagcagggcgaggtgctcatttccctgcatattgcgggcaaccccacctactacgttccgggacaagaataccatgtgacaatttcaacaagcaccttttttgacggcttgctggtgacaggactatacacatctacaagtgttcaggcatcacagagcattggaggttccagtgctttcggatttgggatcatgtctgaccaccagtttggtaaccagtttatgtgcagtgtggtagcctctcacgtgagtcacctgcccacaaccaacctcagtttcatctggattgctccacctgcgggcacaggctgtgtgaatttcatggctacagcaacacaccggggccaggttattttcaaagatgctttagcccagcagttgtgtgaacaaggagctccaacagatgtcactgtgcacccacatctagctgaaatacatagtgacagcattatcctgagagatgactttgactcctaccaccaactgcaattaaatccaaatatatgggttgaatgtaacaactgtgagactggagaacagtgtggcgcgattatgcatggcaatgccgtcaccttctgtgaaccatatggcccacgagaactgattaccacaggccttaatacaacaacagcttctgtcctccaattttccattgggtcaggttcatgtcgctttagttattcagaccccagcatcatcgtgttatatgccaagaataactctgcggactggattcagctagagaaaattagagccccttccaatgtcagcacaatcatccatatcctctaccttcctgaggacgccaaaggggagaatgtccaatttcagtggaagcaggaaaatcttcgtgtaggtgaagtgtatgaagcctgctgggccttagataacatcttgatcatcaattcagctcacagacaagtcgttttagaagatagtctcgacccagtggacacaggcaactggcttttcttcccaggagctacagttaagcatagctgtcagtcagatgggaactccatttatttccatggaaatgaaggcagcgagttcaattttgccaccaccagggatgtagatctttccacagaagatattcaagagcaatggtcagaagaatttgagagccagcctacaggatgggatgtcttgggagctgtcattggtacagaatgtggaacgatagaatcaggcttatcaatggtcttcctcaaagatggagagaggaaattatgcactccatccatggacactaccggttatgggaacctgaggttttactttgtgatgggaggaatttgtgaccctggaaattctcatgaaaatgacataatcctgtatgcaaaaattgaaggaagaaaagagcatataacactggataccctttcctattcctcatataaggttccgtctttggtttctgtggtcatcaatcctgaacttcagactcctgctaccaaattttgtctcaggcaaaagaaccatcaaggacataataggaatgtctgggctgtagactttttccatgtcttgcctgttctcccttctacaatgtctcacatgatacagttttccatcaatctgggatgtggaacgcatcagcctggtaacagtgtcagcttggaattttctaccaaccatgggcgctcctggtccctccttcacactgaatgcttacctgagatctgtgctggaccccacctcccccacagcactgtctactcctctgaaaactacagtgggtggaaccgaataacaattccccttcctaacgcagcactaacccggaacaccaggattcgctggagacaaacaggaccaatccttggaaacatgtgggcaattgataatgtttatattggcccgtcatgtctcaaattctgttctggcagaggacagtgcactagacatggttgcaagtgtgaccctggattttctggcccagcttgtgagatggcatcccagacattcccaatgtttatttctgaaagctttggcagttccaggctctcctcttaccataacttttactctatccgtggtgctgaagtcagctttggttgtggtgtcttggccagtggtaaggccctggttttcaacaaagaagggcggcgtcagctaattacatctttccttgacagctcacaatccaggtttctccagttcacactgagactggggagcaaatctgttctgagcacgtgcagagcccctgatcagcctggtgaaggagttttgctgcattattcttatgataatgggataacttggaaactcctggagcattattcatatctcagctatcatgagcccagaataatctccgtagaactaccaggtgatgcaaagcagtttggaattcagttcagatggtggcaaccgtatcattcttcccagagagaagatgtatgggctattgatgagattatcatgacatctgtgcttttcaacagcattagtcttgactttaccaatcttgtggaggtcactcagtctctgggattctaccttggaaatgttcagccatactgtggccacgactggaccctttggctggagtgcaatggtgcgatctcaactcactgcaacctctgcctcccgggctcaaacgacacattttctatttgatagcctcagatgcttgtttttacagatgttctttcttagtcctggagactttaaagaagataaacgattaaagcaaagaaggtgtaaagatgtagaacaaaatgagatttcttagaattttatgcttctgaacatttaaattgacctgaattgacagtaattcaaactgatcatgtaccgtaaactatatccttcaagtttgtatagaagagttttttcctaacacttctaatataacaaagaatcatatcatgaatgcaagtcctgtatcatgtttattttcataaatagttagcatctgctcagataaatgcaaaagttgctgagcattttaatttaacacttgcattgaatgcatgataacagcagtttaatttctgtgctttgatcaaaaccctaagaacaatatcccttcacacaagtctgatgaatattcttaacccaccaccgctttaattggtggagatacatttactttgtgaaagtacaatcacagtaattatagaaaaaccataagaaaacataaataattgtacaatccccatgggcaccttgagcagcaccataggagttttattaacaaccacatgtgagcaatcgatttgactttctgatcttctctgaagcaaaaaggagttgtcttggttatgaaacaacagagagtataccctggtggtgataatgagactagagaaacacattaaccactttaataaggacatgaaaaatgcttgcttctcattaaagtgaaacaacatggaaga

SEQ ID NO: 23897 - DNA, 565 bp, Homo sapiens
gaaggcacttcccatgaagaaaactggagtttttaccctaatgctgtaaggacagcaggattttgtggcaatccatcctttcacctctattggccaaataaaaagaaggacaagactcacaatgctctctcctcccgagaactcattatacagccaggatacatgatgcagtttaaagtaaggaaaagtggctctttaaaacagaaagtagcattgcatttggggcctcgagggagaatggttagtcagacaactataaggaaatgactgatattattcattaaaaaagactttatcttatgaataaaagaggtcatcttttgcaaagacctttattcaagtatgattacttgaggatagataaaatccctgaaaatgttgggacatagcaagaaatgtaactattaggctggtgcaaaagtaattgcaggccgggtgcagtggaaccatgcctataatcccaccactttgggaggctggggcaggaggatcacttgaggccaagaggccaggagctccagactagcctggccaacacggcaaaaccttgtctctataaaaaaat

SEQ ID NO: 23898 - DNA, 278 bp, Homo sapiens
gaaaacaatcatttaggaaacagcatctttaaaaaattttacactgtttttacagttgtttaatgtacttaaccagagttgaaaatttcatttgatttgttatctttaccctccccaccttttgtgtgtgcttgttctggttttattagtgtcagcttggaattttctaccaaccatgggcgctcctggtccctccttcacactgaatgcttacctgagatctgtgctggaccccacctcccccacagcactgtctactcctctgaaaactacagtgg

SEQ ID NO: 23899 - DNA, 11540 bp, Homo sapiens
  misc_feature (144)..(144): n is a, c, g, or t
cacgcgtgggctcggcgggggcccgctcccaggcccgctcccgagcccgttccgctcccgtccgccttcttctcgccttctctccgcgtggctcctccgtcccggcgtctccaaaactgaatgagcgagcggcgcgtagggcgncggcggcggcggcggcggcggcggcggcggcatggagcgcagtggctgggcccggcagactttcctcctagcgctgttgctgggggcgacgctgagggcgcgcgcggcggctggctattacccccgcttttcgcccttctttttcctgtgcacccaccacggggagctggaaggggatggggagcagggcgaggtgctcatttccctgcatattgcgggcaaccccacctactacgttccgggacaagaataccatgtgacaatttcaacaagcaccttttttgacggcttgctggtgacaggactatacacatctacaagtgttcaggcatcacagagcattggaggttccagtgctttcggatttgggatcatgtctgaccaccagtttggtaaccagtttatgtgcagtgtggtagcctctcacgtgagtcacctgcccacaaccaacctcagtttcatctggattgctccacctgcgggcacaggctgtgtgaatttcatggctacagcaacacaccggggccaggttattttcaaagatgctttagcccagcagttgtgtgaacaaggagctccaacagatgtcactgtgcacccacatctagctgaaatacatagtgacagcattatcctgagagatgactttgactcctaccaccaactgcaattaaatccaaatatatgggttgaatgtaacaactgtgagactggagaacagtgtggcgcgattatgcatggcaatgccgtcaccttctgtgaaccatatggcccacgagaactgattaccacaggccttaatacaacaacagcttctgtcctccaattttccattgggtcaggttcatgtcgctttagttattcagaccccagcatcatcgtgttatatgccaagaataactctgcggactggattcagctagagaaaattagagccccttccaatgtcagcacaatcatccatatcctctaccttcctgaggacgccaaaggggagaatgtccaatttcagtggaagcaggaaaatcttcgtgtaggtgaagtgtatgaagcctgctgggccttagataacatcttgatcatcaattcagctcacagacaagtcgttttagaagatagtctcgacccagtggacacaggcaactggcttttcttcccaggagctacagttaagcatagctgtcagtcagatgggaactccatttatttccatggaaatgaaggcagcgagttcaattttgccaccaccagggatgtagatctttccacagaagatattcaagagcaatggtcagaagaatttgagagccagcctacaggatgggatgtcttgggagctgtcattggtacagaatgtggaacgatagaatcaggcttatcaatggtcttcctcaaagatggagagaggaaattatgcactccatccatggacactaccggttatgggaacctgaggttttactttgtgatgggaggaatttgtgaccctggaaattctcatgaaaatgacataatcctgtatgcaaaaattgaaggaagaaaagagcatataacactggataccctttcctattcctcatataaggttccgtctttggtttctgtggtcatcaatcctgaacttcagactcctgctaccaaattttgtctcaggcaaaagaaccatcaaggacataataggaatgtctgggctgtagactttttccatgtcttgcctgttctcccttctacaatgtctcacatgatacagttttccatcaatctgggatgtggaacgcatcagcctggtaacagtgtcagcttggaattttctaccaaccatgggcgctcctggtccctccttcacactgaatgcttacctgagatctgtgctggaccccacctcccccacagcactgtctactcctctgaaaactacagtgggtggaaccgaataacaattccccttcctaacgcagcactaacccggaacaccaggattcgctggagacaaacaggaccaatccttggaaacatgtgggcaattgataatgtttatattggcccgtcatgtctcaaattctgttctggcagaggacagtgcactagacatggttgcaagtgtgaccctggattttctggcccagcttgtgagatggcatcccagacattcccaatgtttatttctgaaagctttggcagttccaggctctcctcttaccataacttttactctatccgtggtgctgaagtcagctttggttgtggtgtcttggccagtggtaaggccctggttttcaacaaagaagggcggcgtcagctaattacatctttccttgacagctcacaatccaggtttctccagttcacactgagactggggagcaaatctgttctgagcacgtgcagagcccctgatcagcctggtgaaggagttttgctgcattattcttatgataatgggataacttggaaactcctggagcattattcatatctcagctatcatgagcccagaataatctccgtagaactaccaggtgatgcaaagcagtttggaattcagttcagatggtggcaaccgtatcattcttcccagagagaagatgtatgggctattgatgagattatcatgacatctgtgcttttcaacagcattagtcttgactttaccaatcttgtggaggtcactcagtctctgggattctaccttggaaatgttcagccatactgtggccacgactggaccctttgttttacaggagattctaaacttgcctcaagtatgcgctatgtggaaacacaatcaatgcagataggagcatcctatatgattcagttcagtttggtgatgggatgtggccagaaatacaccccacacatggacaaccaggtgaagctggagtactcaaccaaccacggccttacctggcacctcgtccaagaagaatgccttccaagtatgccaagttgtcaggaatttacatcagcaagtatttaccatgccagtgagtttacacagtggaggagagtcatagtgcttcttccccagaaaacttggtccagtgctacccgtttccgctggagccagagctattacacagctcaagacgagtgggctttggacagcatttacattgggcagcagtgccccaacatgtgcagtgggcatggctcatgcgatcatggcatatgcaggtgtgaccaggggtaccaaggcactgaatgccacccagaagctgcccttccgtccacaattatgtcagattttgagaaccagaatggctgggagtctgactggcaagaagttattgggggagaaattgtaaaaccagaacaagggtgtggtgtcatctcttctggatcatctctgtacttcagcaaggctgggaaaagacagctggtgagttgggacctggatacttcttgggtggactttgtccagttctacatccagataggcggagagagtgcttcatgcaacaagcctgacagcagagaggagggcgtcctccttcagtacagcaacaatgggggcatccagtggcacctgctagcagagatgtacttttcagacttcagcaaacccagatttgtctatctggagcttccagctgctgccaagaccccttgcaccaggttccgctggtggcagcccgtgttctcaggggaggactatgaccagtgggcagtcgatgacatcatcattctgtccgagaagcagaagcagatcatcccagttatcaatccaactttacctcagaacttttatgagaagccagcttttgattaccctatgaatcagatgagtgtgtggttgatgttggctaatgaaggaatggttaaaaatgaaaccttctgtgctgccacaccatcagcaatgatatttggaaaatcagatggagatcgatttgcagtaactcgagatttgaccctgaaacctggatatgtgctacagttcaagctaaacataggttgtgccaatcaattcagcagtactgctccagttcttcttcagtactctcatgatgctggtatgtcctggtttctggtgaaagaaggctgttacccggcttctgcaggcaaaggatgcgaaggaaactccagagaactaagtgagcccaccatgtatcacacaggggactttgaagaatggacaagaatcaccattgttattccaaggtctcttgcatccagcaagaccagattccgatggatccaggagagcagctcacagaaaaacgtgcctccatttggtttagatggagtgtacatatccgagccttgtcccagttactgcagtggccatggggactgcatttcaggagtgtgtttctgtgacctgggatatactgctgcacaaggaacctgtgtgtcaaatgtccccaatcacaatgagatgttcgataggtttgaggggaagctcagccctctgtggtacaagataacaggtgcccaggttggaactggctgtggaacacttaacgatggcaaatctctctacttcaatggccctgggaaaagggaagcccggacggtccctctggacaccaggaatatcagacttgttcaattttatatacaaattggaagcaaaacttcaggcattacctgcatcaaaccaagaactagaaatgaagggcttattgttcagtattcaaatgacaatgggatactctggcatttgcttcgagagttggacttcatgtccttcctggaaccacagatcatttccattgacctgccacaggacgcgaagacacctgcaacggcatttcgatggtggcaaccgcaacatgggaagcattcagcccagtgggctttggatgatgttcttataggaatgaatgacagctctcaaactggatttcaagacaaatttgatggctctatagatttgcaagccaactggtatcgaatccaaggaggtcaagttgatattgactgtctctctatggatactgctctgatattcactgaaaacataggaaaacctcgttatgctgagacctgggattttcatgtgtcagcatctacctttttgcagtttgaaatgagcatgggctgtagcaagcccttcagcaactcccacagtgtacagctccagtattctctgaacaatggcaaggactggcatcttgtcaccgaagagtgtgttcctccaaccattggctgtctgcattacacggaaagttcaatttacacctcggaaagattccagaattggaagcggatcactgtctaccttccactctccaccatttctcccaggacccggttcagatggattcaggccaactacactgtgggggctgattcctgggcgattgataatgttgtactggcctcagggtgcccttggatgtgctcaggacgagggatttgtgatgctggacgctgtgtgtgtgaccggggctttggtggaccctattgtgttcctgttgttcctctgccctcgattcttaaagacgatttcaatgggaatttacatcctgacctttggcctgaagtgtatggtgcagagagggggaatctgaatggtgaaaccatcaaatctggaacatctctaatttttaaaggggaaggactaaggatgcttatttcaagagatctagattgtacaaatacaatgtatgtccagttttcacttagatttatagcaaaaagtaccccagagagatctcactctattctgttacaattctccatcagtggaggaatcacttggcacctgatggatgaattttactttcctcaaacaacgaatatacttttcatcaatgttcccttgccatacactgcccaaaccaatgctacaagattcagactctggcaaccttataataacggtaagaaagaagaaatctggattgttgatgacttcattatcgatggaaataatgtaaacaaccctgtgatgctcttggatacatttgattttgggcccagagaagacaattggtttttctatcctggtggtaacatcggtctttattgtccatattcttcaaagggggcacctgaagaagattcagctatggtgtttgtttcaaatgaagttggtgagcattccattaccacccgtgacctaaatgtgaatgagaacaccatcatacaatttgagatcaacgttggctgttcgactgatagctcatccgcggatccagtgagactggaattttcaagggacttcggggcgacctggcaccttctgctgcccctctgctaccacagcagcagccacgtcagctctttatgctccaccgagcaccaccccagcagcacctactacgcaggaaccatgcagggctggaggagggaggtcgtgcactttgggaagctgcacctttgtggatctgtccgtttcagatggtaccagggattttaccctgccggctctcagccagtgacatgggccattgataatgtctacatcggtccccagtgtgaggagatgtgtaatggacaggggagctgtatcaatggaaccaaatgtatatgtgaccctggctactcaggtccaacctgtaaaataagcaccaaaaatcctgattttctcaaagatgatttcgaaggtcagctagaatctgatagattcttattaatgagtggtgggaaaccatctcgaaagtgtggaatcctttctagtggaaacaacctctttttcaatgaagatggcttgcgcatgttgatgacacgagacctggatttatcacatgctagatttgtgcagttcttcatgagactgggatgtggtaaaggcgttcctgaccccaggagtcaacccgtgctcctacagtattctctcaacggtggcctctcgtggagtcttcttcaggagttccttttcagcaattccagcaatgtgggcaggtacattgccctggagatacccttgaaagcccgttctggttctactcgccttcgctggtggcaaccgtctgagaatgggcacttctacagcccctgggttatcgatcagattcttattggaggaaatatttctggtaatacggtcttggaagatgatttcacaacccttgatagtaggaaatggctgcttcacccaggaggcaccaagatgcccgtgtgtggctctactggtgatgccctggtcttcattgaaaaggccagcacccgttacgtggtcagcacagacgttgccgtgaatgaggattccttcctacagatagacttcgctgcctcctgctcagtcacagactcttgttatgcgattgaattggaatactcagtagatcttggattgtcatggcacccattggtaagggactgtctgcctaccaatgtggaatgcagtcgctatcatctgcaacggatcctggtgtcagacactttcaacaagtggactagaatcactctgcctctccctccttataccaggtcccaagccactcgtttccgttggcatcaaccagctccttttgacaagcagcagacatgggcaatagataatgtctatatcggggatggctgcatagacatgtgcagtggccatgggagatgcatccagggaaactgcgtctgtgatgaacagtggggtggcctgtactgtgatgaccccgagacctctcttccaacccaactcaaagacaacttcaatcgagctccatccagtcagaactggctgactgtgaacggagggaaattgagtacagtgtgtggagccgtggcgtcgggaatggctctccatttcagtgggggttgtagtcgattattagtcactgtggatctaaacctcactaatgctgagttcatccaattttacttcatgtatgggtgcctgattacaccaaacaaccgtaaccaaggtgttctcttggaatattctgtcaatggaggcattacctggaacctgctcatggagattttctatgaccagtacagtaagcccggatttgtgaatatccttctccctcctgatgctaaagagattgccactcgcttccgctggtggcagccaagacatgacggcctggatcagaacgactgggccattgacaatgtcctcatctcaggctctgctgaccaaaggaccgttatgctggacaccttcagcagcgccccagtaccccagcacgagcgctcccctgcagatgccggccctgtcgggaggatcgcctttgacatgtttatggaagacaaaacttcagtgaatgagcactggctattccatgatgattgtacagtagaaagattctgtgactcccctgatggtgtgatgctctgtggcagtcatgatggacgggaggtgtatgcagtgacccatgacctgactcccactgaaggctggattatgcaattcaagatctcagttggatgtaaggtgtctgaaaaaattgcccagaatcaaattcatgtgcagtattctactgacttcggtgtgagttggaattatctggtccctcagtgcttgcctgctgacccaaaatgctctggaagtgtttctcagccatctgtattctttccaactaaagggtggaaaaggatcacctacccacttcctgaaagcttagtgggaaatccggtaaggtttaggttctatcagaagtactcagacatgcagtgggcaatcgataatttctacctgggccctggatgcttggacaactgcaggggccatggagattgcttaagggaacagtgcatctgtgatccgggatactcagggccaaactgctacttgacccacactctgaagactttcctgaaggaacgctttgacagtgaagaaatcaaacctgacttatggatgtccttagaaggtggaagtacttgcactgagtgtggaattcttgccgaggacactgcactctattttgggggatccactgtgagacaagcggttacacaagatttggatcttcgaggtgcaaagttcctgcaatactgggggcgcatcggtagtgagaacaacatgacctcttgccatcgtcccatctgccggaaggaaggcgtgctgttggactactctaccgatggaggaattacctggactttgctccatgagatggattaccagaaatacatttctgttagacacgactacatacttcttcctgaagatgccctcaccaacacaactcgacttcgctggtggcagccttttgtgatcagcaatggaattgtggtctctggggtggagcgtgctcagtgggcactggacaacattttgattggtggagcagaaatcaatcccagccaattggtggacacttttgatgatgaaggcacttcccatgaagaaaactggagtttttaccctaatgctgtaaggacagcaggattttgtggcaatccatcctttcacctctattggccaaataaaaagaaggacaagactcacaatgctctctcctcccgagaactcattatacagccaggatacatgatgcagtttaaaattgtggtgggttgtgaagccacttcttgtggtgaccttcattccgtaatgctggaatacactaaggatgcaagatcggattcctggcagctcgtacagacccagtgccttccttcctcttctaacagcattggctgctcccctttccagttccatgaagccaccatctacaactctgtcaacagctcaagctggtgcaacacagttccgctggatccagaagggagaagaaactgagaagcaaagctgggcaattgaccacgtgtacattggagaggcttgccccaagctctgcagcgggcacggatactgcacgaccggtgccatctgcatctgcgacgagagcttccaaggtgatgactgctctgttttcagtcacgaccttcccagttatattaaagataattttgagtccgcaagagtcaccgaggcaaactgggagaccattcaaggtggagtcataggaagtggctgtgggcagctggccccctacgcccatggagactcactgtactttaatggctgtcagatcaggcaagcagctaccaagcctctggatctcactcgagcaagcaaaatcatgtttgttttgcaaattgggagcatgtcgcagacggacagctgcaacagtgacctgagtggcccccacgctgtggacaaggcagtgctgctgcaatacagcgtcaacaacgggatcacctggcatgtcatcgcccagcaccagccaaaggacttcacacaagctcagagagtgtcttacaatgtccccctggaggcacggatgaaaggagtcttactgcgctggtggcaaccacgccacaatggaacaggtcatgatcaatgggctttggaccatgtggaggtcgtcctagtaagcactcgcaaacaaaattacatgatgaatttttcacgacaacatgggctcagacatttctacaacagaagacgaaggtcacttaggcgatacccatgaagaatcaaaaagtttattttttttcttccaacatgtgatgtgttgctctccattcttttaaatctcgcactacatctgatatcaggaaatatctgtgaaggacttggtgattacctgaaagcccttctcaagaccgagtgtacaccactttcccacactgtgaactaatgacaagtgacttatttgctcataagtaaatgtcttcatgttgatgtgtccgtgaaagttgtgatctgttgtaatatcagttacagtggcagtattgacaataagaaacagtttaacagaaaaatgaaatttaagcacaaaaaatttaagagattttatgtttaaaatggcatttagcacagtatttaacattcttggtcacaaagctatttaagtggactgtatttcagctatgtctcatgttttatatgattaaattatcattgtttgtcctttatgtattctcttctacaatacaacacattgaaactgtatttacttgttatgttgtaatattttgctgctgaatttggggctacttatattctgcagaaaattaattgaaatacctattcaagaagatagttgtaaagatattgtatctcctttaatatactccttaaaaatgtatgttggtttagcgttgttttgtggataagaaaaatgcttgaccctgaaatattttctactttaaattgtggatgaagaccctatctcccacaaataagttcccatttccttgtctaaagatctttttttaagtgttctgtggctgatttactaacagtaactgccattttttgtctgtgataacagagtgatttgtaaaacagtggttgttttttcattgtgttttcttcgtggattgttttttctgcgggtcatattcataccttctgatgaagttgtacaacaccagcaacattataatggccctgtagctctgaatgctatttgtgtaactgaaaggttgcactctagggtgaaccaagctataaaagcccatgcttaaataaaaattatgtccaaaagcca

SEQ ID NO: 23900 - DNA, 2268 bp, Homo sapiens
tccaattttcctcaagagaataatatgccatattgcttccaattttccttaacagaaggcacttcccatgaagaaaactggagtttttaccctaatgctgtaaggacagcaggattttgtggcaatccatcctttcacctctattggccaaataaaaagaaggacaagactcacaatgctctctcctcccgagaactcattatacagccaggatacatgatgcagtttaaaattgtggtgggttgtgaagccacttcttgtggtgaccttcattccgtaatgctggaatacactaaggatgcaagatcggattcctggcagctcgtacagacccagtgccttccttcctcttctaacagcattggctgctcccctttccagttccatgaagccaccatctacaactctgtcaacagctcaagctggaaaagaatcaccatccagctgcctgaccatgtctcctctagtgcaacacagttccgctggatccagaagggagaagaaactgagaagcaaagctgggcaattgaccacgtgtacattggagaggcttgccccaagctctgcagcgggcacggatactgcacgaccggtgccatctgcatctgcgacgagagcttccaaggtgatgactgctctgttttcagtcacgaccttcccagttatattaaagataattttgagtccgcaagagtcaccgaggcaaactgggagaccattcaaggtggagtcataggaagtggctgtgggcagctggccccctacgcccatggagactcactgtactttaatggctgtcagatcaggcaagcagctaccaagcctctggatctcactcgagcaagcaaaatcatgtttgttttgcaaattgggagcatgtcgcagacggacagctgcaacagtgacctgagtggcccccacgctgtggacaaggcagtgctgctgcaatacagcgtcaacaacgggatcacctggcatgtcatcgcccagcaccagccaaaggacttcacacaagctcagagagtgtcttacaatgtccccctggaggcacggatgaaaggagtcttactgcgctggtggcaaccacgccacaatggaacaggtcatgatcaatgggctttggaccatgtggaggtcgtcctagtaagcactcgcaaacaaaattacatgatgaatttttcacgacaacatgggctcagacatttctacaacagaagacgaaggtcacttaggcgatacccatgaagaatcaaaaagtttattttttttcttccaacatgtgatgtgttgctctccattcttttaaatctcgcactacatctgatatcaggaaatatctgtgaaggacttggtgattacctgaaagcccttctcaagaccgagtgtacaccactttcccacactgtgaactaatgacaagtgacttatttgctcataagtaaatgtcttcatgttgatgtgtccgtgaaagttgtgatctgttgtaatatcagttacagtggcagtattgacaataagaaacagtttaacagaaaaatgaaatttaagcacaaaaaatttaagagattttatgtttaaaatggcatttagcacagtatttaacattcttggtcacaaagctatttaagtggactgtatttcagctatgtctcatgttttatatgattaaattatcattgtttgtcctttatgtattctcttctacaatacaacacattgaaactgtatttacttgttatgttgtaatattttgctgctgaatttggggctacttatattctgcagaaaattaattgaaatacctattcaagaagatagttgtaaagatattgtatctcctttaatatactccttaaaaatgtatgttggtttagcgttgttttgtggataagaaaaatgcttgaccctgaaatattttctactttaaattgtggatgaagaccctatctcccacaaataagttcccatttccttgtctaaagatctttttttaagtgttctgtggctgatttactaacagtaactgccattttttgtctgtgataacagagtgatttgtaaaacagtggttgttttttcattgtgttttcttcgtggattgttttttctgcgggtcatattcataccttctgatgaagttgtacaacaccagcaacattataatggccctgtagctctgaatgctatttgtgtaactgaaaggttgcactctagggtgaaccaagctataaaagcccatgcttaaataaaaattatgtccaaaagcca

SEQ ID NO: 23901 - DNA, 11640 bp, Homo sapiens
  misc_feature (144)..(144): n is a, c, g, or t
cacgcgtgggctcggcgggggcccgctcccaggcccgctcccgagcccgttccgctcccgtccgccttcttctcgccttctctccgcgtggctcctccgtcccggcgtctccaaaactgaatgagcgagcggcgcgtagggcgncggcggcggcggcggcggcggcggcggcggcatggagcgcagtggctgggcccggcagactttcctcctagcgctgttgctgggggcgacgctgagggcgcgcgcggcggctggctattacccccgcttttcgcccttctttttcctgtgcacccaccacggggagctggaaggggatggggagcagggcgaggtgctcatttccctgcatattgcgggcaaccccacctactacgttccgggacaagaataccatgtgacaatttcaacaagcaccttttttgacggcttgctggtgacaggactatacacatctacaagtgttcaggcatcacagagcattggaggttccagtgctttcggatttgggatcatgtctgaccaccagtttggtaaccagtttatgtgcagtgtggtagcctctcacgtgagtcacctgcccacaaccaacctcagtttcatctggattgctccacctgcgggcacaggctgtgtgaatttcatggctacagcaacacaccggggccaggttattttcaaagatgctttagcccagcagttgtgtgaacaaggagctccaacagatgtcactgtgcacccacatctagctgaaatacatagtgacagcattatcctgagagatgactttgactcctaccaccaactgcaattaaatccaaatatatgggttgaatgtaacaactgtgagactggagaacagtgtggcgcgattatgcatggcaatgccgtcaccttctgtgaaccatatggcccacgagaactgattaccacaggccttaatacaacaacagcttctgtcctccaattttccattgggtcaggttcatgtcgctttagttattcagaccccagcatcatcgtgttatatgccaagaataactctgcggactggattcagctagagaaaattagagccccttccaatgtcagcacaatcatccatatcctctaccttcctgaggacgccaaaggggagaatgtccaatttcagtggaagcaggaaaatcttcgtgtaggtgaagtgtatgaagcctgctgggccttagataacatcttgatcatcaattcagctcacagacaagtcgttttagaagatagtctcgacccagtggacacaggcaactggcttttcttcccaggagctacagttaagcatagctgtcagtcagatgggaactccatttatttccatggaaatgaaggcagcgagttcaattttgccaccaccagggatgtagatctttccacagaagatattcaagagcaatggtcagaagaatttgagagccagcctacaggatgggatgtcttgggagctgtcattggtacagaatgtggaacgatagaatcaggcttatcaatggtcttcctcaaagatggagagaggaaattatgcactccatccatggacactaccggttatgggaacctgaggttttactttgtgatgggaggaatttgtgaccctggaaattctcatgaaaatgacataatcctgtatgcaaaaattgaaggaagaaaagagcatataacactggataccctttcctattcctcatataaggttccgtctttggtttctgtggtcatcaatcctgaacttcagactcctgctaccaaattttgtctcaggcaaaagaaccatcaaggacataataggaatgtctgggctgtagactttttccatgtcttgcctgttctcccttctacaatgtctcacatgatacagttttccatcaatctgggatgtggaacgcatcagcctggtaacagtgtcagcttggaattttctaccaaccatgggcgctcctggtccctccttcacactgaatgcttacctgagatctgtgctggaccccacctcccccacagcactgtctactcctctgaaaactacagtgggtggaaccgaataacaattccccttcctaacgcagcactaacccggaacaccaggattcgctggagacaaacaggaccaatccttggaaacatgtgggcaattgataatgtttatattggcccgtcatgtctcaaattctgttctggcagaggacagtgcactagacatggttgcaagtgtgaccctggattttctggcccagcttgtgagatggcatcccagacattcccaatgtttatttctgaaagctttggcagttccaggctctcctcttaccataacttttactctatccgtggtgctgaagtcagctttggttgtggtgtcttggccagtggtaaggccctggttttcaacaaagaagggcggcgtcagctaattacatctttccttgacagctcacaatccaggtttctccagttcacactgagactggggagcaaatctgttctgagcacgtgcagagcccctgatcagcctggtgaaggagttttgctgcattattcttatgataatgggataacttggaaactcctggagcattattcatatctcagctatcatgagcccagaataatctccgtagaactaccaggtgatgcaaagcagtttggaattcagttcagatggtggcaaccgtatcattcttcccagagagaagatgtatgggctattgatgagattatcatgacatctgtgcttttcaacagcattagtcttgactttaccaatcttgtggaggtcactcagtctctgggattctaccttggaaatgttcagccatactgtggccacgactggaccctttgttttacaggagattctaaacttgcctcaagtatgcgctatgtggaaacacaatcaatgcagataggagcatcctatatgattcagttcagtttggtgatgggatgtggccagaaatacaccccacacatggacaaccaggtgaagctggagtactcaaccaaccacggccttacctggcacctcgtccaagaagaatgccttccaagtatgccaagttgtcaggaatttacatcagcaagtatttaccatgccagtgagtttacacagtggaggagagtcatagtgcttcttccccagaaaacttggtccagtgctacccgtttccgctggagccagagctattacacagctcaagacgagtgggctttggacagcatttacattgggcagcagtgccccaacatgtgcagtgggcatggctcatgcgatcatggcatatgcaggtgtgaccaggggtaccaaggcactgaatgccacccagaagctgcccttccgtccacaattatgtcagattttgagaaccagaatggctgggagtctgactggcaagaagttattgggggagaaattgtaaaaccagaacaagggtgtggtgtcatctcttctggatcatctctgtacttcagcaaggctgggaaaagacagctggtgagttgggacctggatacttcttgggtggactttgtccagttctacatccagataggcggagagagtgcttcatgcaacaagcctgacagcagagaggagggcgtcctccttcagtacagcaacaatgggggcatccagtggcacctgctagcagagatgtacttttcagacttcagcaaacccagatttgtctatctggagcttccagctgctgccaagaccccttgcaccaggttccgctggtggcagcccgtgttctcaggggaggactatgaccagtgggcagtcgatgacatcatcattctgtccgagaagcagaagcagatcatcccagttatcaatccaactttacctcagaacttttatgagaagccagcttttgattaccctatgaatcagatgagtgtgtggttgatgttggctaatgaaggaatggttaaaaatgaaaccttctgtgctgccacaccatcagcaatgatatttggaaaatcagatggagatcgatttgcagtaactcgagatttgaccctgaaacctggatatgtgctacagttcaagctaaacataggttgtgccaatcaattcagcagtactgctccagttcttcttcagtactctcatgatgctggtatgtcctggtttctggtgaaagaaggctgttacccggcttctgcaggcaaaggatgcgaaggaaactccagagaactaagtgagcccaccatgtatcacacaggggactttgaagaatggacaagaatcaccattgttattccaaggtctcttgcatccagcaagaccagattccgatggatccaggagagcagctcacagaaaaacgtgcctccatttggtttagatggagtgtacatatccgagccttgtcccagttactgcagtggccatggggactgcatttcaggagtgtgtttctgtgacctgggatatactgctgcacaaggaacctgtgtgtcaaatgtccccaatcacaatgagatgttcgataggtttgaggggaagctcagccctctgtggtacaagataacaggtgcccaggttggaactggctgtggaacacttaacgatggcaaatctctctacttcaatggccctgggaaaagggaagcccggacggtccctctggacaccaggaatatcagacttgttcaattttatatacaaattggaagcaaaacttcaggcattacctgcatcaaaccaagaactagaaatgaagggcttattgttcagtattcaaatgacaatgggatactctggcatttgcttcgagagttggacttcatgtccttcctggaaccacagatcatttccattgacctgccacaggacgcgaagacacctgcaacggcatttcgatggtggcaaccgcaacatgggaagcattcagcccagtgggctttggatgatgttcttataggaatgaatgacagctctcaaactggatttcaagacaaatttgatggctctatagatttgcaagccaactggtatcgaatccaaggaggtcaagttgatattgactgtctctctatggatactgctctgatattcactgaaaacataggaaaacctcgttatgctgagacctgggattttcatgtgtcagcatctacctttttgcagtttgaaatgagcatgggctgtagcaagcccttcagcaactcccacagtgtacagctccagtattctctgaacaatggcaaggactggcatcttgtcaccgaagagtgtgttcctccaaccattggctgtctgcattacacggaaagttcaatttacacctcggaaagattccagaattggaagcggatcactgtctaccttccactctccaccatttctcccaggacccggttcagatggattcaggccaactacactgtgggggctgattcctgggcgattgataatgttgtactggcctcagggtgcccttggatgtgctcaggacgagggatttgtgatgctggacgctgtgtgtgtgaccggggctttggtggaccctattgtgttcctgttgttcctctgccctcgattcttaaagacgatttcaatgggaatttacatcctgacctttggcctgaagtgtatggtgcagagagggggaatctgaatggtgaaaccatcaaatctggaacatctctaatttttaaaggggaaggactaaggatgcttatttcaagagatctagattgtacaaatacaatgtatgtccagttttcacttagatttatagcaaaaagtaccccagagagatctcactctattctgttacaattctccatcagtggaggaatcacttggcacctgatggatgaattttactttcctcaaacaacgaatatacttttcatcaatgttcccttgccatacactgcccaaaccaatgctacaagattcagactctggcaaccttataataacggtaagaaagaagaaatctggattgttgatgacttcattatcgatggaaataatgtaaacaaccctgtgatgctcttggatacatttgattttgggcccagagaagacaattggtttttctatcctggtggtaacatcggtctttattgtccatattcttcaaagggggcacctgaagaagattcagctatggtgtttgtttcaaatgaagttggtgagcattccattaccacccgtgacctaaatgtgaatgagaacaccatcatacaatttgagatcaacgttggctgttcgactgatagctcatccgcggatccagtgagactggaattttcaagggacttcggggcgacctggcaccttctgctgcccctctgctaccacagcagcagccacgtcagctctttatgctccaccgagcaccaccccagcagcacctactacgcaggaaccatgcagggctggaggagggaggtcgtgcactttgggaagctgcacctttgtggatctgtccgtttcagatggtaccagggattttaccctgccggctctcagccagtgacatgggccattgataatgtctacatcggtccccagtgtgaggagatgtgtaatggacaggggagctgtatcaatggaaccaaatgtatatgtgaccctggctactcaggtccaacctgtaaaataagcaccaaaaatcctgattttctcaaagatgatttcgaaggtcagctagaatctgatagattcttattaatgagtggtgggaaaccatctcgaaagtgtggaatcctttctagtggaaacaacctctttttcaatgaagatggcttgcgcatgttgatgacacgagacctggatttatcacatgctagatttgtgcagttcttcatgagactgggatgtggtaaaggcgttcctgaccccaggagtcaacccgtgctcctacagtattctctcaacggtggcctctcgtggagtcttcttcaggagttccttttcagcaattccagcaatgtgggcaggtacattgccctggagatacccttgaaagcccgttctggttctactcgccttcgctggtggcaaccgtctgagaatgggcacttctacagcccctgggttatcgatcagattcttattggaggaaatatttctggtaatacggtcttggaagatgatttcacaacccttgatagtaggaaatggctgcttcacccaggaggcaccaagatgcccgtgtgtggctctactggtgatgccctggtcttcattgaaaaggccagcacccgttacgtggtcagcacagacgttgccgtgaatgaggattccttcctacagatagacttcgctgcctcctgctcagtcacagactcttgttatgcgattgaattggaatactcagtagatcttggattgtcatggcacccattggtaagggactgtctgcctaccaatgtggaatgcagtcgctatcatctgcaacggatcctggtgtcagacactttcaacaagtggactagaatcactctgcctctccctccttataccaggtcccaagccactcgtttccgttggcatcaaccagctccttttgacaagcagcagacatgggcaatagataatgtctatatcggggatggctgcatagacatgtgcagtggccatgggagatgcatccagggaaactgcgtctgtgatgaacagtggggtggcctgtactgtgatgaccccgagacctctcttccaacccaactcaaagacaacttcaatcgagctccatccagtcagaactggctgactgtgaacggagggaaattgagtacagtgtgtggagccgtggcgtcgggaatggctctccatttcagtgggggttgtagtcgattattagtcactgtggatctaaacctcactaatgctgagttcatccaattttacttcatgtatgggtgcctgattacaccaaacaaccgtaaccaaggtgttctcttggaatattctgtcaatggaggcattacctggaacctgctcatggagattttctatgaccagtacagtaagcccggatttgtgaatatccttctccctcctgatgctaaagagattgccactcgcttccgctggtggcagccaagacatgacggcctggatcagaacgactgggccattgacaatgtcctcatctcaggctctgctgaccaaaggaccgttatgctggacaccttcagcagcgccccagtaccccagcacgagcgctcccctgcagatgccggccctgtcgggaggatcgcctttgacatgtttatggaagacaaaacttcagtgaatgagcactggctattccatgatgattgtacagtagaaagattctgtgactcccctgatggtgtgatgctctgtggcagtcatgatggacgggaggtgtatgcagtgacccatgacctgactcccactgaaggctggattatgcaattcaagatctcagttggatgtaaggtgtctgaaaaaattgcccagaatcaaattcatgtgcagtattctactgacttcggtgtgagttggaattatctggtccctcagtgcttgcctgctgacccaaaatgctctggaagtgtttctcagccatctgtattctttccaactaaagggtggaaaaggatcacctacccacttcctgaaagcttagtgggaaatccggtaaggtttaggttctatcagaagtactcagacatgcagtgggcaatcgataatttctacctgggccctggatgcttggacaactgcaggggccatggagattgcttaagggaacagtgcatctgtgatccgggatactcagggccaaactgctacttgacccacactctgaagactttcctgaaggaacgctttgacagtgaagaaatcaaacctgacttatggatgtccttagaaggtggaagtacttgcactgagtgtggaattcttgccgaggacactgcactctattttgggggatccactgtgagacaagcggttacacaagatttggatcttcgaggtgcaaagttcctgcaatactgggggcgcatcggtagtgagaacaacatgacctcttgccatcgtcccatctgccggaaggaaggcgtgctgttggactactctaccgatggaggaattacctggactttgctccatgagatggattaccagaaatacatttctgttagacacgactacatacttcttcctgaagatgccctcaccaacacaactcgacttcgctggtggcagccttttgtgatcagcaatggaattgtggtctctggggtggagcgtgctcagtgggcactggacaacattttgattggtggagcagaaatcaatcccagccaattggtggacacttttgatgatgaaggcacttcccatgaagaaaactggagtttttaccctaatgctgtaaggacagcaggattttgtggcaatccatcctttcacctctattggccaaataaaaagaaggacaagactcacaatgctctctcctcccgagaactcattatacagccaggatacatgatgcagtttaaaattgtggtgggttgtgaagccacttcttgtggtgaccttcattccgtaatgctggaatacactaaggatgcaagatcggattcctggcagctcgtacagacccagtgccttccttcctcttctaacagcattggctgctcccctttccagttccatgaagccaccatctacaactctgtcaacagctcaagctggaaaagaatcaccatccagctgcctgaccatgtctcctctagtgcaacacagttccgctggatccagaagggagaagaaactgagaagcaaagctgggcaattgaccacgtgtacattggagaggcttgccccaagctctgcagcgggcacggatactgcacgaccggtgccatctgcatctgcgacgagagcttccaaggtgatgactgctctgttttcagtcacgaccttcccagttatattaaagataattttgagtccgcaagagtcaccgaggcaaactgggagaccattcaaggtggagtcataggaagtggctgtgggcagctggccccctacgcccatggagactcactgtactttaatggctgtcagatcaggcaagcagctaccaagcctctggatctcactcgagcaagcaaaatcatgtttgttttgcaaattgggagcatgtcgcagacggacagctgcaacagtgacctgagtggcccccacgctgtggacaaggcagtgctgctgcaatacagcgtcaacaacgggatcacctggcatgtcatcgcccagcaccagccaaaggacttcacacaagctcagagagtgtcttacaatgtccccctggaggcacggatgaaaggagtcttactgcgctggtggcaaccacgccacaatggaacaggtcatgatcaatgggctttggaccatgtggaggtcgtcctagtaagcactcgcaaacaaaattacatgatgaatttttcacgacaacatgggctcagacatttctacaacagaagacgaaggtcacttaggcgatacccatgaagaatcaaaaagtttattttttttcttccaacatgtgatgtgttgctctccattcttttaaatctcgcactacatctgatatcaggaaatatctgtgaaggacttggtgattacctgaaagcccttctcaagaccgagtgtacaccactttcccacactgtgaactaatgacaagtgacttatttgctcataagtaaatgtcttcatgttgatgtgtccgtgaaagttgtgatctgttgtaatatcagttacagtggcagtattgacaataagaaacagtttaacagaaaaatgaaatttaagcacaaaaaatttaagagattttatgtttaaaatggcatttagcacagtatttaacattcttggtcacaaagctatttaagtggactgtatttcagctatgtctcatgttttatatgattaaattatcattgtttgtcctttatgtattctcttctacaatacaacacattgaaactgtatttacttgttatgttgtaatattttgctgctgaatttggggctacttatattctgcagaaaattaattgaaatacctattcaagaagatagttgtaaagatattgtatctcctttaatatactccttaaaaatgtatgttggtttagcgttgttttgtggataagaaaaatgcttgaccctgaaatattttctactttaaattgtggatgaagaccctatctcccacaaataagttcccatttccttgtctaaagatctttttttaagtgttctgtggctgatttactaacagtaactgccattttttgtctgtgataacagagtgatttgtaaaacagtggttgttttttcattgtgttttcttcgtggattgttttttctgcgggtcatattcataccttctgatgaagttgtacaacaccagcaacattataatggccctgtagctctgaatgctatttgtgtaactgaaaggttgcactctagggtgaaccaagctataaaagcccatgcttaaataaaaattatgtccaaaagccaaccgtggactagtagccaccgtggactagtagccacgtggactagtagctaaccgtgac

SEQ ID NO: 23902 - DNA, 536 bp, Homo sapiens
ctggctgggtttggacctgggaggcataaaggtccagagatgccagaagcccttctgccaccacatagagccaaaatgaatgaagcagactggagatgaggagagagatcaaaccctgaagacccgtttgaaacttgggaccaagtaatgcttgggggcagtcggctctgggatgtctcagttactgggacaagtggctccctcttttgcctttaagcagtttcaagtggtttctacaacttgccactaaacagaaattcacaaaactctcctgacaaagaattttttcacttaagccagctcaagtgagtttctctcacttgtactcaaaagaatgccaaattaccagcctggtcaacatgatgaaatcctgtctctattaaaaatacaaaaattagccggacacggtggagtgtgcctgtagtcccaactacttgggaggctgaggcagaagaattgcttgaacctgggaggcagaggttgcagtgagcagagatcattcccccgggcaacagagtgaaactctgtctcaaaaa

SEQ ID NO: 23903 - DNA, 387 bp, Homo sapiens
gtgaaaacaggactttttgtgtattgtcacactcgaatgaagaagagctcctatacaactgccttttattgaattgaagacaccctcgattgaaaaatgtaccattattttttatacgactaagaaaggggagaaaaactactggttgagctaagataaaatgtttttttattacattaattatttcagacaggttataatatgaaaaagtgcacagtttagaatcaatgagccaggtatggtggtgtgcggtggtaatctggtggtaatgccagctgagatgggaggattacatgaccccaggaattcaggacaagcctgggcaacatagcaagattctcatctcagtttttaaaaataataaataaataaataaataaataaata

SEQ ID NO: 23904 - DNA, 801 bp, Homo sapiens
tcctgaaagcaccttgatagccttgagggcccagctctcctctgggcagtccatgaacgcatagccagtcttcaccaggaaggatcccaacactgggatcttggcgtccttgaagatactttctaggtccaaggggacggcgttctcgtggaggtttccgatatacagtttgttcattgtgaagaatggttgtttaaaaaaattaacgagaagaacgagaaattaaaaccacccatggtgatggatggatccagctggttttgttgctctcatcttctcacctttaaaatacacaaacacagaaagaaccaagcacaagaacaaggagtgaaaaatcagatccgaggcttgtttttccttgtcctagatatgttttaaaagagaaagaaaagaaaaagcctagctacaacccaaatgcatcaaccagtcttcctaagtctcgcttttgaataattttcaaatgagatgtacacctaaattttaagagtgtttgagtttgtgtttgctttagtggtgctttatatctgtctgattgtaagcataatgttcatggaaagagacttttggtaggaatcaaactgggactcttacaatggcttaagtccatcagaatagttctgatgctacttaggagcatcagaactcctttctttgcctgatttttcaacttatttcttaattggaaccccataaagaacatgaatggtcttctgatatccttaatgtcttagagttatatcaatattttgcttaccagtaatctgtatgaaaataaagtttatttagtaaacaaaagttgct

SEQ ID NO: 23905 - DNA, 195 bp, Homo sapiens
cagatccctcccgtgacacgtggcaattatggaaactacaattcaaggtgagacttggttggggacacagccaaaccatatcacttgtacggagttagttactgatagacacactcacatatcttatttactcctctcagttatcccaaggggatatgtatactgtgactccctttttattgatgagaattgagg

SEQ ID NO: 23906 - DNA, 562 bp, Homo sapiens
tgctttcccgtgtggttaaaaggctccaatgacagtgcctgagagtgtgtggacactggcagcctgtgagagcaggggcgggtgggaacaggtctccaaaaggactgacggggcctaggagacaggagagggacaggtgcttgaacaagggctgggggccaagacgggggaaagagcttctcaaaggaagtggagccatgggctggactgagatcccatctccaccttctccagggcttccacacccaggaaggagagcccacgggttgaagcttcgtcacctgggaagcaggagagcccgagggttggacagctgagcatgggaagctctgaaaggggccgggtgagggcaggcgaggatcagagttcgcggatgacagctgccaggccagggcagctacagggagccggggtcctggtccaagccccagctgccctccccctggcctgctccaactcctgcaagagcgctctctgccttatttggcttggaagagaaaccgataaacactcccgtgctagtgctttcgacggtgggcggggccgggcagaggaagagagg

SEQ ID NO: 23907 - DNA, 332 bp, Homo sapiens
tgctttcccgtgtggttaaaaggctccaatgacagtgcctgagagtgtgtggacactggcagcctgtgagagcaggggcgggtgggaacaggtctccaaaaggactgacggggcctaggagacaggagagggacaggtgcttgaacaagggctgggggccaagacgggggaaagagcttctcaaaggaagtggagccatgggctggactgagatcccatctccaccttctccagggcttccacacccaggaaggagagcccacgggttgaagcttcgtcacctgggaagcaggagagcccgagggttggagtccatgacctgggggttcctg

SEQ ID NO: 23908 - DNA, 507 bp, Homo sapiens
cagagaaaactggttgagataaaattcacttagatgctctgtctgtaggataatgccccactttcctcatttcttcatgagagtgaggcttagcacccctaacctgagtctcagtaagaggaggaagaggcagcggaaatggaattgaaaaaaatatgatgccagagattacaggttgcagaaaatgagaaaaacacagaagcctcaatgtcctagaggctagctccatgaatcaatggattaggaaccgaaattagaatcaaaatacctgtactcaagttctaattttctgttctctaattggattagtcaagtcacctaaatttcctgggcctctgttttcttcatctgtaaaatagacataatgatagctatcttatagtattattgtggggatcaaattagattttgaatgtgaagtatagtgtgataatttaaaaatgggctttggagtctactaaatatgagtatgcttattaattgtgcgactgtagacagcctaaaact

SEQ ID NO: 23909 - DNA, 561 bp, Homo sapiens
caaaacaaaactactaatttatactcttttaaaactacaagttgcctgtgttatgtaggagagatataagattgtgaaattttccaaaaatacctgccacacccctaacagacaggagatgataagagtaaaagagagaattgggaggctttagaagccctattgtaatatttcttaaaacacattatttattgctaaatatatttagtgtgagccatgtaaaaattgccatttttggaggtcaaaaaccgttgaatatcagcaatttagtatggttcaatttatgtggtttctaatcaaatgtacaaagtacaataatttggtttcatacttgattttttatttcttaggctgagtcattaaaagttgatcagtgatatatggcaaaattatttaaagtgcttgaggaattggggagacttgctgcttatgtgatcagatatacaaaaataaagtttttcatttcattaaatatttgattaaaactgctaagtttgaaaatgtttaccaagaaatagttttcagaaattttgctaacttgataaaggcttttgagcaata

SEQ ID NO: 23910 - DNA, 2637 bp, Homo sapiens
tgagccagactggagtacccaaatcactgttcccacactaacgttagatgttatcaactttttagaaaggattactatattgagtcgtattggcttttgacttcatattaattagaatgtatttgaacaccggtgggggtaaactattcgtaatgcaattttgttgagtaatatttgaaagagattgctctctcaacaagaatgataaatcatctctgtttcaaaaataacccctgttgaagttgacaagagcaggaagggatgaagtttgccaggtaatctaataggtgcttccatatacattttctcatttatgcaccagaacaatgcttctaagtatctgttattctccatttttacaatttataaattgcccaaggtaatgtcaaatccagccctgcctcctcgggtaaactttctcctgtgtctggcagaaattcacacatttagcaccataggtaggtttcctctgttttccatttttatttttaaggttggaatttgggttctttggaactcaaatttcttgagtcattttatagatttttgctgcctagctggccagttaaaatagagaactaagaaatgtttcttctttcttcatagaaacagtttcgcttgcctcaattatatgcagagttatattgtccttcacgttgctcaggtagacccagtgtaagttacagctagaaagttagaaaaacagcagcactattttccctcacctttattagtatattatgccagagttaactcttatcatttttaatttcaagtacatatttttgaagtaaatcaattgtatatattaactattcaactgtctcttggtcagtccattataataaccctattttaatttttctttcctttttaatgcacccaaagtcttttatttacttttttaactacagccacactttgagcaggtatggaacacaatcattgattaatctaatatatacaatagggagaaccgtaactacagatttacagattgtggagctgcagcagtttttcagtaacatgttggaggaacaccagaggatcagagttcatgccaacttacagacaataaagaatgaaaatctgaaaaacaagaagctaagtgccaggatagctgcgtggctaaggagaaacacatagcttgtggctatctttcagcactcctcttgcatattataatgtagtttgttcacagttttgtcttccaatactttgtgagtctggaaaaccacacattttatttgtatttcagtcacatttattactcagagtgccattcttctcatattgtcatgtttggccctgagggtgggtgattgctgacaattttgccaatgctgctgtatttctgggaaagatgtcacttcatgttgggttataatcccacagaatttactttaaatgtcacgtaaaaacaaattcacctaagatagtcttgcttattttgttgcgaaggccagtggaatataaaagtcaatggcattaatgaggagcacattctttgctgagggaaataacagtttttccaggccctagggtttatttagttcaacattgaagattgaaaagactaatgagaagataacatgacaatataaaaagacagaaactcaaaaagtatattcactagaagacagtggagccaaagaaaagcaagttgaaaaagaaagaggagacaatttaacgagccctaaaggcaagaagtgtgtcttctcctgcccatttctctctcccacagtacatcctgcattgaaccacgtgttgctggttactaaactttatggtgtcacaaaaagacaaatgattgtaggatccatggaagtgcacttaggcttgctgtggtggaggccatagtggagatgaaggctctgctctgaagctcttaattgtgtattcaccagtgggatggacaccctttcagcctaagcgtacgagtgaaaacaatgatgtcaaaagacaatagcaagtataggctactatttagggcaaaaggaatcttgaaatgaaagaaacagaactaaaaggctaactggagcataatccttacagttttgcactcaggggattaagtttgaaacatagtgtcttttggccaaattgaacctacttgtaatgtggaccaacttactttacacattttcatcagtcccaatgtatggaattagcttagttttctcatgcttgattaaaacaagacaactaaagctaatcattcctcttctagactttgtgtatatgatttaatcttttatttttatttttgtagaatgggggtaaaactacaaatctcctcctcagggtgatatttttaaagattaaggagtatgacatcaattaacagtctttaaagatgttacatacgctcaaagcaatgtgattaagactttttgcctatttcttgtataagttaaggcagccataaatgaaaatacaaaacaaacgtttgcttttgtatttgattcacaagaggattctccctgagtgtcaggggaggctgtgggacttcaccacgtggacaaacgaaagcacaggctactcagacttggccacaggtcataggtcagagaattttttcttcaaatgtagaaatgtaaattttcagcaataaaatatctgcatgcctacaaagtg

SEQ ID NO: 23911 - DNA, 627 bp, Homo sapiens
caagaatatcactggaaaaactttttgtaactgcgtgttggttgggccttgaagactgccttcagctgtcaaaagaacttttcgcaaaatgggtggatcatccagaaaatgaaataccttatccaattaaagatgtggttttatgttatggcattgccttgggaagtgataaagagtgggacatcttgttaaatacttacactaatacaacaaacaaagaagaaaagattcaacttgcttatgcaatgagctgcagcaaagacccatggatacttaacagatatatggagtatgccatcagcacatctccattcacttctaatgaaacaaatataattgaggttgtggcttcatctgaagttggccggtatgtcgcaaaagacttcttagtcaacaactggcaagctgtgagtaaaagagcattcatgggcatatgtctcacagtgacatgcaggcaagctcacagacatcgtctccacaccaaggcacatgttggagttgagtacatcgccaatagcagtgcaggaaccgctgctcctttcagccaggcccagaattcttcctagaaagcctaatctggaaatacattttggaatattagattaaataaaacaacttttggcttgg

SEQ ID NO: 23912 - DNA, 814 bp, Homo sapiens
caagaatatcactggaaaaactttttgtaactgcgtgttggttgggccttgaagactgccttcagctgtcaaaagaacttttcgcaaaatgggtggatcatccagaaaatgaaataccttatccaattaaagatgtggttttatgttatggcattgccttgggaagtgataaagagtgggacatcttgttaaatacttacactaatacaacaaacaaagaagaaaagattcaacttgcttatgcaatgagctgcagcaaagacccatggatacttaacagatatatggagtatgccatcagcacatctccattcacttctaatgaaacaaatataattgaggttgtggcttcatctgaagttggccggtatgtcgcaaaagacttcttagtcaacaactggcaagctgtgagtaaaaggtatggaacacaatcattgattaatctaatatatacaatagggagaaccgtaactacagatttacagattgtggaggctgaatttttattaggcagtctttttccttgtggagagaagcatagctccccacttatataatcctcagcactctcagttgcagaaggaaggatactttctcacagcttcaagagttcctgccccgaaaaaaagcactttgattggtcctacttgggtcagatgtaccaatcactgtgtccagggaagatggaatactctaattggtctaaccagggtcctgtggccacactaggagacagccccacccaagtcactggcactgggaaggggaaggggtagttctggaaggaaaaagggctgtaaccagaaagtaaaca

SEQ ID NO: 23913 - DNA, 2167 bp, Homo sapiens
caagaatatcactggaaaaactttttgtaactgcgtgttggttgggccttgaagactgccttcagctgtcaaaagaacttttcgcaaaatgggtggatcatccagaaaatgaaataccttatccaattaaagatgtggttttatgttatggcattgccttgggaagtgataaagagtgggacatcttgttaaatacttacactaatacaacaaacaaagaagaaaagattcaacttgcttatgcaatgagctgcagcaaagacccatggatacttaacagatatatggagtatgccatcagcacatctccattcacttctaatgaaacaaatataattgaggttgtggcttcatctgaagttggccggtatgtcgcaaaagacttcttagtcaacaactggcaagctgtgagtaaaagtcttttatttacttttttaactacagccacactttgagcaggtatggaacacaatcattgattaatctaatatatacaatagggagaaccgtaactacagatttacagattgtggagctgcagcagtttttcagtaacatgttggaggaacaccagaggatcagagttcatgccaacttacagacaataaagaatgaaaatctgaaaaacaagaagctaagtgccaggatagctgcgtggctaaggagaaacacatagcttgtggctatctttcagcactcctcttgcatattataatgtagtttgttcacagttttgtcttccaatactttgtgagtctggaaaaccacacattttatttgtatttcagtcacatttattactcagagtgccattcttctcatattgtcatgtttggccctgagggtgggtgattgctgacaattttgccaatgctgctgtatttctgggaaagatgtcacttcatgttgggttataatcccacagaatttactttaaatgtcacgtaaaaacaaattcacctaagatagtcttgcttattttgttgcgaaggccagtggaatataaaagtcaatggcattaatgaggagcacattctttgctgagggaaataacagtttttccaggccctagggtttatttagttcaacattgaagattgaaaagactaatgagaagataacatgacaatataaaaagacagaaactcaaaaagtatattcactagaagacagtggagccaaagaaaagcaagttgaaaaagaaagaggagacaatttaacgagccctaaaggcaagaagtgtgtcttctcctgcccatttctctctcccacagtacatcctgcattgaaccacgtgttgctggttactaaactttatggtgtcacaaaaagacaaatgattgtaggatccatggaagtgcacttaggcttgctgtggtggaggccatagtggagatgaaggctctgctctgaagctcttaattgtgtattcaccagtgggatggacaccctttcagcctaagcgtacgagtgaaaacaatgatgtcaaaagacaatagcaagtataggctactatttagggcaaaaggaatcttgaaatgaaagaaacagaactaaaaggctaactggagcataatccttacagttttgcactcaggggattaagtttgaaacatagtgtcttttggccaaattgaacctacttgtaatgtggaccaacttactttacacattttcatcagtcccaatgtatggaattagcttagttttctcatgcttgattaaaacaagacaactaaagctaatcattcctcttctagactttgtgtatatgatttaatcttttatttttatttttgtagaatgggggtaaaactacaaatctcctcctcagggtgatatttttaaagattaaggagtatgacatcaattaacagtctttaaagatgttacatacgctcaaagcaatgtgattaagactttttgcctatttcttgtataagttaaggcagccataaatgaaaatacaaaacaaacgtttgcttttgtatttgattcacaagaggattctccctgagtgtcaggggaggctgtgggacttcaccacgtggacaaacgaaagcacaggctactcagacttggccacaggtcataggtcagagaattttttcttcaaatgtagaaatgtaaattttcagcaataaaatatctgcatgcctacaaagtg

SEQ ID NO: 23914 - DNA, 775 bp, Homo sapiens
ggaactcaaatttcttgagtcattttatagatttttgctgcctagctggccagttaaaatagagaactaagaaatgtttcttctttcttcatagaaacagtttcgcttgcctcaattatatgcagagttatattgtccttcacgttgctcaggtagacccagtgtaagttacagctagaaagttagaaaaacagcagcactattttccctcacctttattagtatattatgccagagttaactcttatcatttttaatttcaagtacatatttttgaagtaaatcaattgtatatattaactattcaactgtctcttggtcagtccattataataaccctattttaatttttctttcctttttaatgcacccaaagtcttttatttacttttttaactacagccacactttgagcaggtaagtgtctgctgttttttcatagcaatacttcacagctattttaagatttttttttttctagatattcagggacactaaactagaggggaagtttccatgaccacgcctattgaaacaagcacagggagagccatggtgctcagccttcagggtcaccaacatttagagaacatcagaagatattaatcttctctccaaaaagcacgcataaatacaacatttttaaatacacgttcagggggctttagtcagcagttctgaaatggatcctctatgaactactgttttttaaggggcataatttatatatttatttattcccttagaaattgtattgatttgagacttgtgacat

SEQ ID NO: 23915 - DNA, 626 bp, Homo sapiens
ttggctaccacatgggtgaaatttcccttacatactatgccccaaaagagctgtgaccaacctggtggttttatggcacaccagggaagcagtcttggtttggagaagaaacccaccatagagaggaagcacctgaggctgtgtgttaggactcttctcttaatgcttgccatccaaagacacactgaaatccacctctcagggttgaggtgagaacaacaagttcatatatatggcgcgctctggactgtgctgaacacggcagctgtccgacatgtgtcactactcttctttaggctctgaattgaagcgtgtcacttggtttcttcatgccttaatgtctccaacctgcaaaatcgaggcagcaaaccaaaagggcagcagatggcccagtttactgtggcggggaaagagtcatttcctgttgagcagggcacttctactactccctggcacatgcagccaacctgggggcaggtacggcagaacgtggggctcctcccagtgccagtatagcagctggcctgggcacctcgactcctatcgggaagtacccttccctactttgctgggggatcttcttttgagaccttcctcaaaagcattcataaccctaatccacaatt

SEQ ID NO: 23916 - DNA, 202 bp, Homo sapiens
atcacctgcgcccaagaattcaaggctgtagtgtcctatgctagtgcctgtgaatagccactgcactccagcctgggcaacatagtgagatctcatctcttaaaaaaaaaaaaatgctgggcgcggtggctcacgccccaaacccggttaatttgtttcctttgggggggaggggggttccccactttggcccagggaaaaa

SEQ ID NO: 23917 - DNA, 414 bp, Homo sapiens
tcttttcctagagttcatctgaatttctagctcaagcgcatttccacacaataggaggggttttagttttagttttggcacttcctgataaatgtggccaaattcagtgatttctcattatttcccttctatattcagcatcagggttctactcctgcctcctctccctccacatcccgtccttgatcttaatgctatggggccctggatctttggaaaggggcttccagacactgatgttgatctccctccggcctgttctggcatctgcttaacgtagcttggggacgtcagccttcacctttcaggcctgcctctctaccacttctcctctgctcctgccacatcgcatagctgctgaacgacatgctccacatttctctggagttcacctgaaagcaaggcacagatcct

SEQ ID NO: 23918 - DNA, 560 bp, Homo sapiens
atccatttatctcagctcaaagtgaagaattgtggataaggggccattattgtaagaaatgtgtaggctttgtcagttgtatgttaattttgttagcttttactactttttctcttaagatcagaagtgaagatcgtaacatgcaaaggttcttagcaatttgtctttgagggcagcatggaagtggaaacaaggactataaggtcttcaggagagaaactccaaataataggcaaaggccatcaaaataaggccacactgggcagggcatggtggcttaagcttgtaatcccagcactttgggaggccaaggcgggtggatcatcgaggtcaggagttcaagaccagcctggccaacatggtgaaccccgtctctactaaaaatacaaaaattagctgggcgtggtggtgggcgcctgtagtcccagctgcttgggaggctgaggcaggagaattgcctgaaaccgggaggtggaggttgcagtgagctgagatcgtgccactgcgctccagcctgggcaacaagagtaaaactctgtctgaaaaaactctatctcaaa

SEQ ID NO: 23919 - DNA, 317 bp, Homo sapiens
tccatgagtactttttaaagtgtatttcttgtacttagtttaataattatataatgtgttgcctttttttcttttaggaaaaaaagcttttataaagtatttatttattgatttattggttgactgagacagagtctggctctgtcgccctcgctggagtgtggtagtgcaatcttgattcaccgcaacctccgcatctggggcaggagaattgcctgaaaccgggaggtggaggttgcagtgagctgagatcgtgccactgcgctccagcctgggcaacaagagtaaaactctgtctgaaaaaactctatctcaaa

SEQ ID NO: 23920 - DNA, 448 bp, Homo sapiens
atggtttggggccagatggggaaagctgtgttatggggcttgtcagtttctgccagccaaggcttcagcatagctgactgtaacaaagttgggaaggccttgcttttgagagccagaccaggagtacctgtgactaacaaggggtctgggaggatctgctgctcccatgccctcctttgtgtgttttaaatctgtttgagccttctgggctcctgtgaattagggagtggcagctcctcagtctaactcctattgtgaccaggttgcctaattggccctttggtttgggcacccactgtccttctgcgtggttggatagatgctgctcccaatgtccctgatctcttacagacccctctgattcttcactcttggctttgagagcccctgatgccctgcagtcttgactgagcttctaatggttgatcagacccttgaatgttgagct

SEQ ID NO: 23921 - DNA, 715 bp, Homo sapiens
tatgtacatggacatctttctaaaatctaaagtgaattacatattctacaaacatagtataatcaatagaaccctgtctttccttgatgagcaagagtcttcagtgtgcatacatacactgattactgtaaaaggagtatgtttagggaccagtaaagagaataatgcttttagtctctccattaaatgagaatacactgttattttaaaattaagcccttctattcttttgttatcatgtcatatttctctttttcatctttgtcaatgtgtcctcctccatttaatctgctgcccaatatttctcatggttgtatctcttgctcttttaccacagaaaatgcttgggggttcatgtcagccttttattctctattaaaaaggccatttctgctttctttccatttagagtgactgaaattactgggagtctgggttttttctcggcgggggtgggggtatattgagtgttacagtattttccactgtgtaaaaaaataaggggaaaattttaacttgctgaaataaattacagatgtacacaaggagaaagaggcttgaacaccttaatattctcaacctcatagccatggagccccataagtgtattaaaaaccacgaggggctgtggattattcatttgttatctggaggtggggagtgaggaaaggattcagagctgccattaaatttttaataaaatcttcatccccca

SEQ ID NO: 23922 - DNA, 392 bp, Homo sapiens
acttttttcttaagaaattttattttctggaatctaaatatgcatgtcagcaccccaggtaagtctattattcttctattagtaattgtagtatgcatgttatgttagcacaatgaaaaggcaaggaagcaggtaaacatccttcattgaacatccctctttctcctctcatttccattcataatttttattcagaaaaattttcaaggaaccttaaccaaagaatgctaccaaggtgtgaatgaatgaatataatttgcagcaaacaatttatatgttattgttggtttctctactagcaaaagttttcaacttcatacttctttttctatcagtagagtctaaaccattgcaggtttaatgatgcatgtgatctcttacgtctgttttat

SEQ ID NO: 23923 - DNA, 353 bp, Homo sapiens
tttttgttttagacagagtctcactttgtcacccaggctggagtgcagtggtgtgatcttggcccactgcaacctctgcctcccgggttcaagcggttctcctgcctcagccttctgagtagctggggttacaggcacatgccaccatgcccagctaattttttgtatttttagcagagatgaggtttcccatgttgctccagctggtctcaaactcctgagctcaggcaatctgcccacctcagcctcccaaagtgctaggattacaggcataaaatagattttatatagaagtagacaacaacctagacattgataattatattattggactctgagttggtataacttgg

SEQ ID NO: 23924 - DNA, 476 bp, Homo sapiens
gactgtggaactgggggcagctggtccctggggtctctgaaagtaagtgtctccctcaactgctcaatgccaagggtgtctctgcctctgcttctctgtgtccctcatcttcctcccacttcattctgactggcaagccctgtcctgcacagcttcttcccccacccctaggccttccccagacactccctctaactaggctggctgttctgttcccttcccgctaacactgtggcctggcccacctcccaggaaataggaaaggtgcagaaatcaccctggagttgccactcctgccaggcttcatctcgagccaatgttcccaggtcactaagagaatgagcttccactgtattcccatccagggctctttccctttgtgaggctgacctgtggacaagacaatgggacagggataggcagttcctccatccattcataattgccaggcaagatcttctggcctcctgcacaaa

SEQ ID NO: 23925 - DNA, 488 bp, Homo sapiens
aaatttatgatttctcacatggtttgccaaacaaatagccattattgtaatactatataacttcacgtatgtagactctttcatacctggttcaattctgatccacagaaatcagaataaggaaattttttgagaccttgtcttagctctcattaggcagactctactatgtgcaaggaataaagggctatgcctggatttttgtggaataaagagatggtggttaatttaagcatcagatggttaaaggcctctatggaataatgctccccacgctcacagtgcttggaacagaactacagtgacaccacaggaggccctctgaatccgattatggctttaacattatttagggtctaaaactacgaatgcatttgttttgatttctcaagtttgacgtgttgaagctgtttcaggtagtaaataaaaacaggagctatagctcagggtcagtgcactggaggaaggaaaggaggaaataaaagaaa

SEQ ID NO: 23926 - DNA, 872 bp, Homo sapiens
gtttttttgagagtctcactcagtcacccagactggagtacagtgacatgatcttggcttactgcaacctccaccccgccgggctcatatgaccctctcacctcagcctcctgagtagctgggacttcaggtgcattctaccatgcctgtctaatttttgtattgttttgtagagacagggttttgccatgttgccaagggtgagctgaagcaatctgccagtgttggtctcccaaagtgctacaattaccacacccggttttatgtgtatatttctatgtctatctgtttgtatattaaaatcataaattcatgctgatatgtccaattttgatacctgagagtttgttctttcttatgtgtaatccctcatttgacaccaagaaactgactctcattagccacaatatgttacttatttgctcaattttggaatacatttaaaggagttttagaattgttcacccctgccactcctaatttagtaaccagagtacaacatgtatttgcagctcttttattctttagcctgagacttggagtatgtagtcaaaatactgtgttccaaagttacttaggttagttcctccccaaactccttctctcccaccttcagtgtgattatgttattatttttgaaatacagttaagtttatttgtttctgtttgtattccattttgggtctcccatgtccttgttgattgattgatttcaccatgtgcaaaattaacatgtttctaaaaatcagaactaagggtgaggtatagtgtctaatgcctgtaatcccagcactttggtaggccaaagaggattgcctgagcccaggagttcaagaccagcctgggtaacatattgggaccccatctctata

SEQ ID NO: 23927 - DNA, 417 bp, Homo sapiens
ggacataaatagggaacataggataggagtcatttatcatcattaggatatatacaggtagaggtgtgtgtgtgtatattgtatgtatatatttttaacttatttgaaaggacataggctgagcatggtggcttacacctgtaatcctggcactttgagataccaaggtgggaggatctcttgagcccaggagtttgagaccagcttgggcaacatagtgagactccatctctatcaaaaaaaaaaaaaaaaaaaatttaaggtagctcggtgtggtggtgtgcacctatagtcccagctactcaggaggctgaggtgggagcgtcacttgggcccaggaagtcgaggctgcagtgagccatgtgtgtgccactgcactccagcctgggtgacagagcgagaccctgtctcaaatta

SEQ ID NO: 23928 - DNA, 3046 bp, Homo sapiens
cgcccgcggccgaggtggacggagcctcccggctcgctgctcccgccggcggagcgaggctgccctttcttcgcagcgtgatttattttcttctcctttttttctgaactcttcttccagggagaggctagtggtaacaggccgagctggatggatgggtatggggagaggggcaggacgttcagccctgggattctggccgaccctcgccttccttctctgcagcttccccgcagccacctccccgtgcaagatcctcaagtgcaactctgagttctggagcgccacgtcgggcagccacgccccagcctcagacgacacccccgagttctgtgcagccttgcgcagctacgccctgtgcacgcggcggacggcccgcacctgccggggtgacctggcctaccactcggccgtccatggcatagaggacctcatgagccagcacaactgctccaaggatggccccacctcgcagccacgcctgcgcacgctcccaccggccggagacagccaggagcgctcggacagccccgagatctgccattacgagaagagctttcacaagcactcggccacccccaactacacgcactgtggcctcttcggggacccacacctcaggactttcaccgaccgcttccagacctgcaaggtgcagggcgcctggccgctcatcgacaataattacctgaacgtgcaggtcaccaacacgcctgtgctgcccggctcagcggccactgccaccagcaagctcaccatcatcttcaagaacttccaggagtgtgtggaccagaaggtgtaccaggctgagatggacgagctcccggccgccttcgtggatggctctaagaacggtggggacaagcacggggccaacagcctgaagatcactgagaaggtgtcaggccagcacgtggagatccaggccaagtacatcggcaccaccatcgtggtgcgccaggtgggccgctacctgacctttgccgtccgcatgccagaggaagtggtcaatgctgtggaggactgggacagccagggtctctacctctgcctgcggggctgccccctcaaccagcagatcgacttccaggccttccacaccaatgctgagggcaccggtgcccgcaggctggcagccgccagccctgcacccacagcccccgagaccttcccatacgagacagccgtggccaagtgcaaggagaagctgccggtggaggacctgtactaccaggcctgcgtcttcgacctcctcaccacgggcgacgtgaacttcacactggccgcctactacgcgttggaggatgtcaagatgctccactccaacaaagacaaactgcacctgtatgagaggactcgggacctgccaggcagggcggctgcggggctgcccctggccccccggcccctcctgggcgccctcgtcccgctcctggccctgctccctgtgttctgctagacgcgtagatgtggagggaggcgcgggctccgtcctctcggcttccccatgtgtgggctgggaccgcccacggggtgcagatctcctggcgtgtccaccatggccccgcagaacgccagggaccgcctgctgccaagggctcaggcatggacccctccccttctagtgcacgtgacaaggttgtggtgactggtgccgtgatgtttgacagtagagctgtgtgagagggagagcagctcccctcgccccgcccctgcagtgtgaatgtgtgaaacatcccctcaggctgaagccccccacccccaccagagacacactgggaaccgtcagagtcagctccttccccctcgcaatgcactgaaaggcccggccgactgctgctcgccgatccgtggggccccctgtgcccgccacacgcacgcacacactcttacacgagagcacactcgatccccctaggccagcggggacaccccagccacacagggaggcatccttggggcttggccccaggcagggcaaccccggggcgctgcttggcaccttagcagactgctggaaccttttggccagtaggtcgtgcccgcctggtgccttctggcctgtggcctccctgcccatgttcacctggctgctgtgggtaccagtgcaggtcccggttttcaggcacctgctcagctgcccgtctctggcctgggcccctgccccttccaccctgtgcttagaaagtcgaagtgcttggttctaaatgtctaaacagagaagagatccttgacttctgttcctctccctcctgcagatgcaagagctcctgggcaggggtgcctgggccccagggtgtggcaggagacccagtggatggggccagctggcctgccctgatcctctgcttcctcctcacaaccccaagagcccccagcccggtccatccacgtctggagtctggggagaggagcagggtcttaggactctcagctctgagcatccctggcagggtcttcaacctctaatctcttcccttaagccctgtggccacacagccaggagagacttgccgctggctcccgcctcatttcagcccagggtgctcatccaggggcccagaacagtcccacctgtgctgctatgcccacagcacaaagccaggcttcactcccaaaagtgcagccaggccctggagggtgatcctgccagcagccctacagctccacaccctacccacccatcggcagcccctctgctgttccccagggacctctcatacactggccaggaggctgcagaacgtgtgtctccccctccctccaagaggtcctgctccctctgccagaaccgtgtgtgggcgggtgggagggcgctcggggcccggcccctccctctccctgctggttttagttggtccctatgttggaagtaaaaagtgaagcactttattttggttgtgtttgctcacgttctgcttggaagtggggacccctcactgcgtccacgtgtctgcgacctgtgtggagtgtcaccgcgtgtacatactgtaaattatttattaatggctaaatgcaagtaaagtttggtttttttgttatttgt

SEQ ID NO: 23929 - DNA, 396 bp, Homo sapiens
ccaggaggccagtggagccgatggagaaggtggcagtggtaaccaggtgctcactcagggccaggcgttgctgggcttccggcgccccaatgctcagctccacaccctacccacccatcggcagcccctctgctgttccccagggacctctcatacactggccaggaggctgcagaacgtgctccctctccctgctggttttagttggtccctatgttggaagtaaaaagtgaagcactttattttggttgtgtttgctcacgttctgcttggaagtggggacccctcactgcgtccacgtgtctgcgacctgtgtggagtgtcaccgcgtgtacatactgtaaattatttattaatggctaaatgcaagtaaagtttggtttttttgttatttgt

SEQ ID NO: 23930 - DNA, 2425 bp, Homo sapiens
cgcccgcggccgaggtggacggagcctcccggctcgctgctcccgccggcggagcgaggctgccctttcttcgcagcgtgatttattttcttctcctttttttctgaactcttcttccagggagaggctagtggtaacaggccgagctggatggatgggtatggggagaggggcaggacgttcagccctgggattctggccgaccctcgccttccttctctgcagcttccccgcagccacctccccgtgcaagatcctcaagtgcaactctgagttctggagcgccacgtcgggcagccacgccccagcctcagacgacacccccgagttctgtgcagccttgcgcagctacgccctgtgcacgcggcggacggcccgcacctgccggggtgacctggcctaccactcggccgtccatggcatagaggacctcatgagccagcacaactgctccaaggatggccccacctcgcagccacgcctgcgcacgctcccaccggccggagacagccaggagcgctcggacagccccgagatctgccattacgagaagagctttcacaagcactcggccacccccaactacacgcactgtggcctcttcggggacccacacctcaggactttcaccgaccgcttccagacctgcaaggtgcagggcgcctggccgctcatcgacaataattacctgaacgtgcaggtcaccaacacgcctgtgctgcccggctcagcggccactgccaccagcaagctcaccatcatcttcaagaacttccaggagtgtgtggaccagaaggtgtaccaggctgagatggacgagctcccggccgccttcgtggatggctctaagaacggtggggacaagcacggggccaacagcctgaagatcactgagaaggtgtcaggccagcacgtggagatccaggccaagtacatcggcaccaccatcgtggtgcgccaggtgggccgctacctgacctttgccgtccgcatgccagaggaagtggtcaatgctgtggaggactgggacagccagggtctctacctctgcctgcggggctgccccctcaaccagcagatcgacttccaggccttccacaccaatgctgagggcaccggtgcccgcaggctggcagccgccagccctgcacccacagcccccgagaccttcccatacgagacagccgtggccaagtgcaaggagaagctgccggtggaggacctgtactaccaggcctgcgtcttcgacctcctcaccacgggcgacgtgaacttcacactggccgcctactacgcgttggaggatgtcaagatgctccactccaacaaagacaaactgcacctgtatgagaggactcgggacctgccaggcagggcggctgcggggctgcccctggccccccggcccctcctgggcgccctcgtcccgctcctggccctgctccctgtgttctgctagacgcgtagatgtggagggaggcgcgggctccgtcctctcggcttccccatgtgtgggctgggaccgcccacggggtgcagatctcctggcgtgtccaccatggccccgcagaacgccagggaccgcctgctgccaagggctcaggcatggacccctccccttctagtgcacgtgacaaggttgtggtgactggtgccgtgatgtttgacagtagagctgtgtgagagggagagcagctcccctcgccccgcccctgcagtgtgaatgtgtgaaacatcccctcaggctgaagccccccacccccaccagagacacactgggaaccgtcagagtcagctccttccccctcgcaatgcactgaaaggcccggccgactgctgctcgccgatccgtggggccccctgtgcccgccacacgcacgcacacactcttacacgagagcacactcgatccccctaggccagcggggacaccccagccacacagggaggcatccttggggcttggccccaggcagggcaaccccggggcgctgcttggcaccttagcagactgctggaaccttttggccagtaggtcgtgcccgcctggtgccttctggcctgtggcctccctgcccatgttccccagggacctctcatacactggccaggaggctgcagaacgtgtgtctccccctccctccaagaggtcctgctccctctgccagaaccgtgtgtgggcgggtgggagggcgctcggggcccggcccctccctctccctgctggttttagttggtccctatgttggaagtaaaaagtgaagcactttattttggttgtgtttgctcacgttctgcttggaagtggggacccctcactgcgtccacgtgtctgcgacctgtgtggagtgtcaccgcgtgtacatactgtaaattatttattaatggctaaatgcaagtaaagtttggtttttttgttatttgt

SEQ ID NO: 23931 - DNA, 1776 bp, Homo sapiens
cgcccgcggccgaggtggacggagcctcccggctcgctgctcccgccggcggagcgaggctgccctttcttcgcagcgtgatttattttcttctcctttttttctgaactcttcttccagggagaggctagtggtaacaggccgagctggatggatgggtatggggagaggggcaggacgttcagccctgggattctggccgaccctcgccttccttctctgcagcttccccgcagccacctccccgtgcaagatcctcaagtgcaactctgagttctggagcgccacgtcgggcagccacgccccagcctcagacgacacccccgagttctgtgcagccttgcgcagctacgccctgtgcacgcggcggacggcccgcacctgccggggtgacctggcctaccactcggccgtccatggcatagaggacctcatgagccagcacaactgctccaaggatggccccacctcgcagccacgcctgcgcacgctcccaccggccggagacagccaggagcgctcggacagccccgagatctgccattacgagaagagctttcacaagcactcggccacccccaactacacgcactgtggcctcttcggggacccacacctcaggactttcaccgaccgcttccagacctgcaaggtgcagggcgcctggccgctcatcgacaataattacctgaacgtgcaggtcaccaacacgcctgtgctgcccggctcagcggccactgccaccagcaagctcaccatcatcttcaagaacttccaggagtgtgtggaccagaaggtgtaccaggctgagatggacgagctcccggccgccttcgtggatggctctaagaacggtggggacaagcacggggccaacagcctgaagatcactgagaaggtgtcaggccagcacgtggagatccaggccaagtacatcggcaccaccatcgtggtgcgccaggtgggccgctacctgacctttgccgtccgcatgccagaggaagtggtcaatgctgtggaggactgggacagccagggtctctacctctgcctgcggggctgccccctcaaccagcagatcgacttccaggccttccacaccaatgctgagggcaccggtgcccgcaggctggcagccgccagccctgcacccacagcccccgagaccttcccatacgagacagccgtggccaagtgcaaggagaagctgccggtggaggacctgtactaccaggcctgcgtcttcgacctcctcaccacgggcgacgtgaacttcacactggccgcctactacgcgttggaggatgtcaagatgctccactccaacaaagacaaactgcacctgtatgagaggactcgggacctgccaggcagggcggctgcggggctgcccctggccccccggcccctcctgggcgccctcgtcccgctcctggccctgctccctgtgttctgctagacgcgtagatgtggagggaggcgcgggctccgtcctctcggcttccccatgtgtgggctgggaccgcccacggggtgcagatctcctggcgtgtccaccatgctccctctccctgctggttttagttggtccctatgttggaagtaaaaagtgaagcactttattttggttgtgtttgctcacgttctgcttggaagtggggacccctcactgcgtccacgtgtctgcgacctgtgtggagtgtcaccgcgtgtacatactgtaaattatttattaatggctaaatgcaagtaaagtttggtttttttgttatttgt

SEQ ID NO: 23932 - DNA, 3202 bp, Homo sapiens
cgagcgctggctgcgccgcccgagccgctgggccggggaagcactggccgttcgctcccgggccggctccgccaggcgctcgcaggcatgcagcccgggagcaggaggcgctccccgggccgctgctgagccggccggggcggcggggaccagcgccagcggagcccctcccaccttgccccggggcagacgagcggcgccccgacaccccctcttctcccgcagccccgccagcgccaccccccgcgggccgcaggggctcatgcagccgccaagggagaggctagtggtaacaggccgagctggatggatgggtatggggagaggggcaggacgttcagccctgggattctggccgaccctcgccttccttctctgcagcttccccgcagccacctccccgtgcaagatcctcaagtgcaactctgagttctggagcgccacgtcgggcagccacgccccagcctcagacgacacccccgagttctgtgcagccttgcgcagctacgccctgtgcacgcggcggacggcccgcacctgccggggtgacctggcctaccactcggccgtccatggcatagaggacctcatgagccagcacaactgctccaaggatggccccacctcgcagccacgcctgcgcacgctcccaccggccggagacagccaggagcgctcggacagccccgagatctgccattacgagaagagctttcacaagcactcggccacccccaactacacgcactgtggcctcttcggggacccacacctcaggactttcaccgaccgcttccagacctgcaaggtgcagggcgcctggccgctcatcgacaataattacctgaacgtgcaggtcaccaacacgcctgtgctgcccggctcagcggccactgccaccagcaagctcaccatcatcttcaagaacttccaggagtgtgtggaccagaaggtgtaccaggctgagatggacgagctcccggccgccttcgtggatggctctaagaacggtggggacaagcacggggccaacagcctgaagatcactgagaaggtgtcaggccagcacgtggagatccaggccaagtacatcggcaccaccatcgtggtgcgccaggtgggccgctacctgacctttgccgtccgcatgccagaggaagtggtcaatgctgtggaggactgggacagccagggtctctacctctgcctgcggggctgccccctcaaccagcagatcgacttccaggccttccacaccaatgctgagggcaccggtgcccgcaggctggcagccgccagccctgcacccacagcccccgagaccttcccatacgagacagccgtggccaagtgcaaggagaagctgccggtggaggacctgtactaccaggcctgcgtcttcgacctcctcaccacgggcgacgtgaacttcacactggccgcctactacgcgttggaggatgtcaagatgctccactccaacaaagacaaactgcacctgtatgagaggactcgggacctgccaggcagggcggctgcggggctgcccctggccccccggcccctcctgggcgccctcgtcccgctcctggccctgctccctgtgttctgctagacgcgtagatgtggagggaggcgcgggctccgtcctctcggcttccccatgtgtgggctgggaccgcccacggggtgcagatctcctggcgtgtccaccatggccccgcagaacgccagggaccgcctgctgccaagggctcaggcatggacccctccccttctagtgcacgtgacaaggttgtggtgactggtgccgtgatgtttgacagtagagctgtgtgagagggagagcagctcccctcgccccgcccctgcagtgtgaatgtgtgaaacatcccctcaggctgaagccccccacccccaccagagacacactgggaaccgtcagagtcagctccttccccctcgcaatgcactgaaaggcccggccgactgctgctcgccgatccgtggggccccctgtgcccgccacacgcacgcacacactcttacacgagagcacactcgatccccctaggccagcggggacaccccagccacacagggaggcatccttggggcttggccccaggcagggcaaccccggggcgctgcttggcaccttagcagactgctggaaccttttggccagtaggtcgtgcccgcctggtgccttctggcctgtggcctccctgcccatgttcacctggctgctgtgggtaccagtgcaggtcccggttttcaggcacctgctcagctgcccgtctctggcctgggcccctgccccttccaccctgtgcttagaaagtcgaagtgcttggttctaaatgtctaaacagagaagagatccttgacttctgttcctctccctcctgcagatgcaagagctcctgggcaggggtgcctgggccccagggtgtggcaggagacccagtggatggggccagctggcctgccctgatcctctgcttcctcctcacaaccccaagagcccccagcccggtccatccacgtctggagtctggggagaggagcagggtcttaggactctcagctctgagcatccctggcagggtcttcaacctctaatctcttcccttaagccctgtggccacacagccaggagagacttgccgctggctcccgcctcatttcagcccagggtgctcatccaggggcccagaacagtcccacctgtgctgctatgcccacagcacaaagccaggcttcactcccaaaagtgcagccaggccctggagggtgatcctgccagcagccctacagctccacaccctacccacccatcggcagcccctctgctgttccccagggacctctcatacactggccaggaggctgcagaacgtgtgtctccccctccctccaagaggtcctgctccctctgccagaaccgtgtgtgggcgggtgggagggcgctcggggcccggcccctccctctccctgctggttttagttggtccctatgttggaagtaaaaagtgaagcactttattttggttgtgtttgctcacgttctgcttggaagtggggacccctcactgcgtccacgtgtctgcgacctgtgtggagtgtcaccgcgtgtacatactgtaaattatttattaatggctaaatgcaagtaaagtttggtttttttgttatttgt

SEQ ID NO: 23933 - DNA, 1945 bp, Homo sapiens
cgcccgcggccgaggtggacggagcctcccggctcgctgctcccgccggcggagcgaggctgccctttcttcgcagcgtgatttattttcttctcctttttttctgaactcttcttccagggagaggctagtggtaacaggccgagctggatggatgggtatggggagaggggcaggacgttcagccctgggattctggccgaccctcgccttccttctctgcagcttccccgcagccacctccccgtgcaagatcctcaagtgcaactctgagttctggagcgccacgtcgggcagccacgccccagcctcagacgacacccccgagttctgtgcagccttgcgcagctacgccctgtgcacgcggcggacggcccgcacctgccggggtgacctggcctaccactcggccgtccatggcatagaggacctcatgagccagcacaactgctccaaggatggccccacctcgcagccacgcctgcgcacgctcccaccggccggagacagccaggagcgctcggacagccccgagatctgccattacgagaagagctttcacaagcactcggccacccccaactacacgcactgtggcctcttcggggacccacacctcaggactttcaccgaccgcttccagacctgcaaggtgcagggcgcctggccgctcatcgacaataattacctgaacgtgcaggtcaccaacacgcctgtgctgcccggctcagcggccactgccaccagcaagctcaccatcatcttcaagaacttccaggagtgtgtggaccagaaggtgtaccaggctgagatggacgagctcccggccgccttcgtggatggctctaagaacggtggggacaagcacggggccaacagcctgaagatcactgagaaggtgtcaggccagcacgtggagatccaggccaagtacatcggcaccaccatcgtggtgcgccaggtgggccgctacctgacctttgccgtccgcatgccagaggaagtggtcaatgctgtggaggactgggacagccagggtctctacctctgcctgcggggctgccccctcaaccagcagatcgacttccaggccttccacaccaatgctgagggcaccggtgcccgcaggctggcagccgccagccctgcacccacagcccccgagaccttcccatacgagacagccgtggccaagtgcaaggagaagctgccggtggaggacctgtactaccaggcctgcgtcttcgacctcctcaccacgggcgacgtgaacttcacactggccgcctactacgcgttggaggatgtcaagatgctccactccaacaaagacaaactgcacctgtatgagaggactcgggacctgccaggcagggcggctgcggggctgcccctggccccccggcccctcctgggcgccctcgtcccgctcctggccctgctccctgtgttctgctagacgcgtagatgtggagggaggcgcgggctccgtcctctcggcttccccatgtgtgggctgggaccgcccacggggtgcagatctcctggcgtgtccaccatggccccgcagaacgccagggaccgcctgctgccaagggctcaggcatggacccctccccttctagtgcacgtgacaaggttgtggtgactggtgccgtgatgtttgacagtagagctgtgtgagagggagagcagctcccctcgccccgcccctgcagtgtgaatgtgtgctccctctccctgctggttttagttggtccctatgttggaagtaaaaagtgaagcactttattttggttgtgtttgctcacgttctgcttggaagtggggacccctcactgcgtccacgtgtctgcgacctgtgtggagtgtcaccgcgtgtacatactgtaaattatttattaatggctaaatgcaagtaaagtttggtttttttgttatttgt

SEQ ID NO: 23934 - DNA, 1152 bp, Homo sapiens
cgcccgcggccgaggtggacggagcctcccggctcgctgctcccgccggcggagcgaggctgccctttcttcgcagcgtgatttattttcttctcctttttttctgaactcttcttccagggagaggctagtggtaacaggccgagctggatggatgggtatggggagaggggcaggacgttcagccctgggattctggccgaccctcgccttccttctctgcagcttccccgcagccacctccccgtgcaagatcctcaagtgcaactctgagttctggagcgccacgtcgggcagccacgccccagcctcagacgacacccccgagttctgtgcagccttgcgcagctacgccctgtgcacgcggcggacggcccgcacctgccggggtgacctggcctaccactcggccgtccatggcatagaggacctcatgagccagcacaactgctccaaggatggccccacctcgcagccacgcctgcgcacgctcccaccggccggagacagccaggagcgctcggacagccccgagatctgccattacgagaagagctttcacaagcactcggccacccccaactacacgcactgtggcctcttcggggacccacacctcaggactttcaccgaccgcttccagacctgcaaggtgcagggcgcctggccgctcatcgacaataattacctgaacgtgcaggtcaccaacacgcctgtgctgcccggctcagcggccactgccaccagcaagctcaccatcatcttcaagaacttccaggagtgtgtggaccagaaggtgtaccaggctgagatggacgagctcccggccgccttcgtggatggctctaagaacgtgtctccccctccctccaagaggtcctgctccctctgccagaaccgtgtgtgggcgggtgggagggcgctcggggcccggcccctccctctccctgctggttttagttggtccctatgttggaagtaaaaagtgaagcactttattttggttgtgtttgctcacgttctgcttggaagtggggacccctcactgcgtccacgtgtctgcgacctgtgtggagtgtcaccgcgtgtacatactgtaaattatttattaatggctaaatgcaagtaaagtttggtttttttgttatttgt

SEQ ID NO: 23935 - DNA, 325 bp, Homo sapiens
aggcatttgtggaatatccaagctgctttaatatggcttatgtatccagagagaaatgcggattttgtttctttgcctataattgttttatttttatttatttatcttttggagacagggtctcactctgtccatgctgtactgcagtggcctgatgtaataactcactgtggcctggaactcctgggctgaagcagtcgtcccacctcagcctcccaactactcgggaggctgagcatgggaatcgcttgaacccaggagatggaggttgccgtgagccaagatcacaccactgcactccagcctgggcaacagagcgagactc

SEQ ID NO: 23936 - DNA, 421 bp, Homo sapiens
tggtctcaatctcctgacctcgtgatccgcctgcctcggcctcccaaagtgctgggactacaggagcccgccatcacgcccggctaattttttgtatttttagtagagacggggcttcaccgtgttagccaggatggtctcgatctcctgacctcatgatctgccctcctcggcctcccaaagtgcttttcatttttactttaaaggctcgccacatggacaaaggccaggcggcttcacacactcagtcgactccaggtacagacccctgaccttttcagggctcttcgcatgttctggcctccctggcgtagtgccccccacaaaacaggggcatcatggccaggcgcggtggctcacgcctgtaatcccagcattttgggaggctgaggcgggaggatttcttgagcccaggagtttg

SEQ ID NO: 23937 - DNA, 292 bp, Homo sapiens
accactcccattactcagtactcagctcactactgtacttggcacctagccagatcatagcaagatcaccgtctgttgcattgacttgctgttgaggatagattcctatggtctttctcaatcatctcctttacaaacctccctgaagagccatatgcaggcatgaatgatgatcaatacacggtccctgccctcaagaaggtcacagtctagtactggattcaggcatacgcacaaataattgtgaaactctgtggtgttggtctatcaggaacatcacacgggatcgcca

SEQ ID NO: 23938 - DNA, 1357 bp, Homo sapiens
  misc_feature (2)..(2): n is a, c, g, or t
anataaaagaaaagaagaggaaaagataactctgttataccaattactaggtatgtgaaagagaaaacaaccaacagtgtataagggcgacagaatcaaggctgggatatggaaggaggggaggaagagaggaagagagaacagaaaatatttttccaagttgtggttcttgatccaagatctgaaaatataaggtttaacttgccaaagtagggcaatggcttgccaatgggacaacggctgctttgtaaaaccatttgctctgagttcagataagtaaaaactatttctcctattttccttgactctctcatgcatgatctcgggttctctgtattttccagttttggatgtcaccacctatatcagttagagtccacctgctatagtaaacaaccgacacaattacagtgatttaaataagtaaactctatttctgtatgtaataatagtcctgttagttccagttatcaggcagctttgacccaggaagacattcacaaaatcagacaattttccttctgggttcctactattcaatagtttgtgcccttgtgtattcagtcaaaaataaactgcttccacatcttcattccaacccatgggagggggaaaaagactcacccatacaaaaaagcttaacttgaatcatccagaagtagcatccaatatctccactcacacacattgttccaaacatgaggtacatatgcacacctagccagaggaaagccagggacatacaggttttagctggatggtcaaatgtttagataaagatatatttatagggaataaaggaaatgaatttagggagaaaagcactacctgtctgatttctgatttcttcaagttaccttctgttcaagttggctttggctatgcagtcagtggtttgctttcattatgcatttcctgaccttagtcctatccctggttccatttttatcatcccattactatctttcatcctctcatgtatgcctttttctttattttctgattccactcccacctctcaacccaaaattttgctgtaacctctttcagcagtatattttggtacctggtacagtcaacgtgctgagtgttagggttccattaaaggaaaaatatacattttacataatttcataaagaaagatttcttacagttaagtaaattaaacaggatatcatgtacataatgcatttgatttagaagttgagttttatgatgtttagaaactgtaacaataaggataaaagataattctagaaaaattcatacattcaaaaaatactattgtaataaaagtataaaatttctataataaagagaaagtaatgcactttgttggattttgtgcatgcaata

SEQ ID NO: 23939 - DNA, 1322 bp, Homo sapiens
  misc_feature (2)..(2): n is a, c, g, or t
anataaaagaaaagaagaggaaaagataactctgttataccaattactaggtatgtgaaagagaaaacaaccaacagtgtataagggcgacagaatcaaggctgggatatggaaggaggggaggaagagaggaagagagaacagaaaatatttttccaagttgtggttcttgatccaagatctgaaaatataaggtttaacttgccaaagtagggcaatggcttgccaatgggacaacggctgctttgtaaaaccatttgctctgagttcagataagtaaaaactatttctcctattttccttgactctctcatgcatgatctcgggttctctgtattttccagttttggatgtcaccacctatatcagttagagtccacctgctatagtaaacaaccgacacaattacagtgatttaaataagtaaactctatttctgtatgtaataatagtcctgttagttccagttatcaggcagctttgacccaggaagacattcacaaaatcagacaattttccttctgggttcctactattcaatagtttgtgcccttgtgtattcagtcaaaaataaactgcttccacatcttcattccaacccatgggagggggaaaaagactcacccatacaaaaaagcttaacttgaatcatccagaagtagcatccaatatctccactcacacacattgttccaaacatgaggtacatatgcacacctagccagaggaaagccagggacatacaggttttagctggatggtcaaatgtttagataaagatatatttatagggaataaaggaaatgaatttagggagaaaagcactacctgtctgatttctgatttcttcaagttaccttctgttcaagttggctttggctatgcagtcagtggtttgctttcattatgcatttcctgaccttagtcctatccctggttccatttttatcatcccattactatctttcatcctctcatgtatgcctttttctttattttctgattccactcccacctctcaacccaaaattttgctgtaacctctttcagcagtatattttggtacctggtacagtcaacgtgctgagtgttagggttccattaaaggaaaaatatacattttacataatttcataaagaaagatttcttacagttaagtaaattaaacaggatatcatgtacataatgcatttgatttagaagttgagttttatgatgtttagaaactgtaacaataaggataaaagataattctagaaaaattcatacattcaaaaaatactattgtaataaaagtataaaatttctataataaagagaa

SEQ ID NO: 23940 - DNA, 388 bp, Homo sapiens
gccacaattggagttctaaaccccttataataagcacatatattagatatagtcatgtgttgattcaataacctgatttcttccctcctttggctttatcacatttgtcatataactgtcaagtctccctgagtatttgcccaacatccattgagcacatggcaaggagaaaatgtggaggattttatggagatggtttgaaaggggattcccatgccttctgtccacgtttctgtggccaacagtcagtcacatgatcccacttagatgcaaggggttctatataatgtagtccctggctcaggggatgccccagagacagttctatactctaaaagaggagtatgaatccttagtagacagttttccaactgtaccactctgtgtg

SEQ ID NO: 23941 - DNA, 5634 bp, Homo sapiens
  misc_feature (5625)..(5626): n is a, c, g, or t
  misc_feature (5628)..(5628): n is a, c, g, or t
  misc_feature (5631)..(5631): n is a, c, g, or t
ggagcacaaaccctattgtgaactatgcatgcgagtaatgtaggttgcccgctccttgtgagaatctaattaatgcctgattatctgaggtggaacagtttcatcctggtctgtggaaaaattgtcttccacgaaactagtccctggtgccaaaaatcttggagactgctgacctagagaacccctaccagagttcttgggaaatctgtatctgattagagataagtttttcaaacaaagcacagtgaccgtagaagggaagtttttcagctcatgaataatgtcaagaatgcagaagagcaaaagacaaggatacgtacatagagatttgatggaccgctttaagctcagcccatgtgccactcttcctctctcccctaaacacaccacagtctgtgctttgaccatgaatcaggcgatactttgctgtggggctgaagtgggggaagtccttcagttttattgtcagctctcttttccagtcatgtgtctagtggtatgggcatgagttctgaggatgacaaagatggtctgtgcttagatcttggccctgacagtagcttactgtgtgccttgagggagacacttaacctgtaagcctcaatgaactcatctgtaaaatgagggtcatagcactcatctagaagagtggtgaagttcatatgaattgagaaatagcagctgcccaataaatgatcctttctatgtcctttcccagggccatttgctgaggaaaaaaggaccttaccatggctaccagctatttcaggataggtatctttacccattcctattcctcagtgccacctcatcccccttggaattcagtaccaaacccgaacaggttgcttttcactggagtgtttcctgagctgccagatgtgcccctgagtggagatgggaatcagtgttatcttccccagggatgctgattctactccaggctggcaggagacattgtggtcctgacatggcagccaaccagatagcaatggtcttggcacccccaaagcttactgagagtaggacattctatagttgaagatgaggggagcatcttcaactgctgaaaccacaccttggcctggctgtacctgctcctatcttgaggccaaaataggagggagcacaaaagaacatggtggggtagatctgtgtgcacgtgacaccagtgaggtgctggagtgggccgtgagagtctttagtgagaatatgttggctcatgttttggaaacctttgaaaattgtcctgtggtaagggaatgagaacagtacctctctctttgtgctgttgacaggatgagttcatgtctgtcaggtgttttagaacagtgactcccatagtgctcagtaagtgtttccaagctagcagctctggctcagcaattccagtttgtacatgtcccccaaggaaatgactaagtatgtgcagaaagcattctttataacagggttagaattggaaacaacctaaatttccaacaaaaggggagattggctgattgattcatgggatggaatagtatgtgatcacgaaataagtcattttaagacaaagattttatggtaaatttattaagtgaataaacaaaggttttaaaacaatacagaatggaatatgcttttttttttttttttttttcctcctagagacaggatctccatatgttgcccaggctggtcttgtgcgccaccatgtctgggtaaagaatggatctatttttaaaaggaaactttttattttggagtaattttaagtttacagaaaggttctaaaaatagtatagagagtttctgtatatacttcacctagtttcctctaatgttaacattttacttaagtatggtacatttgtcaaaactaagagattaacattggtatattactagactgactatatttggttttcagtagtttttctactaatgtcttttctatccaggctccaaccctttataccacattgcattttttttttttttatttaaaagtgtatgtacatagaaaagcatccgggtgcatatagatgaaaatgttaacaatgatcatagctgagtggttgaattaagggagatttttgttttaaagttcttagtatgtcttctaatttttctatgtttaacatgtcacataattttaaaacacaaaactaacaattcaggctgagttggtgccctctgattaccccttgtatggctatactgtgtatgtttagctgagtcttttcaacactcagctaaagacggcaaatgaataagtctgcctcatccctctttccctatcatgcagcccagggcccggcacagaggaggcactgataatatctagttgaataatgggtgaagtcagagaagtttattgctaccaactctcggagataaactagtcttagcactctttttcagcttaaggaaacccaggcttatgtttccccagtttagtgaccccagcaggacaggacctgtttttaaagtttgcagtctcagggctgacttttatgcccatcgctgaattagttgctgtggccaggagcatggaatatgcctcttggccaggcttgggtccactgaccaggcctttagatggcttcccaaagaaaagtcagggttctgctatccaaaggaggtaagatggatactgaggaagttaaatacaacatcagagccatcccctaaacacaggcattttaatctctaattccttttgccatactatatgtcatgcttgggctccctgatgagaatagtaccacattaatgctattcatcattaaatcctagcatccagcacagtgcttgtatgtagcagggacctagtcaacatacaagtgaataaatacatttcttggtgacctaaacaaaatcatttaactagatgtttaaatcagaatgctttgagttgtaaataacagaaaactggctcaataaaggacatttgttgactcatgcaactgaaaagtctagtggagcccagcagtcaggcatggtgtggtcaggacttcacttatgtgccagtctctgactgcccccttggtatcatcaggcttgtctctctcatggtagcaaaatgactgcagcagttccagacgtgacatctgtactccgcaacatccagaacaagagaaaatacagagaccctgtatcacagaattcccagcaaaagtcctgagagtcactgtgaactgaataagattacatgcccacctctgaatcagcaattagtggcaagggttgtttactggcttagcctagatcatgtacctcacccttagaactggggagataggggagggagagagtagaatcagcttccctgaaactacatggattcctgatgggaactgagactttggggaaggggaaagcagtccggatcctgaggatgtaaccaataggaatccagctcaattgaataccctgaattgtgtggcataaacaagggctgcaggagttagagggcaatgagtgaaggttgcatcagtcagagcagggaggcttcatggaggagaatgagagactggagccaaaccctgaagagataaaagatttgggcaatggggtagggaggtggaaaggaaggaacattgcccatgtgctgtgccagacatcatactaaaccctctgtatgccgggcgtggtggctcacgcctgtaatcccaacactttgggaggctgagacaggtggatcacctgaggtcaggagttcgagacaagattggccaacatggagaaaccccgtctctacaaaaatacaaaaattagtcaggcatggtggtgcactcctttagtcccagctactcaggagactgaggtgggggcattgcctgaacccgggaggcagaggttgcggtgagccgagattgtgcctctgcactgcagcctgggtgataaagcaaaactccatctcaaaaaaaaaaaaaaaattctctgtatgcattatctcagttaacccttacaatgacctgcaagtttggtatcatcattatccccattttacagttgagaaactgaaacccaggggtcacacagtaagtgttgaggttgagacttggacccagcttgtctggctgagaagcttgtgcctggagctatgacgctggtgagtaaagtagacagtggtcacctgggaagtttgcattagtgtgaagtaagtggcctgacctcaggtcatcacagaggtagtgcagaatgtgaagttcttccctcagctgtgctgtttttggggcagcggggatcagaaccaaagcacaattcctttgaaagtttgccaaactttgaccttaaccatgtgaaaccttgtgcctttcctgctcaccagatggattcttcagacaaggcctaggtgctggttctgctccttactaggtggccttgaatgtatcattcacagtctttgagcctcagtttccctatttgcaaaatagacacagtaataccacatttattgattgaacagatttactcttgccttatctttgctgggcctgggagaccaagaaacaaagatgaatgagacagtgcctgcccccaaggacctcccagtctagcagaggagatggatataaaatcagagagacttatggagagcagtggaaaacatagatcagggagcgatcaacttagcttaagtggatctgggaaggcctcaaagtaggggacatctgagccacaccttgaatggttagtaagagtttgccaggcagccacttggggcagagttttgtgagaatcagataagctgtgtcaaagtaaatgttttataaattgggctgcctttcccttctaggttcatacctcagcttgcattgctgctgtaggaaacataagaaatgccctagaaacccctccctgggctgagagttcctagaattaggggccggggaagagttttgaatgcatgctaaagtctaggctcatcatcttgccacacaaggcctgtttggcttcatctttctcttaattttatgctcacgcaaaacaaccacctagagttccatgaaatcattacctccctgtttctcctcctatgtcttcttcttctccacacccacctggcaacctctaatttgtttcctggaaatgtgattgacccacactccactcacgcagcctcagcacccttttatttgtaaatacatggactcatcttctccaggggactggggctccttcaaagacaaagagtaggtctcaatctctaccctgccacacctagcaccaactgatcagagctgcatctctgatgcagggataggtagttgggagtctcacttcttccacaaacattgagcttctgccacaggcctgctggcgtcaagtcaggcaaaaaggattcaggaagcaaagggtacaatccaaccctggaagcagtcacagtccagagagaaactcacatgtaaacagtccattgtaatactgggtgatgtgtgctgggatgaaaggatatctggaacatgaaggggacacaggagagatcaactactttgggcacacgggaaattgagcaggaatctgctgggtggtgaaagacagacactagagcttgtacgaggcatggaagcatgaaaaagcacagcaggttccagggtcagtgagtatgcgtatggctgaaggaacatgggaagnntngangca

SEQ ID NO: 23942 - DNA, 512 bp, Homo sapiens
gttttcaggcatctgagggcagcaggcacctggaaatccagacttctaagacccctgtggccattttcagaaatgaagcaggtcccccaggcatgaaaggtacctggagattcaagagtatgactgcccctgggcctctgtggcttgaaaatattatcagagcaaaacttgtcattccttattcagagctaaagtgctcactgcacatactcctgggagaagtaacaggacagtcagctctgacgtgactgacacaggcagaagtgatttgtggaagcaggcttggacgggggagcaattctggatatttcatggggaaaacaaagagctggaagaaggaggtagtgcagaggccctcagaaggggaaggacctgggacccacacaaagacaggctttgcttctttcatgttttacttggggccaaacttactttctcctgtgtagctgattctctggtttgtgtgcagaaacactgccaatgctgccatttaaataaggatttcaggaagt

SEQ ID NO: 23943 - DNA, 399 bp, Homo sapiens
gctgtgagcctgaatgcgagtccggttggttgtgcagttatgaacctgtgtgtacatctgtgtgcctaagacgctgggcaactgtacccacatgaccgatgtgtgtgaacgactgtgtgcctgtgtgtctggatctgcgcgtgggtgtagttcgtgtggctgtgtaaaccgcatgcataggtatacatgtacctatgtctcaggctgtgtgcgtcctactgcgatggtacgagagtgtgggtgtgatggtgtatgtgatcctgtgtctgcgtgtccgtacatttgagtgggtgttgtgcgtgtgactgtgtaaactgcgaacatgtacgtgtgcccgcccgtaggtattaccgtgtacgtgtgtctccgtgtgcctgtgaggggtggggtctgcgcggg

SEQ ID NO: 23944 - DNA, 1134 bp, Homo sapiens
gtactaaagtaattgtggtctttgccgttaaaagtagtaaatccatggagaatgggttaaataaatgatagtttatgtatacacacaaataccatgtggctggtaaaaatgatggtgtaaattatatttacagactgataaacgtaaaaagtatctgggacatagcattattgaaaagaaagcaggctagtgaatactataattattttgtaaaagtctcttatggacataagttatatatttacatggccatattttgcacaggaaatatgaaaaagtatatatatcaaacagtaatggcttatttttatcttctgggagttttgcaggtgcttccctctttacaccattatatgtcatctgaagttttgttctgattctgtattatttcatttctaaaagaaaagccccaaaaccaagtgctgttttcctggtctgtggaaacagagtctccgaggaattaggctagacatggtaagaacaaagttctgttgtgataaaagctttggcctgaggttccaaccattcagtttgccagctcagacttgatcttgaatgaaggcggggttctgtgactggagaccatttctctccttttgtatttgttggtgtgtccaaaaacctcagatctcccagcttcaggcttctttgagggcagtgctaaattggttgaaaccttatttgaggcagttcctgaaaagggtaggtgaaatttcctgctgataaaaggcatcttgtgtcttgttcatccttagcaaattgccaattagcaaagaagagagggcagatgaagtaccagccaatttgaaattggtgtggacttccatcaaggtatattaattcactttacctagatgattcgaaattagttgcttttttcttttaatcctaaaaggataattttcttcatgttcttcttgtcatgtcagccaaatcctatagtgtcaactttcagtaaatgtatcttagatataactatggaccaatctagatctttctctctctatcatctatacagtttagagattttaaaactcttaccacttagtttgaaattttattttaatttataaaatgatatattcttatgtaaaaaattcagacaataaagatgtatttaaagtaaaaggcaaa

SEQ ID NO: 23945 - DNA, 381 bp, Homo sapiens
ccagtcctgcctgtctttgctggtggggacccagttcttggatctagaaaggggccatgagagatttgacaaaaggggtgatattttaatgggccaccaaggttttgtttaagacctgtgaatatttgaaaacaaagagaaggaactcaatagagagggagacactaatgatgaagaggcagaggggagcacaggacttgaggcagaagtggaagggttcatcttcaataatatgaggtgaaatccttcttcctctgaattaagacaaaggaaatagtaaatgaggctgggtcccaagattcttaagttggaagagacgtgagtaggagaagcttatagtaagtggtctggatctttttagcaatacagaaagccaggtgg

SEQ ID NO: 23946 - DNA, 347 bp, Homo sapiens
aaacaagaaccatgacaaccctggccccagcgatgcgcttggtccagggagcgagaataaagttagtggagaatggagtcacaagttgggattcattctccatgtccccactccccgaacgcatctcctggtaatgagctggtgcttgtgctaaacgcctgagaattcttggaggccggtgtctttccccctcactccccgtacttaccgcaggcactttaaattgaacctgcgcattttgtttctttactcctaggacttggatttcagacctttgtcctgctcccggtccccccagatgggtccccgggggggcgttgggggctgtcgctgggctttgcgggcag

SEQ ID NO: 23947 - DNA, 458 bp, Homo sapiens
tcctgtctgcccttgatggagccactggtggggttacttgctggcggtcggccactttcgcccctccctcgccagcccgccagctccctaaggttttgtggttttttgtcaccaccacacctcagtgttgagctaagtgaggacgtccccccagcaaatgtattggacggaaggaaacggtgtgcgggaggaggcggaggaaagtaggccacccggggctcaagtgagaacaagcaccaagccctgtggatttcagaagaactccacctccacggagtcctcaaagatcttctcctgaactccgcactccccagccttgagaggagacacaggagctggaggaagcagctttatccctcactttgtggttcagtccagcctgttttccaaggagtaaagggcagtggaaggataactaagaaaataataataacaaatgaaagcatctctgtggagct

SEQ ID NO: 23948 - DNA, 891 bp, Homo sapiens
aaaaaaataaaataaaataaataataaataataaaattgtcttcatcttgatccaaggaaaccaaagttcacatattgcattaggttttgtttcttgagtcttaatccagagcagcatttactctatttacttgtggggtgggagcatttactagttaaggaaacagttgcatgtatgtcctacttcttggatttgtttgtttcctattaatgcgtttaacttgtttcgatatagcagtagttctcaacggaggacaattttgtctccctctcttccaggggacatttgacaatgtctagagagatttttagtcatcacaatctagtgagtagaggccagggatgttattaaacatctacaatgcacagaacagcccccaccacaaataatttcctggtttctaatgtcaatagtgctgagattgagaaactgtcagcctatcccatgtatttcctgaagaatggaagttagcactaaaagcttggttagagtcaagataactctttttgcttaaaatagttaaattgcccaggagtgccggtattctgttttgatctgggtgttggttacaagagtatatcattttgtgaaaatttatatgtgagctctacactttaaaaaatgtgtgttatttttaattttaaaagtttacattaaaaaaagaaacctctttattgtgttgggtcccttcctctttttgtctgctacttcacacttcttaaatagttgaataaatctttaaagcctcactcccttttaaagttccttaatactcttttttttttttttttcccaatgtgagagactggtagagatgggggaaaaaatgggtgccttttgaactcattgttgggatggttgagtgtctgttagggaagtcagagtgctgg

SEQ ID NO: 23949 - DNA, 1020 bp, Homo sapiens
  misc_feature (36)..(36): n is a, c, g, or t
  misc_feature (41)..(41): n is a, c, g, or t
  misc_feature (46)..(46): n is a, c, g, or t
  misc_feature (61)..(61): n is a, c, g, or t
  misc_feature (69)..(69): n is a, c, g, or t
  misc_feature (72)..(72): n is a, c, g, or t
  misc_feature (81)..(81): n is a, c, g, or t
  misc_feature (87)..(87): n is a, c, g, or t
  misc_feature (94)..(94): n is a, c, g, or t
  misc_feature (98)..(98): n is a, c, g, or t
  misc_feature (110)..(110): n is a, c, g, or t
  misc_feature (118)..(118): n is a, c, g, or t
  misc_feature (122)..(122): n is a, c, g, or t
  misc_feature (140)..(140): n is a, c, g, or t
  misc_feature (142)..(142): n is a, c, g, or t
  misc_feature (153)..(153): n is a, c, g, or t
  misc_feature (163)..(163): n is a, c, g, or t
  misc_feature (180)..(180): n is a, c, g, or t
taaccgaagccgacaccagttgaatttcagtattantttcnagtangccggcaaagctttnagctcctngcnagatcttantggagncatcacnagtnggtagtcagggntcctttanctgnaccactggggacttaggngnaaagaaaaganctcaaaagangggtaaaggaaggcaantggcaccagtaatagtactctctcggggcccggattagacagcaaaccagggaagcgcagtcggaccccttctaatgatgggaaaagcaaagataagcctccaaagcggaagaaggcagacactgagggaaagtctccatctcatagttcttctaacagaccttttaccccacctaccagtacaggtggatctaaatcgccaggcagtgcaggaagatctcagactcccccaggtgttgccacaccacccatttcccaaaatcactattcagattcctaagggaacagtgatggtgggcaagccttcctctcacagtcagtataccagcagtggttctgtgtcttcctcaggcagcaaaagccaccatagccattcttcctcctcttcctcatctgcttccacctcagggaagatgaaaagcagtaaatcagaaggttcatcaagttccaagttaagtagcagtatgtattctagccaggggtcttctggatctagccagtccaaaaattcatcccagtctggggggaagccaggctcctctcccataaccaagcatggactgagcagtggctctagcagcaccaagatgaaacctcaaggaaagccatcatcacttatgaatccttctttaagtaaaccaaacatatccccttctcattcaaggccacctgggaggctctgacaagctttgcctctccaatgaagcctgttcctggaactcctccatcctctaaagccaagtcccctatcagttcaggttctggtggttctcatatgtctggaactagttcaagctctggctagacccaggggaaataccaaggttgagggcaaaatga

SEQ ID NO: 23950 - DNA, 861 bp, Homo sapiens
ttcacgcttaattcactttatttttcttgtataaaaaccctatgttgtagccacagctggagcctgagtccgctgcacggagactctggtgtgggtcttgacgaggtggtcagtgaactcctgatagggagacttggtgaatacagtctccttccagaggtcgggggtcaggtagctgtaggtcttagaaatggcatcaaaggtggccttggcgaagttgcccagggtggcagtgcagccccgggctgatggtgtagcagtcatcgataccagccatcatgagcagcttcttaggcacaggtgcggagacgatgccagtgcccctgggtgcagggatgaggcgtaccagcagtggttctgtgtcttcctcaggcagcaaaagccaccatagccattcttcctcctcttcctcatctgcttccacctcagggaagatgaaaagcagtaaatcagaaggttcatcaagttccaagttaagtagcagtatgtattctagccaggggtcttctggatctagccagtccaaaaattcatcccagtctggggggaagccaggctcctctcccataaccaagcatggactgagcagtggctctagcagcaccaagatgaaacctcaaggaaagccatcatcacttatgaatccttctttaagtaaaccaaacatatccccttctcattcaaggccacctgggaggctctgacaagctttgcctctccaatgaagcctgttcctggaactcctccatcctctaaagccaagtcccctatcagttcaggttctggtggttctcatatgtctggaactagttcaagctctggctagacccaggggaaataccaaggttgagggcaaaatga

SEQ ID NO: 23951 - DNA, 817 bp, Homo sapiens
  misc_feature (1)..(2): n is a, c, g, or t
  misc_feature (4)..(4): n is a, c, g, or t
  misc_feature (6)..(9): n is a, c, g, or t
nncncnnnnagggttcccaaatctggccagtctttctgccctttcccttgcgggtcgcaccccgcccaggcccctctcccgccccaggtctctcagtcttttttctcagggcgtgtagcttcctgcacacccggaagcagatcgcgcggggaaaagatcacagcgctgcgcgtcagtttccgtctacctggactaaacatttgcttcgccccgtctgcctgaatcgaacgtgcacttggcagtcttcccttgtccatacccgtttcctggggatcgctacggaccttaaaataccagcaacagccccttcgccccaaggtcttgctctgtcagactagagtacagtgccatgatctccgctcactgcagcctcaacctcctgggctcaagcagtctttctgcctcagagtgctgggattacagacgggagccaccacgccaggcctacgagatttgacttgtaaagaattaattatattgactgagagagaagcccagaagaggaagaagaggaaagaaaaggagtcagggatggctcttacacagggacctttgacattcagggatgtagccatagaattctctcaggaggagtggaaatccctggaccctgtgcagaaagctttgtactgggatgtgatgttggagaactacaggaacctggtcttcctgggtaaggataattttgctctagaagttaagatctgccctcgtgtatttttgtattttctctgttgtctttcttgggagcccttccattatttgactgagactgaagccttgttgactcacaaataaaaagcttcataatgctgaa

SEQ ID NO: 23952 - DNA, 845 bp, Homo sapiens
  misc_feature (1)..(2): n is a, c, g, or t
  misc_feature (4)..(4): n is a, c, g, or t
  misc_feature (6)..(9): n is a, c, g, or t
nncncnnnnagggttcccaaatctggccagtctttctgccctttcccttgcgggtcgcaccccgcccaggcccctctcccgccccaggtctctcagtcttttttctcagggcgtgtagcttcctgcacacccggaagcagatcgcgcggggaaaagatcacagcgctgcgcgtcagtttccgtctacctggactaaacatttgcttcgccccgtctgcctgaatcgaacgtgcacttggcagtcttcccttgtccatacccgtttcctggggatcgctacggaccttaaaataccagcaacagccccttcgccccaaggtcttgctctgtcagactagagtacagtgccatgatctccgctcactgcagcctcaacctcctgggctcaagcagtctttctgcctcagagtgctgggattacagacgggagccaccacgccaggcctacgagatttgacttgtaaagaattaattatattgactgagagagaagcccagaagaggaagaagaggaaagaaaaggagtcagggatggctcttacacagggacctttgacattcagggatgtagccatagaattctctcaggaggagtggaaatccctggaccctgtgcagaaagctttgtactgggatgtgatgttggagaactacaggaacctggtcttcctgggtatccttcctaaatgtatgaccaaggaattaccaccaatagggaacagtaatacaggagaaaaatgccaaacagtgacgctggaaagacatgaatgttatgatgttgaaaatttttacttaagggaaatccagaaaaatctacaggaccttgagtttcaatggaaagatgg

SEQ ID NO: 23953 - DNA, 748 bp, Homo sapiens
  misc_feature (1)..(2): n is a, c, g, or t
  misc_feature (4)..(4): n is a, c, g, or t
  misc_feature (6)..(9): n is a, c, g, or t
nncncnnnnagggttcccaaatctggccagtctttctgccctttcccttgcgggtcgcaccccgcccaggcccctctcccgccccaggtctctcagtcttttttctcagggcgtgtagcttcctgcacacccggaagcagatcgcgcggggaaaagatcacagcgctgcgcgtcagtttccgtctacctggactaaacatttgcttcgccccgtctgcctgaatcgaacgtgcacttggcagtcttcccttgtccatacccgtttcctggggatcgctacggaccttaaaataccagcaacagccccttcgccccaaggtcttgctctgtcagactagagtacagtgccatgatctccgctcactgcagcctcaacctcctgggctcaagcagtctttctgcctcagagtgctgggattacagacgggagccaccacgccaggcctacgagatttgacttgtaaagaattaattatattgactgagagagaagcccagaagaggaagaagaggaaagaaaaggagtcagggatggctcttacacagtgcctaaatgaagacgtatgggtcttttactgttttttgctgttacaaagaatgtcaccgtggctgcctgtatgcatgctatctttaccacagatgtctgaagtttcctccaggttgggcagtttaaagagtgagtgcctcttttaggatggcataccacaaaagcaaaaataaataaatgttttcctttatctttttctgg

SEQ ID NO: 23954 - DNA, 496 bp, Homo sapiens
gctgtatcccttcgcataggctgagtcaaaaggcatctagaaagtgcctacccggaactgtgagctcccacctcacttctggaccatgctctgagaactcagcaccctggatttcctggaccaaatgactctgaggccccctacacaggactcaaccccaggcctgtattcatgagagtggactctgactgatgtacacacacgctagaccctgattttgtgtaagggatttgtagactgagcttggatgtgcaggctagaatgtgagacaccttgaagtatgggccaacaccaggcatgggaagagacgagggagtctctgtcatcttgcccaggccccataaataatataggaacctactttattccaatggttctaaatctcttagggagtcaccatcaggttcagaatgtcacccatgggactaactcttctttttattgagacagagtctccttctgtcacccagactggagtgcagtggcacgatcttgg

SEQ ID NO: 23955 - DNA, 565 bp, Homo sapiens
gtcttccttgttgatcaaggttctcgtgactaaatggcattagtttgtgttctcacagataggataggaaaaggaattatacatattgattatgtactatatgtcagaccacttatgtaccttgtttggctctatgattctgaattttttatcaccctatcatcacttctgttcagcccttttcttcccttcccaagttgtttattctgtttgatttttgttctctgctggtagtcagataatctcccaaaaataatagttatcattgattggccacttcctgtgtgtcaagaactgttttatactcttcacatagatggttctcttttgatcctcaaccctgtgagcttatcacttaataaatattgttaagctgcaaaaaaaaaaaggatccaaaaaacagcagattaaacaacaaattactggctttatttttctcaccttaaaaagtctagaggtgagcagtccaatgccactagtgcagctccatagtggcctcagggacccagatgtctcctggttttctgctcttccatacttcgtattggtgttcaccctcgcatct

SEQ ID NO: 23956 - DNA, 388 bp, Homo sapiens
tcaagaccatgccattgcactccagcctgggcaacaaagtgagactctgcttaaaaaaaaaaaaaaaggcagatgtaaaaaaagtaaaattgtgatttcaggaagcccctatcttttctttcaaggcccttatctcaccctataattaagcatatttatgtatttttatttatttagttttgagacatgatcttgctttgtcacccaggctggagtgcagtggcatgatcatggttcactgcagccttagactcctgggctcaagtgatccttccacctcagcctcctgagtggctgggaccacaggcaggcaccaccacacctggctgactttcgtatttttttttggagagatggggtcttgccacgttgcccaggctggtcttga

SEQ ID NO: 23957 - DNA, 395 bp, Homo sapiens
tgtaggagagatgttagccatgtcttgctcagccatcaaagtcttggcagaagacaccttgctcttgtggaatagcatgccctgtgagcagggagttattctaagagagtttctagatgtagtgccaattttggaaagacagctggcaggaattgggcaaagggtcgtcattgacctatatgggtgggagcatttggcttcacagagccctaagcatagattatattccaaaaataatgttatggatgcaacaccatgaaaatcacatgtcatgtcataaccaccatgatgaaatgttggatccatatttagcaattattgtggtctctgctataatactcagttccttacacaagaacttgtctaggattcagcagtttatactgaggtgttca

SEQ ID NO: 23958 - DNA, 180 bp, Homo sapiens
agacagaggagatgttgtgcattgaccattgaatgcaattgggatgggaaggggtgttactaaaagcacaggccatgtcaggcaacctagcgtctggggatctgttttctcatttgcaagacaggaaaaggggccacacctttccccactgggctattacaaggattaactgaggcaggg

SEQ ID NO: 23959 - DNA, 413 bp, Homo sapiens
ccaggaaacatctttttttaaacctgggctttccatgaagaggcttttggattaagtcactattgaaataagtatgccattggaaattcaatggccagaaggtgaatcttttaaattagattcctacatttttttaaaaaagacctttgagatctctcattctaaacaattaatgggaagatcaaattcaaagaaagacatgcaatagtgtcatggccagccctaggaaatcctcttgacataattaagagcaaaaatctaacctaatttaaaatctttgtcagctcaaattgcctgctttaggattccccgcaggatttaaaatggaatgttgctccacctgttgtccggtagttccaatttcacactttcatagccatggcctgggtgtgatttctgctcagggaaccagt

SEQ ID NO: 23960 - DNA, 317 bp, Homo sapiens
  misc_feature (109)..(109): n is a, c, g, or t
  misc_feature (202)..(202): n is a, c, g, or t
  misc_feature (230)..(230): n is a, c, g, or t
  misc_feature (270)..(270): n is a, c, g, or t
caaatatgtgttcgacaattattggacaggtacagaaagctatatgtagaagtacattcatcagagtgtttgcagtgtgggccaggtgcgacggattacaggcgtgacnaccatgcccggccaaagttattattttttttaatgtaaactctgcaggagccagaatcttgtctcaggttcactgttgtattccctgagcctncaatagagcttgatgtataaccgaaacncagccccagaatttgtggtggacgaatgaataaaaagacnccagtgtccggcacatataatgcaggttactaactggtaatgtacta

SEQ ID NO: 23961 - DNA, 252 bp, Homo sapiens
agaaaatacaaattcatacagacaaaaagtacagtagtggttagctaggggtgggaacagggattattgcaaatgggcataagagagcttactgaggggatgaaaatgttctaaaattgattaatggaaatggtagtgccactcagtaataaattaaaaatcactgacttatacacttgaaatgagtgagtttcataatacataaagtatatcttgataaagctgttttaaaagaaaacttgtaagatatag

SEQ ID NO: 23962 - DNA, 323 bp, Homo sapiens
tgaaactggatcctcatctcttaccttacataaaaattaactcaagatggaacaaaaacttaaatctaagacctgaaaccacacagattctagaagataaaattggaaaaagtcttctagacattggcttaggcaaagacttcatgaccaggaacccaaaagcaaatgcaacaaaaacaaagatagacatatgggactcaattaaactaaaaagcttctgcacaacaaaagaaatcatcagcagagttaacagataaccacagagtgggagaaaatctttacaatctatacatcttacaaaggactaatatccagaatctaag

SEQ ID NO: 23963 - DNA, 480 bp, Homo sapiens
agaagaattgtgctttaagatgttaagcaaattgcccaaagtgcaaaaccagtgtgttggagcttgaattccaaaccagatctgcctgagtcaagcttttcttttatgttcttatttactaaaggcttcttgaacagaagtatgtgagagttgggcacatgcagcttggtcaattctatgtaaacccggtcagattctgagtagtgtagatctgataaagtcaatgtgaatttcttatcattcgttgcaagagacttaatgtagcaaaaatcagtatcataggaaacgagatgttactgtggtaggcacactgttctctctcagctacctcatttttgttttattgggtggtggctattgctctggcaactacaaaggcagcatttacttgacacggcgtgtatgcttaaggcagaacactgactgcttttcattgctggcaaatccggacttcatcagtactggctacctgtaaggaat

SEQ ID NO: 23964 - DNA, 403 bp, Homo sapiens
gggcattccaactgcaatgggatacagagctagagatgagtagaggagagagatcaaataagatgaagacaaaaggtcaaggaaacaatggacttagccctcacctgtgggagggggcctgtgtattcaggcagataaagatgatgacaccctttactccaactccctgggactcctttcccacactcctcagaagttgctcccccaccatgcaaacacagcccctacaagctgccctgttcccagtaggaacctatttaattaaatggtttgaatcacctggatttcatcaaaagcatatctctttaatgtttttttgtgtgttgttgacaaaactctgagatactctggtgaccaaagtaaaaacactcttaatccacttaacaataaacagattccagtg

SEQ ID NO: 23965 - DNA, 436 bp, Homo sapiens
agagacctttaatctgtataaggtcctgtgacgttcaatggaactgattttcctgaggagttaggaaattggctctgtgacaatctccatagagaagttctttggacaactgtagcagtgataatttccttgaaagaaatacacaacaaaccaagtaaaaacactgtgaagggcttcacttattgatgtatgtgatgggctgaatatgtcccccagaattcatatgttgaaacttaatcaccaatgtgatagtattaagaggtggagcctttaggaagtgattaagtcataaggctagagctctcatgaatgggattagtgaccttataaaagaggtggaaaggagggtcttaggcctgttttgttttgtttttggctttccacctctgccatgtgaagacacagtgttgtcccttgtgtactttttgcccctcct

SEQ ID NO: 23966 - DNA, 765 bp, Homo sapiens
tatcacatgctatggcatgggggaacctgtaggaaattatggtagatgaaataagccagtcacaaagggacaaatactgtataatttcacttatatgaagtataaaaggtaatcaaattcggccggacacagtggctcacgcctgtaatcccagcactttgggaggctgaggtgagtggatcacctgaagtcaggagttcaagaccagcttggccaacatggtgaaaccccatctctaccaaaaatacaaaaattagccaggcgtggtggcgcacacctgtaatcccagctattcaggaagctgagacaggagaatcgcctgaacccaggagacagaggttgcagtgagctgagatcacgccactgcactccagcctgggcaacagagcaagactccatcttaaaaaaaaaggagtcaaattcatagaaacagaaagtaaaatagagattgctggggctgcagggaagggataaggggagttgtttactggatagttttggtttcacaagatgaaaaaagttctggagctatttcataacaatgtgaatgaatatacttaacactactgaactgaacacttaaaaacagttaagataataaatgttgtatgtttttttaccacagtaaaaaaaatatttttgaccacacacagtggctcatgcccataaatcccagcactctgggaggccaaggcagaagaatggcttgaacctaggagttcaagaccagtctaggcaacacagcaagacctcatctctacaaaa

SEQ ID NO: 23967 - DNA, 940 bp, Homo sapiens
ccagggccctgggtggggccggccggtgctcctggggacggagaggccgcaggagagaattcgctccgcgagccctgcgcggacccagctagtccgggccaagccttggcaccgccacccccggctgcgggcagggccggggcgtcctcacgcgccgcgccacccccagtcttcgtgctcgaatactacctggacacactgtggaaggggatgctgctcttcatcatcagcgtggtcctggtcagcttcagctccctgagagaggtgtgagcccctgggcccgacccccaccgccctcctcccctgagggccggccccgcgccgctcagactctccgcgtggcgcccgcaggtgcagaagcaagagacctgggtcttcctcgtgtacggcgtgggcgtgggcctgtggctcgtgatctcgtcgctgccgcggcgccgcctggtgctgaaccacacgcgcggcgtgtaccacttctccatccagggccgcaccgtgtgccagggccccttgcatctggtctacgtgcgcctggcgctcagctccgatgcccacggaaggtgcttcttccacctggtcctcggcggccacaggttggagcccctggtgctggtgcagctgtcggagcactacgagcaaatggaatacttgggccgttacatcgcccggaaactcaacatcaactacttcgactacctggccacctcctaccggcacgtggttcgccactggccaccccctggcgctggcactgtgatgggcaagagccccatgggtcacaagcccagctcctctcagtccagcctggaggtgtgactctgagggcctcccccacctcgggactgtgttctcggtaacctcccagccccactctggggcagatcaaatgtgagtcccactcactggccttcctttcaataaagctgcctcagcttcaaaagga

SEQ ID NO: 23968 - DNA, 428 bp, Homo sapiens
caaatttctacagcaccattttcagaatttcaagatggtttggaggtagtagaatatgtagattaacagggtgactcaggagacagatcggaattaaattttggctccactgtatataagatgtgtaactttggattaaaaaataaacaaaagaaattaatctccttaagcttgttttcacattttttaaatgattagaacagaatacttatctgattgagttattatgatggctggaaataatttaaatgcttttagcaaaatgataggtacatagcactctatttgttaaattgtcagtattatgagcatgatcatgtattctcaactaagaattctgttttccatcttgcctttagagagtcttcaattccccacagagaaattttaaacataaaatcagccattagaaaacatgaccatattat

SEQ ID NO: 23969 - DNA, 1067 bp, Homo sapiens
cttgattactctgcaagtaacaaaactaaagtaaataggtcattcagtttgtattggaatgcttcacattaggataggcagctatgattttaagacaattttagttctttgtgtataagaagtttttgggttttttgaacatttattaacttacaaaggtttgctctaaggcagaatttcttaattacatggagaaacaccttattcttctcttttcaacttattttgtttaaagttttggaagaagattttagttcactgatagaatttcagaacaaaaagagaacaaaaaggataaaatgagaagtagagtctaatcagtgtttagtatttcagttcatgcataaatctgttttgctcgtaaaccacagagaatacagtcccaaagacttgcaggcactcattgcattcagttgtttgcagacgtttcacacccttctttccctctgcttgtgcccacctaacctcagcagcagccaagctgttctggttgatagcaacatctagtgggcaacacagggaggaatatgattagttctgtttttcccccagcagcatcattctgttcttctgcctgagggcatttgccccctctttcttatctggagacattgtttcttagctactttcattcttatcttctctcttatacttagtgcctaggtagttggctccgattaatttttctttatgacctttatgcttccaaaagtgacagattattgactgttaaaatattagtgaatatatacacttggatatacatccaagcagataatattaaatttttgaaggaaaattacacatttttagagccagtaccatcatcttctaatgtaagtatctagaaacccgtgtctgcattaaaaaaaaaaaaaactgcacacgctcctcattcttttctcagtagggttccttttcaagtatgttatgagtcgtgtagttaccttgaaaaacaaaacttttcataagaaaaaaatccctgagttcagacaaccaactttaagcatttagggcaccttattaatatttgtaagtcaggatatgccttcattcataaaatcagg

SEQ ID NO: 23970 - DNA, 509 bp, Homo sapiens
aggtagaggaggtttgtaaggaatagtggtttaatatcacagagctagaagctagtttcagcagaaccagaattagaatctggacttctgtgccttactaagttttattagcattcattgtgtcttactcttttgacttatttaattcactaatggattttaatggtttattggattgtatgctggtgcagttctttgatcttgagcctagctttctctttctccttttttgggaactttattgtgtatgttgtggcatgtttacacacacatcttgctgccttgggttcttgcaagttgtgtgcgtgttttatctgcccctactagcttttaggtgtcttgagagcatgactctggcttactcatctgtctattccagaagaccttgtctgttcttggcatttattaactaattttctaagactgggttgaagtagttgcatgtcaagtttatatcagctgttaaatacctttctggaaaaactggctgtaaaataaactcaaccagg

SEQ ID NO: 23971 - DNA, 778 bp, Homo sapiens
aggtagaggaggtttgtaaggaatagtggtttaatatcacagagctagaagctagtttcagcagaaccagaattagaatctggacttctgtgccttactaagttttattagcattcattgtgtcttactcttttgacttatttaattcactaatggattttaatggtttattggattgtatgctggtgcagttctttgatcttgagcctagctttctctttctccttttttgggaactttattgtgtatgttgtggcatgtttacacacacatcttgctgccttgggttcttgcaagttgtgtgcgtgttttatctgcccctactagcttttaggtgtcttgagagcatgactctggcttactcatctgtctattccagaagaccttgtctgttcttggcatttattaactaattttctaagactgggttgaagtagttgcatgtcaagtttatatcagctgttaaatacctttctggaaaaactggctgtaaaataaactcaaccaggaaaaaaaaaaaaaaacaacaacccgatttttaatagtgtctatccaaccttttttttttaagttgcaagggatccaccagatggaattaagagaactaagcttttatcatctgctggatataatgtgattttgtaaccattattggattggtgttggtttagacagtttattttcagctgactatatagttaattccgggactcttataaagttttttttaaaaagagaaaaagagaagatcaaaagcactggaactcaacgagtaaat

SEQ ID NO: 23972 - DNA, 426 bp, Homo sapiens
aaatattattgtatttttaaaagaacacttcatgaaattacccacagaatagtttaaaattgtgcttttgatacctttctgccctatacgttaagtgacagcagaggaaaagaggtcattcctctgtagcctttgttcttttttgtaaactttacctttgtttctttccctttatgtcatctcccttcatgtaaataattaagaatcaaattcactttaaagataaaattagacttactgtattaatgtattaatcgaggccaggcacggtggctcatgcctgcaatcaatcccagtacttttggaggctgaggcaggcggatcacctgaggtcagaagttcaaggccagcctggccaacatggtgaaaccctgtctctattaatagtacatgggttaggccagggcgcggtggctcatgcctgta

SEQ ID NO: 23973 - DNA, 753 bp, Homo sapiens
ggagagaacagctgaatatgtgtagttcaaaaaagctcatcagaattgttcttaaaagtccccttgcctgcaaaaatattctagaatgctttgtggtgtttttgtttggttggttttgttttgcttttaaatcaattttatagaggtatagtgcacaaacattaaaatacacccattttaagtgtacagttggagttttgataaatgtatttacctatgtaactaccataatcagtacacagaacatgttcatctgctagaaaaattctgtcaggcttctttgttgtcatactccccacaccaccccaggatgaggaaatcactggtctcattatagattagtttcactcattctacaattttatataaatggtctcttacagtatgtactactgtgtatctgcctcccttcctttagcataatgtctttaagattcattcatgttgtttggattcacactttatttttattgtgtgttttatggctgtacaacaatttatccgtttacctgttgaagtataaagcgttgagctcaacgctttatacttcaattttattgttgggaatctacaattgccaagtggttcaaagtcatttcttataccacttcacaatacacacacagatttaggaaacttaaaaaaagttctttaaaaaattctaataggatttaccctattttactggccaagtgtaaacaaataaaccctcaaatgtgcctttctctaattttccttgtacatcttattgac

SEQ ID NO: 23974 - DNA, 420 bp, Homo sapiens
ctcttagtggtattaaatctattcatttatcaaatagattagatttattatttatttgtattattagctacatagtatagaaggtactggggagacttgtaatatggtggggtttgcccacattaggaacacatgtttttcctcatgtttaattttttttgggggggtgtcctttaactatctcgcgtttcagtacatatgccatttcctgtcccaaaggagcacataagtctagtcctaatcttggtgcttgaacccgcagttccagagaaaagcaactggcactgaatgctctctggctcatctttccatccaggatctgtcagctagccaacaggtgtgggaggtgtgttttccaagtttaatgttgctgttagtgggatacaaaagaaataaaagttactatctttggcctcagaa

SEQ ID NO: 23975 - DNA, 363 bp, Homo sapiens
ccaggtttgaagtgctctgctcaccttctacagatagtcttaaccaagctgatgattcaggcttggtggattaaaaagactgtgtcctttcattaagccatacatagtgctccaactgtttcctaaccagggtttccagttcttcagtttgtaatcatttgcaaggacttaaaacttttctttctaaacaaatctaactgtatgggaagatctatcaacaacaggagaggaaaactgctgacttatgggtaacacgacaataacaaatgggccacagggctgtgtgcccaagactcatctttttttttaaagcttgaaaatgaattcctcctgtcttgcacactcaggagggtttactagcag

SEQ ID NO: 23976 - DNA, 677 bp, Homo sapiens
gtcacatcttgcatggcagcagggaagagagagtttgtgtaggggaacacccctttaaaaaaccatcagatcttgtgacactcattcactgtcacgagaacagcacgggaaagacccgcccccatgattcaattacctcccatgacacaagggaagtataggagctacaattcacaatgagatctgggtggggacacagacaaaccatgtcaccgcctaaaaccaactcaatagtctaaggaatttgactggggagaatctggagaggatttaattaatttggcaaaaggattagcaattgaatctaagtgagaaaagagaattcttggaggaaaaaaagatgtttagttacactgagaaattaaaacctgaagtaattgcctttgagatttttttcaggaaatgagtattgattgcctactgtgtgtcaaattatgtgtttcatgtcaaagactccaaagtagataagatataggcccagccttggggagctcattgagtcacagagaaagtttgaatgtttcagaggaatcatcaagaacaggggatcagcaatctattatattttaattgcgtcttttcatgattataaaagcaatgcgtgcgtgctgaagagaatttggaaaaaaaaagaagaaattaaaaatcgtctctgatcctgccaccagaaataacca

SEQ ID NO: 23977 - DNA, 441 bp, Homo sapiens
ggcgacagagtgagcaagatccatctctaaataaataaaaataaattattctattgaatttagaattactttattttttttaatatggaacacttcacaaattttcatgtcatccttgtgcagggaccgtgctaatctctgtatcattccagttttagtatatgtgctgctgaaatgagcatgattgaatccatggtgtctgttttgaattttttaaacttcccatttaaaaaatgtattgatttctgctttgatatttattatttcctttttatctacttactttcagttttacttactcttctttttctagtttcttaagttggaaactgagatcatggattttggaccttttttttttgaaatggagtcttactctgtcgcccaggctggagtgcagtggcacgatctcatccactgcaacctccacctcccaggttt

SEQ ID NO: 23978 - DNA, 203 bp, Homo sapiens
acttcctcagcctctggtgttatcaatattttgcaccaaagtggtacatttattacaacctataaaccttcattggtacaccattatcccccaaagtccatagtttacattagggttcactcttggtgttgtatattctatggagttggacaaatatgtagtgatgtgtctacattatagtgtcatacaagagagtttcactg

SEQ ID NO: 23979 - DNA, 2622 bp, Homo sapiens
gcagggagcgggaggcggaagtgccgcgggctgccgcctccgtcccggctgcggcccctgccggttacataactcgttgcgggctccgcgcggtcccacttcccggctcccttcgcctccaggatgcgctgagccctacaacacccccagcggccgccggctcccccacgaggtgtgaatgacagaggtggtgccatccagcgcgctcagcgaggtcagcctgcgcctcctctgccacgatgacatagacactgtgaagcacctgtgtggcgactggttccccatcgagtacccagactcatggtatcgtgatatcacatccaacaagaagttcttttcccttgctgcaacctacagaggtgccattgtgggaatgatagtagctgaaattaagaacaggaccaaaatacataaagaggatggagatattctagcatccaacttctctgttgacacacaagtcgcgtacatcctaagtctgggcgtcgtgaaagagttcaggaagcacggcataggttccctcttacttgaaagtttaaaggatcacatatcaaccaccgcccaggaccactgcaaagccatttacctgcatgtcctcaccaccaacaacacagcaataaacttctatgaaaacagagacttcaagcagcaccactatctcccctattactactccattcgaggggtcctcaaagatggcttcacctatgtcctctacatcaacggcgggcaccctccctggacgattttggactacatccagcacctgggctctgcactagccagcctgagcccctgctccattccgcacagagtctaccgccaggcccacagcctgctctgcagcttcctgccatggtcgggcatctcttccaagagtggcatcgagtacagccggaccatgtgatgtcggctgggcagccgccaccaggccccacccttcagccgcccgcagagcccgccttcctgtccatctgaccccttctgttttctgcaaggagctgccagccatctaactgggctcgtcggcctgccccagctgcaggcccggtgctacacgggctcgggaacagaacatcgtgggcatgcgcagagcatgcccatccgtggcaggtacgccacagcagacacaaaggctcttcagctcccctccctgcttctggaaacctctgcctgctgccctggccctgcccccctgcgcatgcaccatccccagggctgacccagtgtggctgcattcactgggaggggcctgccctcactgggcctctcccactccgctgcctgttcttgcagctccttcctggaaagctggaggggactttctcctgcaagggaggaacgcaagtattatggacacacttgaccgtaaaggcacaggagcctcggaacaagggggcgcaataaagggaatggcccgtccccttccagaaccagcccaaagaagcctggggggtgaggagtggcccccactcctccatgaggggctgatgaggggtgggcagcctgggggaggctttcctcgcaagcacagagctctgaggctcagccccctggcacaggcggtcacgcatcaggacggttcctactcctcagcaccttccgtgcagttaccagtgccctgggaggtcacactgcccgtcggaccttggcatgctccattcagctgacctgctgaggacaggcatcgccgagactccttgggtcctccccgccctccctcatgctgccacaagctgctgctccaaggcctggccacatgcagacaggaggaagctgagctcgacattaggcctcaaggctgccatctgtcttgtagggcctggccttgtgggcagggggcagtcctgtgccttgtgggccctcagcctctgagggcagagatgctgtcagtgccgcaggtgcatcacatacttctagcatcctctccaccctgcattccaaatgctgcttgctgcctgccctgccctccgatgcaggggtggggtggggggcggagtcccgcccagcatagctgcagtgtcacaaagccatggcagagggtcctagcggcgccaccctgccccagcctgaggaggagggagagggaggaacaaccctgggcagacggggtctcagggacctgtgtccttccgcctccagagctgcccagccacgggctctcagggtgctggggcagccccaggtcccctcttgaactcagctggggccaggggccctcagaatgaaggcaggcaccaggcaggagcagcatccccctccttgacggtgctggcaggagggccgcgccatgctgactgcttgaacctctgctgacctgacagtgctggcgggagggccgcaccatgctgactgcctgaatctctgctgaggctgcctgcctgccgggcccagctcagcgccctctccactgcgaatcagtggcgatcatgtgatttctatttctgccccacagggtaagggacgagtcttctggaaggctctgccatggacatttgtcctcgggctcagaggccccaccctgccccacacctgcccctaatcactgcagtgtccagcccagtgttgaacagattgtagcgttctgtctcattacgagcaaataaatagactttcattgga

SEQ ID NO: 23980 - DNA, 803 bp, Homo sapiens
  misc_feature (703)..(703): n is a, c, g, or t
  misc_feature (767)..(767): n is a, c, g, or t
  misc_feature (771)..(771): n is a, c, g, or t
gcagggagcgggaggcggaagtgccgcgggctgccgcctccgtcccggctgcggcccctgccggttacataactcgttgcgggctccgcgcggtcccacttcccggctcccttcgcctccaggatgcgctgagccctacaacacccccagcggccgccggctcccccacgaggtgtgaatgacagaggtggtgccatccagcgcgctcagcgaggtcagcctgcgcctcctctgccacgatgacatagacactgtgaagcacctgtgtggcgactggttccccatcgagtacccagactcatggtatcgtgatatcacatccaacaagaagttcttttcccttgctgcaacctacagaggtgccattgtgggaatgatagtagctgaaattaagaacaggaccaaaatacataaagaggatggagatattctagcatccaacttctctgttgacacacaagtcgcgtacatcctaagtctgggcgtcgtgaaagagttcaggaagcacggcataggttccctcttacttgaaagtttaaaggatcacatatcaaccaccgcccaggaccactgcaaagccatttacctgcatgtcctcaccaccaacaacacagcaataaacttctatgaaaacagagacttcaagcagcaccactatctcccctattactactccattccaaaggggttcctccaaaaaatnggcttccaccctaatgttcctccttacattcaaaccggggggggggcaacccctccccttgggnaacnaatttttggggaacttaacattcccaagccaa

SEQ ID NO: 23981 - DNA, 164 bp, Homo sapiens
aattcaagcttctaacgatgtacggggacatggacatttgtcctcgggctcagaggccccaccctgccccacacctgcccctaatcactgcagtgtccagcccagtgttgaacagattgtagcgttctgtctcattacgagcaaataaatagactttcattgga

SEQ ID NO: 23982 - DNA, 2600 bp, Homo sapiens
gcagggagcgggaggcggaagtgccgcgggctgccgcctccgtcccggctgcggcccctgccggttacataactcgttgcgggctccgcgcggtcccacttcccggctcccttcgcctccaggatgcgctgagccctacaacacccccagcggccgccggctcccccacgaggtgtgaatgacagaggtggtgccatccagcgcgctcagcgaggtcagcctgcgcctcctctgccacgatgacatagacactgtgaagcacctgtgtggcgactggttccccatcgagtacccagactcatggtatcgtgatatcacatccaacaagaagttcttttcccttgctgcaacctacagaggtgccattgtgggaatgatagtagctgaaattaagaacaggaccaaaatacataaagaggatggagatattctagcatccaacttctctgttgacacacaagtcgcgtacatcctaagtctgggcgtcgtgaaagagttcaggaagcacggcataggttccctcttacttgaaagtttaaaggatcacatatcaaccaccgcccaggaccactgcaaagccatttacctgcatgtcctcaccaccaacaacacagcaataaacttctatgaaaacagagacttcaagcagcaccactatctcccctattactactccattcgaggggtcctcaaagatggcttcacctatgtcctctacatcaacggcgggcaccctccctggacgattttggactacatccagcacctgggctctgcactagccagcctgagcccctgctccattccgcacagagtctaccgccaggcccacagcctgctctgcagcttcctgccatggtcgggcatctcttccaagagtggcatcgagtacagccggaccatgtgatgtcggctgggcagccgccaccaggccccacccttcagccgcccgcagagcccgccttcctgtccatctgaccccttctgttttctgcaaggagctgccagccatctaactgggctcgtcggcctgccccagctgcaggcccggtgctacacgggctcgggaacagaacatcgtgggcatgcgcagagcatgcccatccgtggcaggctcttcagctcccctccctgcttctggaaacctctgcctgctgccctggccctgcccccctgcgcatgcaccatccccagggctgacccagtgtggctgcattcactgggaggggcctgccctcactgggcctctcccactccgctgcctgttcttgcagctccttcctggaaagctggaggggactttctcctgcaagggaggaacgcaagtattatggacacacttgaccgtaaaggcacaggagcctcggaacaagggggcgcaataaagggaatggcccgtccccttccagaaccagcccaaagaagcctggggggtgaggagtggcccccactcctccatgaggggctgatgaggggtgggcagcctgggggaggctttcctcgcaagcacagagctctgaggctcagccccctggcacaggcggtcacgcatcaggacggttcctactcctcagcaccttccgtgcagttaccagtgccctgggaggtcacactgcccgtcggaccttggcatgctccattcagctgacctgctgaggacaggcatcgccgagactccttgggtcctccccgccctccctcatgctgccacaagctgctgctccaaggcctggccacatgcagacaggaggaagctgagctcgacattaggcctcaaggctgccatctgtcttgtagggcctggccttgtgggcagggggcagtcctgtgccttgtgggccctcagcctctgagggcagagatgctgtcagtgccgcaggtgcatcacatacttctagcatcctctccaccctgcattccaaatgctgcttgctgcctgccctgccctccgatgcaggggtggggtggggggcggagtcccgcccagcatagctgcagtgtcacaaagccatggcagagggtcctagcggcgccaccctgccccagcctgaggaggagggagagggaggaacaaccctgggcagacggggtctcagggacctgtgtccttccgcctccagagctgcccagccacgggctctcagggtgctggggcagccccaggtcccctcttgaactcagctggggccaggggccctcagaatgaaggcaggcaccaggcaggagcagcatccccctccttgacggtgctggcaggagggccgcgccatgctgactgcttgaacctctgctgacctgacagtgctggcgggagggccgcaccatgctgactgcctgaatctctgctgaggctgcctgcctgccgggcccagctcagcgccctctccactgcgaatcagtggcgatcatgtgatttctatttctgccccacagggtaagggacgagtcttctggaaggctctgccatggacatttgtcctcgggctcagaggccccaccctgccccacacctgcccctaatcactgcagtgtccagcccagtgttgaacagattgtagcgttctgtctcattacgagcaaataaatagactttcattgga

SEQ ID NO: 23983 - DNA, 2771 bp, Homo sapiens
gggggtctcctccgtgagctccgggcctgtttgcctgctgaagtagagtcttagggtgaccccaggggacgtaatgtttccgagaagaaggacagaaagaagactgggagacaccggaactcgaaagaaaatcgatggtactgccttttaaggtctattacttaaacataagtatggctctggttcttaccgcctttaccgtatccttcatgggaagttgatactgatcggaaactgacacagagccttctcacctacactaagggggcctagcatacagaaaggctgtacctggaggaaggaagtgcggagccagcctgagttgggagaagagctccagagagtgtgaatgacagaggtggtgccatccagcgcgctcagcgaggtcagcctgcgcctcctctgccacgatgacatagacactgtgaagcacctgtgtggcgactggttccccatcgagtacccagactcatggtatcgtgatatcacatccaacaagaagttcttttcccttgctgcaacctacagaggtgccattgtgggaatgatagtagctgaaattaagaacaggaccaaaatacataaagaggatggagatattctagcatccaacttctctgttgacacacaagtcgcgtacatcctaagtctgggcgtcgtgaaagagttcaggaagcacggcataggttccctcttacttgaaagtttaaaggatcacatatcaaccaccgcccaggaccactgcaaagccatttacctgcatgtcctcaccaccaacaacacagcaataaacttctatgaaaacagagacttcaagcagcaccactatctcccctattactactccattcgaggggtcctcaaagatggcttcacctatgtcctctacatcaacggcgggcaccctccctggacgattttggactacatccagcacctgggctctgcactagccagcctgagcccctgctccattccgcacagagtctaccgccaggcccacagcctgctctgcagcttcctgccatggtcgggcatctcttccaagagtggcatcgagtacagccggaccatgtgatgtcggctgggcagccgccaccaggccccacccttcagccgcccgcagagcccgccttcctgtccatctgaccccttctgttttctgcaaggagctgccagccatctaactgggctcgtcggcctgccccagctgcaggcccggtgctacacgggctcgggaacagaacatcgtgggcatgcgcagagcatgcccatccgtggcaggctcttcagctcccctccctgcttctggaaacctctgcctgctgccctggccctgcccccctgcgcatgcaccatccccagggctgacccagtgtggctgcattcactgggaggggcctgccctcactgggcctctcccactccgctgcctgttcttgcagctccttcctggaaagctggaggggactttctcctgcaagggaggaacgcaagtattatggacacacttgaccgtaaaggcacaggagcctcggaacaagggggcgcaataaagggaatggcccgtccccttccagaaccagcccaaagaagcctggggggtgaggagtggcccccactcctccatgaggggctgatgaggggtgggcagcctgggggaggctttcctcgcaagcacagagctctgaggctcagccccctggcacaggcggtcacgcatcaggacggttcctactcctcagcaccttccgtgcagttaccagtgccctgggaggtcacactgcccgtcggaccttggcatgctccattcagctgacctgctgaggacaggcatcgccgagactccttgggtcctccccgccctccctcatgctgccacaagctgctgctccaaggcctggccacatgcagacaggaggaagctgagctcgacattaggcctcaaggctgccatctgtcttgtagggcctggccttgtgggcagggggcagtcctgtgccttgtgggccctcagcctctgagggcagagatgctgtcagtgccgcaggtgcatcacatacttctagcatcctctccaccctgcattccaaatgctgcttgctgcctgccctgccctccgatgcaggggtggggtggggggcggagtcccgcccagcatagctgcagtgtcacaaagccatggcagagggtcctagcggcgccaccctgccccagcctgaggaggagggagagggaggaacaaccctgggcagacggggtctcagggacctgtgtccttccgcctccagagctgcccagccacgggctctcagggtgctggggcagccccaggtcccctcttgaactcagctggggccaggggccctcagaatgaaggcaggcaccaggcaggagcagcatccccctccttgacggtgctggcaggagggccgcgccatgctgactgcttgaacctctgctgacctgacagtgctggcgggagggccgcaccatgctgactgcctgaatctctgctgaggctgcctgcctgccgggcccagctcagcgccctctccactgcgaatcagtggcgatcatgtgatttctatttctgccccacagggtaagggacgagtcttctggaaggctctgccatggacatttgtcctcgggctcagaggccccaccctgccccacacctgcccctaatcactgcagtgtccagcccagtgttgaacagattgtagcgttctgtctcattacgagcaaataaatagactttcattgga

SEQ ID NO: 23984 - DNA, 2632 bp, Homo sapiens
gggggtctcctccgtgagctccgggcctgtttgcctgctgaagtagagtcttagggtgaccccaggggacgtaatgtttccgagaagaaggacagaaagaagactgggagacaccggaactcgaaagaaaatcgcatacagaaaggctgtacctggaggaaggaagtgcggagccagcctgagttgggagaagagctccagagagtgtgaatgacagaggtggtgccatccagcgcgctcagcgaggtcagcctgcgcctcctctgccacgatgacatagacactgtgaagcacctgtgtggcgactggttccccatcgagtacccagactcatggtatcgtgatatcacatccaacaagaagttcttttcccttgctgcaacctacagaggtgccattgtgggaatgatagtagctgaaattaagaacaggaccaaaatacataaagaggatggagatattctagcatccaacttctctgttgacacacaagtcgcgtacatcctaagtctgggcgtcgtgaaagagttcaggaagcacggcataggttccctcttacttgaaagtttaaaggatcacatatcaaccaccgcccaggaccactgcaaagccatttacctgcatgtcctcaccaccaacaacacagcaataaacttctatgaaaacagagacttcaagcagcaccactatctcccctattactactccattcgaggggtcctcaaagatggcttcacctatgtcctctacatcaacggcgggcaccctccctggacgattttggactacatccagcacctgggctctgcactagccagcctgagcccctgctccattccgcacagagtctaccgccaggcccacagcctgctctgcagcttcctgccatggtcgggcatctcttccaagagtggcatcgagtacagccggaccatgtgatgtcggctgggcagccgccaccaggccccacccttcagccgcccgcagagcccgccttcctgtccatctgaccccttctgttttctgcaaggagctgccagccatctaactgggctcgtcggcctgccccagctgcaggcccggtgctacacgggctcgggaacagaacatcgtgggcatgcgcagagcatgcccatccgtggcaggctcttcagctcccctccctgcttctggaaacctctgcctgctgccctggccctgcccccctgcgcatgcaccatccccagggctgacccagtgtggctgcattcactgggaggggcctgccctcactgggcctctcccactccgctgcctgttcttgcagctccttcctggaaagctggaggggactttctcctgcaagggaggaacgcaagtattatggacacacttgaccgtaaaggcacaggagcctcggaacaagggggcgcaataaagggaatggcccgtccccttccagaaccagcccaaagaagcctggggggtgaggagtggcccccactcctccatgaggggctgatgaggggtgggcagcctgggggaggctttcctcgcaagcacagagctctgaggctcagccccctggcacaggcggtcacgcatcaggacggttcctactcctcagcaccttccgtgcagttaccagtgccctgggaggtcacactgcccgtcggaccttggcatgctccattcagctgacctgctgaggacaggcatcgccgagactccttgggtcctccccgccctccctcatgctgccacaagctgctgctccaaggcctggccacatgcagacaggaggaagctgagctcgacattaggcctcaaggctgccatctgtcttgtagggcctggccttgtgggcagggggcagtcctgtgccttgtgggccctcagcctctgagggcagagatgctgtcagtgccgcaggtgcatcacatacttctagcatcctctccaccctgcattccaaatgctgcttgctgcctgccctgccctccgatgcaggggtggggtggggggcggagtcccgcccagcatagctgcagtgtcacaaagccatggcagagggtcctagcggcgccaccctgccccagcctgaggaggagggagagggaggaacaaccctgggcagacggggtctcagggacctgtgtccttccgcctccagagctgcccagccacgggctctcagggtgctggggcagccccaggtcccctcttgaactcagctggggccaggggccctcagaatgaaggcaggcaccaggcaggagcagcatccccctccttgacggtgctggcaggagggccgcgccatgctgactgcttgaacctctgctgacctgacagtgctggcgggagggccgcaccatgctgactgcctgaatctctgctgaggctgcctgcctgccgggcccagctcagcgccctctccactgcgaatcagtggcgatcatgtgatttctatttctgccccacagggtaagggacgagtcttctggaaggctctgccatggacatttgtcctcgggctcagaggccccaccctgccccacacctgcccctaatcactgcagtgtccagcccagtgttgaacagattgtagcgttctgtctcattacgagcaaataaatagactttcattgga

SEQ ID NO: 23985 - DNA, 3005 bp, Homo sapiens
gcagggagcgggaggcggaagtgccgcgggctgccgcctccgtcccggctgcggcccctgccggttacataactcgttgcgggctccgcgcggtcccacttcccggctcccttcgcctccaggatgcgctgagccctacaacacccccagcggccgccggctcccccacgaggtgtgaatgacagaggtggtgccatccagcgcgctcagcgaggtcagcctgcgcctcctctgccacgatgacatagacactgtgaagcacctgtgtggcgactggttccccatcgagtacccagactcatggtatcgtgatatcacatccaacaagaagttcttttcccttgctgcaacctacagaggtgccattgtgggaatgatagtagctgaaattaagaacaggaccaaaatacataaagaggatggagatattctagcatccaacttctctgttgacacacaagtcgcgtacatcctaagtctgggcgtcgtgaaagagttcaggaagcacggcataggttccctcttacttgaaagtttaaaggatcacatatcaaccaccgcccaggaccactgcaaagccatttacctgcatgtcctcaccaccaacaacacagcaataaacttctatgaaaacagagacttcaagcagcaccactatctcccctattactactccattcgaggggtcctcaaagatggcttcacctatgtcctctacatcaacggcgggcaccctccctggacgattttggactacatccagcacctgggctctgcactagccagcctgagcccctgctccattccgcacagagtctaccgccaggcccacagcctgctctgcagcttcctgccatggtcgggcatctcttccaagagtggcatcgagtacagccggaccatgtgatgtcggctgggcagccgccaccaggccccacccttcagccgcccgcagagcccgccttcctgtccatctgaccccttctgttttctgcaaggagctgccagccatctaactgggctcgtcggcctgccccagctgcaggcccggtgctacacgggctcgggaacagaacatcgtgggcatgcgcagagcatgcccatccgtggcaggtacgccacagcagacacaaaggtatgggagcttggtgcctccagccacaaaagcggaaggccctggatgggcacagagaacggcagagccggaaggggccgtggggactgcagagtccaccaccttatgcaccagcacagcccagaggtttggtgacttgtgccaagctaacacagcaggctccatggcaactgggctgtgcacccgactttggatccatcagtgcctttatttgtgtggggaccgagaggcgcctagtggctgcaggcagacaccatggcctggagaagggctcatgctcctggagcacccaggcccagctgtgtggcccataggcagggtgtggggtgggcagagtgtctccgccgggccttcaccctgccctgctcttctctttcccacaggctcttcagctcccctccctgcttctggaaacctctgcctgctgccctggccctgcccccctgcgcatgcaccatccccagggctgacccagtgtggctgcattcactgggaggggcctgccctcactgggcctctcccactccgctgcctgttcttgcagctccttcctggaaagctggaggggactttctcctgcaagggaggaacgcaagtattatggacacacttgaccgtaaaggcacaggagcctcggaacaagggggcgcaataaagggaatggcccgtccccttccagaaccagcccaaagaagcctggggggtgaggagtggcccccactcctccatgaggggctgatgaggggtgggcagcctgggggaggctttcctcgcaagcacagagctctgaggctcagccccctggcacaggcggtcacgcatcaggacggttcctactcctcagcaccttccgtgcagttaccagtgccctgggaggtcacactgcccgtcggaccttggcatgctccattcagctgacctgctgaggacaggcatcgccgagactccttgggtcctccccgccctccctcatgctgccacaagctgctgctccaaggcctggccacatgcagacaggaggaagctgagctcgacattaggcctcaaggctgccatctgtcttgtagggcctggccttgtgggcagggggcagtcctgtgccttgtgggccctcagcctctgagggcagagatgctgtcagtgccgcaggtgcatcacatacttctagcatcctctccaccctgcattccaaatgctgcttgctgcctgccctgccctccgatgcaggggtggggtggggggcggagtcccgcccagcatagctgcagtgtcacaaagccatggcagagggtcctagcggcgccaccctgccccagcctgaggaggagggagagggaggaacaaccctgggcagacggggtctcagggacctgtgtccttccgcctccagagctgcccagccacgggctctcagggtgctggggcagccccaggtcccctcttgaactcagctggggccaggggccctcagaatgaaggcaggcaccaggcaggagcagcatccccctccttgacggtgctggcaggagggccgcgccatgctgactgcttgaacctctgctgacctgacagtgctggcgggagggccgcaccatgctgactgcctgaatctctgctgaggctgcctgcctgccgggcccagctcagcgccctctccactgcgaatcagtggcgatcatgtgatttctatttctgccccacagggtaagggacgagtcttctggaaggctctgccatggacatttgtcctcgggctcagaggccccaccctgccccacacctgcccctaatcactgcagtgtccagcccagtgttgaacagattgtagcgttctgtctcattacgagcaaataaatagactttcattgga

SEQ ID NO: 23986 - DNA, 2893 bp, Homo sapiens
gcagggagcgggaggcggaagtgccgcgggctgccgcctccgtcccggctgcggcccctgccggttacataactcgttgcgggctccgcgcggtcccacttcccggctcccttcgcctccaggatgcgctgagccctacaacacccccagcggccgccggctcccccacgaggtgtgaatgacagaggtggtgccatccagcgcgctcagcgaggtcagcctgcgcctcctctgccacgatgacatagacactgtgaagcacctgtgtggcgactggttccccatcgagtacccagactcatggtatcgtgatatcacatccaacaagaagttcttttcccttgctgcaacctacagaggtgccattgtgggaatgatagtagctgaaattaagaacaggaccaaaatacataaagaggatggagatattctagcatccaacttctctgttgacacacaagtcgcgtacatcctaagtctgggcgtcgtgaaagagttcaggaagcacggcataggttccctcttacttgaaagtttaaaggatcacatatcaaccaccgcccaggaccactgcaaagccatttacctgcatgtcctcaccaccaacaacacagcaataaacttctatgaaaacagagacttcaagcagcaccactatctcccctattactactccattcgaggggtcctcaaagatggcttcacctatgtcctctacatcaacggcgggcaccctccctggacgattttggactacatccagcacctgggctctgcactagccagcctgagcccctgctccattccgcacagagtctagccccacccttcagccgcccgcagagcccgccttcctgtccatctgaccccttctgttttctgcaaggagctgccagccatctaactgggctcgtcggcctgccccagctgcaggcccggtgctacacgggctcgggaacagaacatcgtgggcatgcgcagagcatgcccatccgtggcaggtacgccacagcagacacaaaggtatgggagcttggtgcctccagccacaaaagcggaaggccctggatgggcacagagaacggcagagccggaaggggccgtggggactgcagagtccaccaccttatgcaccagcacagcccagaggtttggtgacttgtgccaagctaacacagcaggctccatggcaactgggctgtgcacccgactttggatccatcagtgcctttatttgtgtggggaccgagaggcgcctagtggctgcaggcagacaccatggcctggagaagggctcatgctcctggagcacccaggcccagctgtgtggcccataggcagggtgtggggtgggcagagtgtctccgccgggccttcaccctgccctgctcttctctttcccacaggctcttcagctcccctccctgcttctggaaacctctgcctgctgccctggccctgcccccctgcgcatgcaccatccccagggctgacccagtgtggctgcattcactgggaggggcctgccctcactgggcctctcccactccgctgcctgttcttgcagctccttcctggaaagctggaggggactttctcctgcaagggaggaacgcaagtattatggacacacttgaccgtaaaggcacaggagcctcggaacaagggggcgcaataaagggaatggcccgtccccttccagaaccagcccaaagaagcctggggggtgaggagtggcccccactcctccatgaggggctgatgaggggtgggcagcctgggggaggctttcctcgcaagcacagagctctgaggctcagccccctggcacaggcggtcacgcatcaggacggttcctactcctcagcaccttccgtgcagttaccagtgccctgggaggtcacactgcccgtcggaccttggcatgctccattcagctgacctgctgaggacaggcatcgccgagactccttgggtcctccccgccctccctcatgctgccacaagctgctgctccaaggcctggccacatgcagacaggaggaagctgagctcgacattaggcctcaaggctgccatctgtcttgtagggcctggccttgtgggcagggggcagtcctgtgccttgtgggccctcagcctctgagggcagagatgctgtcagtgccgcaggtgcatcacatacttctagcatcctctccaccctgcattccaaatgctgcttgctgcctgccctgccctccgatgcaggggtggggtggggggcggagtcccgcccagcatagctgcagtgtcacaaagccatggcagagggtcctagcggcgccaccctgccccagcctgaggaggagggagagggaggaacaaccctgggcagacggggtctcagggacctgtgtccttccgcctccagagctgcccagccacgggctctcagggtgctggggcagccccaggtcccctcttgaactcagctggggccaggggccctcagaatgaaggcaggcaccaggcaggagcagcatccccctccttgacggtgctggcaggagggccgcgccatgctgactgcttgaacctctgctgacctgacagtgctggcgggagggccgcaccatgctgactgcctgaatctctgctgaggctgcctgcctgccgggcccagctcagcgccctctccactgcgaatcagtggcgatcatgtgatttctatttctgccccacagggtaagggacgagtcttctggaaggctctgccatggacatttgtcctcgggctcagaggccccaccctgccccacacctgcccctaatcactgcagtgtccagcccagtgttgaacagattgtagcgttctgtctcattacgagcaaataaatagactttcattgga

SEQ ID NO: 23987 - DNA, 2661 bp, Homo sapiens
gcagggagcgggaggcggaagtgccgcgggctgccgcctccgtcccggctgcggcccctgccggttacataactcgttgcgggctccgcgcggtcccacttcccggctcccttcgcctccaggatgcgctgagccctacaacacccccagcggccgccggctcccccacgaggtgtgaatgacagaggtggtgccatccagcgcgctcagcgaggtcagcctgcgcctcctctgccacgatgacatagacactgtgaagcacctgtgtggcgactggttccccatcgagtacccagactcatggtatcgtgatatcacatccaacaagaagttcttttcccttgctgcaacctacagaggtgccattgtgggaatgatagtagctgaaattaagaacaggaccaaaatacataaagaggatggagatattctagcatccaacttctctgttgacacacaagtcgcgtacatcctaagtctgggcgtcgtgaaagagttcaggaagcacggcataggttccctcttacttgaaagtttaaaggatcacatatcaaccaccgcccaggaccactgcaaagccatttacctgcatgtcctcaccaccaacaacacagcaataaacttctatgaaaacagagacttcaagcagcaccactatctcccctattactactccattcgaggggtcctcaaagatggcttcacctatgtcctctacatcaacggcgggcaccctccctggacgattttggactacatccagcacctgggctctgcactagccagcctgagcccctgctccattccgcacagagtctaccgccaggcccacagcctgctctgcagcttcctgccatggtcgggcatctcttccaagagtggcatcgagtacagccggaccatgtgatgtcggctgggcagccgccaccaggccccacccttcagccgcccgcagagcccgccttcctgtccatctgaccccttctgttttctgcaaggagctgccagccatctaactgggctcgtcggcctgccccagctgcaggcccggtgctacacgggctcgggaacagaacatcgtgggcatgcgcagagcatgcccatccgtggcaggctcttcagctcccctccctgcttctggaaacctctgcctgctgccctggccctgcccccctgcgcatgcaccatccccagggctgacccagtgtggctgcattcactgggaggggcctgccctcactgggcctctcccactccgctgcctgttcttgcagctccttcctggaaagctggaggggactttctcctgcaagggaggaacgcaagtattatggacacacttgaccgtaaaggcacaggagcctcggaacaagggggcgcaataaagggaatggcccgtccccttccagaaccagcccaaagaagcctggggggtgaggagtggcccccactcctccatgaggggctgatgaggggtgggcagcctgggggaggctttcctcgcaagcacagagctctgaggctcagccccctggcacaggcggtcacgcatcaggacggttcctactcctcagcaccttccgtgcagttaccagtgccctgggaggtcacactgcccgtcggaccttggcatgctccattcagctgacctgctgaggacaggcatcgccgagactccttgggtcctccccgccctccctcatgctgccacaagctgctgctccaaggcctggccacatgcagacaggaggaagctgagctcgacattaggcctcaaggctgccatctgtcttgtagggcctggccttgtgggcagggggcagtcctgtgccttgtgggccctcagcctctgagggcagagatgctgtcagtgccgcaggtgcatcacatacttctagcatcctctccaccctgcattccaaatgctgcttgctgcctgccctgccctccgatgcaggggtggggtggggggcggagtcccgcccagcatagctgcagtgtcacaaagccatggcagagggtcctagcggcgccaccctgccccagcctgaggaggagggagagggaggaacaaccctgggcagacggggtctcagggacctgtgtccttccgcctccagagctgcccagccacgggctctcagggtgctggggcagccccaggtcccctcttgaactcagctggggccaggggccctcagaatgaaggcaggcaccaggcaggagcagcatccccctccttgacggtgctggcaggagggccgcgccatgctgactgcttgaacctctgctgacctgacagtgctggcgggagggccgcaccatgctgactgcctgaatctctgctgaggctgcctgcctgccgggcccagctcagcgccctctccactgcgaatcagtggcgatcatgtgatttctatttctgccccacagggtaagggacgagtcttctggaaggctctgccatggacatttgtcctcgggctcagaggccccaccctgccccacacctgcccctaatcactgcagtgtccagcccagtgttgaacagattgtagcgttctgtctcattacgagcaaataaatagactttcattggaaaaaaaaaccaaaaaaaattacaaacaaaaggggggggtctttgggggggggggaaaggga

SEQ ID NO: 23988 - DNA, 2360 bp, Homo sapiens
  misc_feature (29)..(29): n is a, c, g, or t
aaccttcactaattgtattttgcttggtnccgccgttctctttacgaggtacccagactcatggtatcgtgatatcacatccaacaagaagttcttttcccttgctgcaacctacagaggtgccattgtgggaatgatagtagctgaaattaagaacaggaccaaaatacataaagaggatggagatattctagcatccaacttctctgttgacacacaagtcgcgtacatcctaagtctgggcgtcgtgaaagagttcaggaagcacggcataggttccctcttacttgaaagtttaaaggatcacatatcaaccaccgcccaggaccactgcaaagccatttacctgcatgtcctcaccaccaacaacacagcaataaacttctatgaaaacagagacttcaagcagcaccactatctcccctattactactccattcgaggggtcctcaaagatggcttcacctatgtcctctacatcaacggcgggcaccctccctggacgattttggactacatccagcacctgggctctgcactagccagcctgagcccctgctccattccgcacagagtctaccgccaggcccacagcctgctctgcagcttcctgccatggtcgggcatctcttccaagagtggcatcgagtacagccggaccatgtgatgtcggctgggcagccgccaccaggccccacccttcagccgcccgcagagcccgccttcctgtccatctgaccccttctgttttctgcaaggagctgccagccatctaactgggctcgtcggcctgccccagctgcaggcccggtgctacacgggctcgggaacagaacatcgtgggcatgcgcagagcatgcccatccgtggcaggctcttcagctcccctccctgcttctggaaacctctgcctgctgccctggccctgcccccctgcgcatgcaccatccccagggctgacccagtgtggctgcattcactgggaggggcctgccctcactgggcctctcccactccgctgcctgttcttgcagctccttcctggaaagctggaggggactttctcctgcaagggaggaacgcaagtattatggacacacttgaccgtaaaggcacaggagcctcggaacaagggggcgcaataaagggaatggcccgtccccttccagaaccagcccaaagaagcctggggggtgaggagtggcccccactcctccatgaggggctgatgaggggtgggcagcctgggggaggctttcctcgcaagcacagagctctgaggctcagccccctggcacaggcggtcacgcatcaggacggttcctactcctcagcaccttccgtgcagttaccagtgccctgggaggtcacactgcccgtcggaccttggcatgctccattcagctgacctgctgaggacaggcatcgccgagactccttgggtcctccccgccctccctcatgctgccacaagctgctgctccaaggcctggccacatgcagacaggaggaagctgagctcgacattaggcctcaaggctgccatctgtcttgtagggcctggccttgtgggcagggggcagtcctgtgccttgtgggccctcagcctctgagggcagagatgctgtcagtgccgcaggtgcatcacatacttctagcatcctctccaccctgcattccaaatgctgcttgctgcctgccctgccctccgatgcaggggtggggtggggggcggagtcccgcccagcatagctgcagtgtcacaaagccatggcagagggtcctagcggcgccaccctgccccagcctgaggaggagggagagggaggaacaaccctgggcagacggggtctcagggacctgtgtccttccgcctccagagctgcccagccacgggctctcagggtgctggggcagccccaggtcccctcttgaactcagctggggccaggggccctcagaatgaaggcaggcaccaggcaggagcagcatccccctccttgacggtgctggcaggagggccgcgccatgctgactgcttgaacctctgctgacctgacagtgctggcgggagggccgcaccatgctgactgcctgaatctctgctgaggctgcctgcctgccgggcccagctcagcgccctctccactgcgaatcagtggcgatcatgtgatttctatttctgccccacagggtaagggacgagtcttctggaaggctctgccatggacatttgtcctcgggctcagaggccccaccctgccccacacctgcccctaatcactgcagtgtccagcccagtgttgaacagattgtagcgttctgtctcattacgagcaaataaatagactttcattgga

SEQ ID NO: 23989 - DNA, 2263 bp, Homo sapiens
  misc_feature (17)..(17): n is a, c, g, or t
tgatctagaggatctgnatcacgtgccattgtgggaatgatagtagctgaaattaagaacaggaccaaaatacataaagaggatggagatattctagcatccaacttctctgttgacacacaagtcgcgtacatcctaagtctgggcgtcgtgaaagagttcaggaagcacggcataggttccctcttacttgaaagtttaaaggatcacatatcaaccaccgcccaggaccactgcaaagccatttacctgcatgtcctcaccaccaacaacacagcaataaacttctatgaaaacagagacttcaagcagcaccactatctcccctattactactccattcgaggggtcctcaaagatggcttcacctatgtcctctacatcaacggcgggcaccctccctggacgattttggactacatccagcacctgggctctgcactagccagcctgagcccctgctccattccgcacagagtctaccgccaggcccacagcctgctctgcagcttcctgccatggtcgggcatctcttccaagagtggcatcgagtacagccggaccatgtgatgtcggctgggcagccgccaccaggccccacccttcagccgcccgcagagcccgccttcctgtccatctgaccccttctgttttctgcaaggagctgccagccatctaactgggctcgtcggcctgccccagctgcaggcccggtgctacacgggctcgggaacagaacatcgtgggcatgcgcagagcatgcccatccgtggcaggctcttcagctcccctccctgcttctggaaacctctgcctgctgccctggccctgcccccctgcgcatgcaccatccccagggctgacccagtgtggctgcattcactgggaggggcctgccctcactgggcctctcccactccgctgcctgttcttgcagctccttcctggaaagctggaggggactttctcctgcaagggaggaacgcaagtattatggacacacttgaccgtaaaggcacaggagcctcggaacaagggggcgcaataaagggaatggcccgtccccttccagaaccagcccaaagaagcctggggggtgaggagtggcccccactcctccatgaggggctgatgaggggtgggcagcctgggggaggctttcctcgcaagcacagagctctgaggctcagccccctggcacaggcggtcacgcatcaggacggttcctactcctcagcaccttccgtgcagttaccagtgccctgggaggtcacactgcccgtcggaccttggcatgctccattcagctgacctgctgaggacaggcatcgccgagactccttgggtcctccccgccctccctcatgctgccacaagctgctgctccaaggcctggccacatgcagacaggaggaagctgagctcgacattaggcctcaaggctgccatctgtcttgtagggcctggccttgtgggcagggggcagtcctgtgccttgtgggccctcagcctctgagggcagagatgctgtcagtgccgcaggtgcatcacatacttctagcatcctctccaccctgcattccaaatgctgcttgctgcctgccctgccctccgatgcaggggtggggtggggggcggagtcccgcccagcatagctgcagtgtcacaaagccatggcagagggtcctagcggcgccaccctgccccagcctgaggaggagggagagggaggaacaaccctgggcagacggggtctcagggacctgtgtccttccgcctccagagctgcccagccacgggctctcagggtgctggggcagccccaggtcccctcttgaactcagctggggccaggggccctcagaatgaaggcaggcaccaggcaggagcagcatccccctccttgacggtgctggcaggagggccgcgccatgctgactgcttgaacctctgctgacctgacagtgctggcgggagggccgcaccatgctgactgcctgaatctctgctgaggctgcctgcctgccgggcccagctcagcgccctctccactgcgaatcagtggcgatcatgtgatttctatttctgccccacagggtaagggacgagtcttctggaaggctctgccatggacatttgtcctcgggctcagaggccccaccctgccccacacctgcccctaatcactgcagtgtccagcccagtgttgaacagattgtagcgttctgtctcattacgagcaaataaatagactttcattgga

SEQ ID NO: 23990 - DNA, 2296 bp, Homo sapiens
gcagggagcgggaggcggaagtgccgcgggctgccgcctccgtcccggctgcggcccctgccggttacataactcgttgcgggctccgcgcggtcccacttcccggctcccttcgcctccaggatgcgctgagccctacaacacccccagcggccgccggctcccccacgaggtgtgaatgacagaggtggtgccatccagcgcgctcagcgaggtcagcctgcgcctcctctgccacgatgacatagacactgtgaagcacctgtgtggcgactggttccccatcgagtacccagactcatggtatcgtgatatcacatccaacaagaagttcttttcccttgctgcaacctacagaggtgccattgtgggaatgatagtagctgaaattaagaacaggaccaaaatacataaagaggatggagatattctagcatccaacttctctgttgacacacaagtcgcgtacatcctaagtctgggcgtcgtgaaagagttcaggaagcacggcatagccgccaggcccacagcctgctctgcagcttcctgccatggtcgggcatctcttccaagagtggcatcgagtacagccggaccatgtgatgtcggctgggcagccgccaccaggccccacccttcagccgcccgcagagcccgccttcctgtccatctgaccccttctgttttctgcaaggagctgccagccatctaactgggctcgtcggcctgccccagctgcaggcccggtgctacacgggctcgggaacagaacatcgtgggcatgcgcagagcatgcccatccgtggcaggctcttcagctcccctccctgcttctggaaacctctgcctgctgccctggccctgcccccctgcgcatgcaccatccccagggctgacccagtgtggctgcattcactgggaggggcctgccctcactgggcctctcccactccgctgcctgttcttgcagctccttcctggaaagctggaggggactttctcctgcaagggaggaacgcaagtattatggacacacttgaccgtaaaggcacaggagcctcggaacaagggggcgcaataaagggaatggcccgtccccttccagaaccagcccaaagaagcctggggggtgaggagtggcccccactcctccatgaggggctgatgaggggtgggcagcctgggggaggctttcctcgcaagcacagagctctgaggctcagccccctggcacaggcggtcacgcatcaggacggttcctactcctcagcaccttccgtgcagttaccagtgccctgggaggtcacactgcccgtcggaccttggcatgctccattcagctgacctgctgaggacaggcatcgccgagactccttgggtcctccccgccctccctcatgctgccacaagctgctgctccaaggcctggccacatgcagacaggaggaagctgagctcgacattaggcctcaaggctgccatctgtcttgtagggcctggccttgtgggcagggggcagtcctgtgccttgtgggccctcagcctctgagggcagagatgctgtcagtgccgcaggtgcatcacatacttctagcatcctctccaccctgcattccaaatgctgcttgctgcctgccctgccctccgatgcaggggtggggtggggggcggagtcccgcccagcatagctgcagtgtcacaaagccatggcagagggtcctagcggcgccaccctgccccagcctgaggaggagggagagggaggaacaaccctgggcagacggggtctcagggacctgtgtccttccgcctccagagctgcccagccacgggctctcagggtgctggggcagccccaggtcccctcttgaactcagctggggccaggggccctcagaatgaaggcaggcaccaggcaggagcagcatccccctccttgacggtgctggcaggagggccgcgccatgctgactgcttgaacctctgctgacctgacagtgctggcgggagggccgcaccatgctgactgcctgaatctctgctgaggctgcctgcctgccgggcccagctcagcgccctctccactgcgaatcagtggcgatcatgtgatttctatttctgccccacagggtaagggacgagtcttctggaaggctctgccatggacatttgtcctcgggctcagaggccccaccctgccccacacctgcccctaatcactgcagtgtccagcccagtgttgaacagattgtagcgttctgtctcattacgagcaaataaatagactttcattgga

SEQ ID NO: 23991 - DNA, 2403 bp, Homo sapiens
gcagggagcgggaggcggaagtgccgcgggctgccgcctccgtcccggctgcggcccctgccggttacataactcgttgcgggctccgcgcggtcccacttcccggctcccttcgcctccaggatgcgctgagccctacaacacccccagcggccgccggctcccccacgaggtgtgaatgacagaggtggtgccatccagcgcgctcagcgaggtcagcctgcgcctcctctgccacgatgacatagacactgtgaagcacctgtgtggcgactggttccccatcgagtacccagactcatggtatcgtgatatcacatccaacaagaagttcttttcccttgctgcaacctacagaggtgccattgtgggaatgatagtagctgaaattaagaacaggaccaaaatacataaagaggatggagatattctagcatccaacttctctgttgacacacaagtcgcgtacatcctaagtctgggcgtcgtgaaagagttcaggaagcacggcataggttccctcttacttgaaagtttaaaggatcacatatcaaccaccgcccaggaccactgcaaagccatttacctgcatgtcctcaccaccaacaacacagcaataaacttctatgaaaacagagacttcaagcagcaccactatctcccctattactactccattcgaggggtcctcaaagatggcttcacctatgtcctctacatcaacggcgggcaccctccctggacgattttggactacatccagcacctgggctctgcactagccagcctgagcccctgctccattccgcacagagtctaccgccaggcccacagcctgctctgcagcttcctgccatggtcgggcatctcttccaagagtggcatcgagtacagccggaccatgtgatgtcggctgggcagccgccaccaggccccacccttcagccgcccgcagagcccgccttcctgtccatctgaccccttctgttttctgcaaggagctgccagccatctaactgggctcgtcggcctgccccagctgcaggcccggtgctacacgggctcgggaacagaacatcgtgggcatgcgcagagcatgcccatccgtggcaggctcttcagctcccctccctgcttctggaaacctctgcctgctgccctggccctgcccccctgcgcatgcaccatccccagggctgacccagtgtggctgcattcactgggaggggcctgccctcactgggcctctcccactccgctgcctgttcttgcagctccttcctggaaagctggaggggactttctcctgcaagggaggaacgcaagtattatggacacacttgaccgtaaaggcacaggagcctcggaacaagggggcgcaataaagggaatggcccgtccccttccagaaccagcccaaagaagcctggggggtgaggagtggcccccactcctccatgaggggctgatgaggggtgggcagcctgggggaggctttcctcgcaagcacagagctctgaggctcagccccctggcacaggcggtcacgcatcaggacggttcctactcctcagcaccttccgtgcagttaccagtgccctgggaggtcacactgcccgtcggaccttggcatgctccattcagctgacctgctgaggacaggcatcgccgagactccttgggtcctccccgccctccctcatgctgccacaagctgctgctccaaggcctggccacatgcagacaggaggaagctgagctcgacattaggcctcaaggctgccatctgtcttgtagggcctggccttgtgggcagggggcagtcctgtgccttgtgggccctcagcctctgagggcagagatgctgtcagtgccgcaggtgcatcacatacttctagcatcctctccaccctgcattccaaatgctgcttgctgcctgccctgccctccgatgcaggggtggggtggggggcggagtcccgcccagcatagctgcagtgtcacaaagccatggcagagggtcctagcggcgccaccctgccccagcctgaggaggagggagagggaggaacaaccctgggcagacggggtctcagggacctgtgtccttccgcctccagagctgcccagccacgggctctcagggtgctggggcagccccaggtcccctcttgaatcagcgccctctccactgcgaatcagtggcgatcatgtgatttctatttctgccccacagggtaagggacgagtcttctggaaggctctgccatggacatttgtcctcgggctcagaggccccaccctgccccacacctgcccctaatcactgcagtgtccagcccagtgttgaacagattgtagcgttctgtctcattacgagcaaataaatagactttcattgga

SEQ ID NO: 23992 - DNA, 2299 bp, Homo sapiens
gcagggagcgggaggcggaagtgccgcgggctgccgcctccgtcccggctgcggcccctgccggttacataactcgttgcgggctccgcgcggtcccacttcccggctcccttcgcctccaggatgcgctgagccctacaacacccccagcggccgccggctcccccacgaggtgtgaatgacagaggtggtgccatccagcgcgctcagcgaggtcagcctgcgcctcctctgccacgatgacatagacactgtgaagcacctgtgtggcgactggttccccatcgagtacccagactcatggtatcgtgatatcacatccaacaagaagttcttttcccttgctgcaacctacagaggtgccattgtgggaatgatagtagctgaaattaagaacaggaccaaaatacataaagaggatggagatattctagcatccaacttctctgttgacacacaagtcgcgtacatcctaagtctgggcgtcgtgaaagagttcaggaagcacggcataggttccctcttacttgaaagtttaaaggatcacatatcaaccaccgcccaggaccactgcaaagccatttacctgcatgtcctcaccaccaacaacacagcaataaacttctatgaaaacagagacttcaagcagcaccactatctcccctattactactccattcgaggggtcctcaaagatggcttcacctatgtcctctacatcaacggcgggcaccctccctggacgattttggactacatccagcacctgggctctgcactagccagcctgagcccctgctccattccgcacagagtctaccgccaggcccacagcctgctctgcagcttcctgccatggtcgggcatctcttccaagagtggcatcgagtacagccggaccatgtgatgtcggctgggcagccgccaccaggccccacccttcagccgcccgcagagcccgccttcctgtccatctgaccccttctgttttctgcaaggagctgccagccatctaactgggctcgtcggcctgccccagctgcaggcccggtgctacacgggctcgggaacagaacatcgtgggcatgcgcagagcatgcccatccgtggcaggctcttcagctcccctccctgcttctggaaacctctgcctgctgccctggccctgcccccctgcgcatgcaccatccccagggctgacccagtgtggctgcattcactgggaggggcctgccctcactgggcctctcccactccgctgcctgttcttgcagctccttcctggaaagctggaggggactttctcctgcaagggaggaacgcaagtattatggacacacttgaccgtaaaggcacaggagcctcggaacaagggggcgcaataaagggaatggcccgtccccttccagaaccagcccaaagaagcctggggggtgaggagtggcccccactcctccatgaggggctgatgaggggtgggcagcctgggggaggctttcctcgcaagcacagagctctgaggctcagccccctggcacaggcggtcacgcatcaggacggttcctactcctcagcaccttccgtgcagttaccagtgccctgggaggtcacactgcccgtcggaccttggcatgctccattcagctgacctgctgaggacaggcatcgccgagactccttgggtcctccccgccctccctcatgctgccacaagctgctgctccaaggcctggccacatgcagacaggaggaagctgagctcgacattaggcctcaaggctgccatctgtcttgtagggcctggccttgtgggcagggggcagtcctgtgccttgtgggccctcagcctctgagggcagagatgctgtcagtgccgcaggtgcatcacatacttctagcatcctctccaccctgcattccaaatgctgcttgctgcctgccctgccctccgatgcaggggtggggtggggggcggagtcccgcccagcatagctgcagtgtcacaaagccatggcagagggtcctagcgggccgcgccatgctgactgcttgaacctctgctgacctgacagtgctggcgggagggccgcaccatgctgactgcctgaatctctgctgaggctgcctgcctgccgggcccagctcagcgccctctccactgcgaatcagtggcgatcatgtgatttctatttctgcccctgccccacacctgcccctaatcactgcagtgtccagcccagtgttgaacagattgtagcgttctgtctcattacgagcaaataaatagactttcattgga

SEQ ID NO: 23993 - DNA, 2043 bp, Homo sapiens
gcagggagcgggaggcggaagtgccgcgggctgccgcctccgtcccggctgcggcccctgccggttacataactcgttgcgggctccgcgcggtcccacttcccggctcccttcgcctccaggatgcgctgagccctacaacacccccagcggccgccggctcccccacgaggtgtgaatgacagaggtggtgccatccagcgcgctcagcgaggtcagcctgcgcctcctctgccacgatgacatagacactgtgaagcacctgtgtggcgactggttccccatcgagtacccagactcatggtatcgtgatatcacatccaacaagaagttcttttcccttgctgcaacctacagaggtgccattgtgggaatgatagtagctgaaattaagaacaggaccaaaatacataaagaggatggagatattctagcatccaacttctctgttgacacacaagtcgcgtacatcctaagtctgggcgtcgtgaaagagttcaggaagcacggcataggttccctcttacttgaaagtttaaaggatcacatatcaaccaccgcccaggaccactgcaaagccatttacctgcatgtcctcaccaccaacaacacagcaataaacttctatgaaaacagagacttcaagcagcaccactatctcccctattactactccattcgaggggtcctcaaagatggcttcacctatgtcctctacatcaacggcgggcaccctccctggacgattttggactacatccagcacctgggctctgcactagccagcctgagcccctgctccattccgcacagagtctaccgccaggcccacagcctgctctgcagcttcctgccatggtcgggcatctcttccaagagtggcatcgagtacagccggaccatgtgatgtcggctgggcagccgccaccaggccccacccttcagccgcccgcagagcccgccttcctgtccatctgaccccttctgttttctgcaaggagctgccagccatctaactgggctcgtcggcctgccccagctgcaggcccggtgctacacgggctcgggaacagaacatcgtgggcatgcgcagagcatgcccatccgtggcaggctcttcagctcccctccctgcttctggaaacctctgcctgctgccctggccctgcccccctgcgcatgcaccatccccagggctgacccagtgtggctgcattcactgggaggggcctgccctcactgggcctctcccactccgctgcctgttcttgcagctccttcctggaaagctggaggggactttctcctgcaagggaggaacgcaagtattatggacacacttgaccgtaaaggcacaggagcctcggaacaagggggcgcaataaagggaatggcccgtccccttccagaaccagcccaaagaagcctggggggtgaggagtggcccccactcctccatgaggggctgatgaggggtgggcagcctgggggaggctttcctcgcaagcacagagctctgaggctcagccccctggcacaggcggtcacgcatcaggacggttcctactcctcagcaccttccgtgcagttaccagtgccctgggaggtcacactgcccgtcggaccttggcatgctccattcagctgacctgctgaggacaggcatcgccgagactccttgggtcctccccgccctccctcatgctgccacaagctgctgctccaaggcctggccacatgcagacaggaggaagctgagctcgacattaggcctcaaggctgccatctgtcttgtagggcctggccttgtgggcagggggcagtcctgtgccttgtgggccctcagcctctgagggcagagatgctgtcagtgccgcaggtgcatcacatacttctagcatcctctccaccctgcattccaaatgctgcttgctgcctgcccctgccccacacctgcccctaatcactgcagtgtccagcccagtgttgaacagattgtagcgttctgtctcattacgagcaaataaatagactttcattgga

SEQ ID NO: 23994 - DNA, 2052 bp, Homo sapiens
gcagggagcgggaggcggaagtgccgcgggctgccgcctccgtcccggctgcggcccctgccggttacataactcgttgcgggctccgcgcggtcccacttcccggctcccttcgcctccaggatgcgctgagccctacaacacccccagcggccgccggctcccccacgaggtgtgaatgacagaggtggtgccatccagcgcgctcagcgaggtcagcctgcgcctcctctgccacgatgacatagacactgtgaagcacctgtgtggcgactggttccccatcgagtacccagactcatggtatcgtgatatcacatccaacaagaagttcttttcccttgctgcaacctacagaggtgccattgtgggaatgatagtagctgaaattaagaacaggaccaaaatacataaagaggatggagatattctagcatccaacttctctgttgacacacaagtcgcgtacatcctaagtctgggcgtcgtgaaagagttcaggaagcacggcataggttccctcttacttgaaagtttaaaggatcacatatcaaccaccgcccaggaccactgcaaagccatttacctgcatgtcctcaccaccaacaacacagcaataaacttctatgaaaacagagacttcaagcagcaccactatctcccctattactactccattcgaggggtcctcaaagatggcttcacctatgtcctctacatcaacggcgggcaccctccctggacgattttggactacatccagcacctgggctctgcactagccagcctgagcccctgctccattccgcacagagtctaccgccaggcccacagcctgctctgcagcttcctgccatggtcgggcatctcttccaagagtggcatcgagtacagccggaccatgtgatgtcggctgggcagccgccaccaggccccacccttcagccgcccgcagagcccgccttcctgtccatctgaccccttctgttttctgcaaggagctgccagccatctaactgggctcgtcggcctgccccagctgcaggcccggtgctacacgggctcgggaacagaacatcgtgggcatgcgcagagcatgcccatccgtggcaggctcttcagctcccctccctgcttctggaaacctctgcctgctgccctggccctgcccccctgcgcatgcaccatccccagggctgacccagtgtggctgcattcactgggaggggcctgccctcactgggcctctcccactccgctgcctgttcttgcagctccttcctggaaagctggaggggactttctcctgcaagggaggaacgcaagtattatggacacacttgaccgtaaaggcacaggagcctcggaacaagggggcgcaataaagggaatggcccgtccccttccagaaccagcccaaagaagcctggggggtgaggagtggcccccactcctccatgaggggctgatgaggggtgggcagcctgggggaggctttcctcgcaagcacagagctctgaggctcagccccctggcacaggcggtcacgcatcaggacggttcctactcctcagcaccttccgtgcagttaccagtgccctgggaggtcacactgcccgtcggaccttggcatgctccattcagctgacctgctgaggacaggcatcgccgagactccttgggtcctccccgccctccctcatgctgccacaagctgctgctccaaggcctggccacatgcagacaggaggaagctgagctcgacattaggcctcaaggctgccatctgtcttgtagggcctggccttgtgggcagggggcagtcctgtgccttgtgggccctcagcctctgagggcagagatgctgtcagtgccgcagccacagggtaagggacgagtcttctggaaggctctgccatggacatttgtcctcgggctcagaggccccaccctgccccacacctgcccctaatcactgcagtgtccagcccagtgttgaacagattgtagcgttctgtctcattacgagcaaataaatagactttcattgga

SEQ ID NO: 23995 - DNA, 1497 bp, Homo sapiens
gcagggagcgggaggcggaagtgccgcgggctgccgcctccgtcccggctgcggcccctgccggttacataactcgttgcgggctccgcgcggtcccacttcccggctcccttcgcctccaggatgcgctgagccctacaacacccccagcggccgccggctcccccacgaggtgtgaatgacagaggtggtgccatccagcgcgctcagcgaggtcagcctgcgcctcctctgccacgatgacatagacactgtgaagcacctgtgtggcgactggttccccatcgagtacccagactcatggtatcgtgatatcacatccaacaagaagttcttttcccttgctgcaacctacagaggtgccattgtgggaatgatagtagctgaaattaagaacaggaccaaaatacataaagaggatggagatattctagcatccaacttctctgttgacacacaagtcgcgtacatcctaagtctgggcgtcgtgaaagagttcaggaagcacggcataggttccctcttacttgaaagtttaaaggatcacatatcaaccaccgcccaggaccactgcaaagccatttacctgcatgtcctcatgctgccacaagctgctgctccaaggcctggccacatgcagacaggaggaagctgagctcgacattaggcctcaaggctgccatctgtcttgtagggcctggccttgtgggcagggggcagtcctgtgccttgtgggccctcagcctctgagggcagagatgctgtcagtgccgcaggtgcatcacatacttctagcatcctctccaccctgcattccaaatgctgcttgctgcctgccctgccctccgatgcaggggtggggtggggggcggagtcccgcccagcatagctgcagtgtcacaaagccatggcagagggtcctagcggcgccaccctgccccagcctgaggaggagggagagggaggaacaaccctgggcagacggggtctcagggacctgtgtccttccgcctccagagctgcccagccacgggctctcagggtgctggggcagccccaggtcccctcttgaactcagctggggccaggggccctcagaatgaaggcaggcaccaggcaggagcagcatccccctccttgacggtgctggcaggagggccgcgccatgctgactgcttgaacctctgctgacctgacagtgctggcgggagggccgcaccatgctgactgcctgaatctctgctgaggctgcctgcctgccgggcccagctcagcgccctctccactgcgaatcagtggcgatcatgtgatttctatttctgccccacagggtaagggacgagtcttctggaaggctctgccatggacatttgtcctcgggctcagaggccccaccctgccccacacctgcccctaatcactgcagtgtccagcccagtgttgaacagattgtagcgttctgtctcattacgagcaaataaatagactttcattgga

SEQ ID NO: 23996 - DNA, 1651 bp, Homo sapiens
gcagggagcgggaggcggaagtgccgcgggctgccgcctccgtcccggctgcggcccctgccggttacataactcgttgcgggctccgcgcggtcccacttcccggctcccttcgcctccaggatgcgctgagccctacaacacccccagcggccgccggctcccccacgaggtgtgaatgacagaggtggtgccatccagcgcgctcagcgaggtcagcctgcgcctcctctgccacgatgacatagacactgtgaagcacctgtgtggcgactggttccccatcgagtacccagactcatggtatcgtgatatcacatccaacaagaagttcttttcccttgctgcaacctacagaggtgccattgtgggaatgatagtagctgaaattaagaacaggaccaaaatacataaagaggatggagatattctagcatccaacttctctgttgacacacaagtcgcgtacatcctaagtctgggcgtcgtgaaagagttcaggaagcacggcataggttccctcttacttgaaagtttaaaggatcacatatcaaccaccgcccaggaccactgcaaagccatttacctgcatgtcctcaccaccaacaacacagcaataaacttctatgaaaacagagacttcaagcagcaccactatctcccctattactactccattcgaggggtcctcaaagatggcttcacctatgtcctctacatcaacggcgggcaccctccctggacgattttatatccttaacttctgggggagagggactgtggcttcctgtccataaggtggcagagccagtgagcaagttggagctgtggtccccctcagatgatgttcaggtggccaagcttatggatgcttctctcccttacctgatcgtgttgtgggtaaacctgacacacatttgggtaaatcgagttgcacatattaccatgttgcccaggctggtctcgaactcctaagctcaaatgatccgcctgccgcagcctcccaaattactgggattataggcatgagccctgcacccagctggagagcctcctgctccacttgcactggggatcagcagtgcacaaaacggacaggatcccctgtcctcccagagcctgtgctagcagaggggaaacaagtgcggagagaagagatttttactttttttgaatacttgggttcaaaccttccttataggatgcatgacccaaaggtatgcccttccctgcttcttcctccttaactttcactggcccctgacaggtcagagggaagccaggaaactttataatagtcagaatgtggcccaaaaaaatgctgtgcgtgtgtgtgtgtgttttcaaattcatgagtctaggatttattcattacatagaataataagcaggaaagagaggggtgaccccacactccacaggccgtctagcttatgtgaagacaggcatccagggggtcagcactgttgaccccctccttgtcatatggacagggctctgtccctcttgctgccacaaaggttgagaatctagggagaaccagaagcacctgcccttctgccaggccccttccccaccccccgtgcatccctgggtgtggtgtccacatgcctgctgcctcactcagaaggcccttctgtccccagacccc

SEQ ID NO: 23997 - DNA, 580 bp, Homo sapiens
taccaggttgttcctccctctccctcctcctcaggctggggcaggggtggcgccgctaggacagatggggtctcagggacctgtgtccttccgcctccagagctgcccagccacgggctctcagggtgctggggcagccccaggtcccctcttgaactcagctggggccaggggccctcagaatgaaggcaggcaccaggcaggagcagcatccccctccttgacggtgctggcaggagggccgcgccatgctgactgcttgaacctctgctgacctgacagtgctggcgggagggccgcaccatgctgactgcctgaatctctgctgaggctgcctgcctgccgggcccagctcagcgccctctccactgcgaatcagtggcgatcatgtgatttctatttctgccccacagggtaagggacgagtcttctggaaggctctgccatggacatttgtcctcgggctcagaggccccaccctgccccacacctgcccctaatcactgcagtgtccagcccagtgttgaacagattgtagcgttctgtctcattacgagcaaataaatagactttcattgga

SEQ ID NO: 23998 - DNA, 786 bp, Homo sapiens
gcagggagcgggaggcggaagtgccgcgggctgccgcctccgtcccggctgcggcccctgccggttacataactcgttgcgggctccgcgcggtcccacttcccggctcccttcgcctccaggatgcgctgagccctacaacacccccagcggccgccggctcccccacgaggtgtgaatgacagaggtggtgccatccagcgcgctcagcgaggtcagcctgcgcctcctctgccacgatgacatagacactgtgaagcacctgtgtggcgactggttccccatcgagtacccagactcatggtatcgtgatatcacatccaacaagaagttcttttcccttgctgcaacctacagaggtgccattgtgggaatgatagtagctgaaattaagaacaggaccaaaatacataaagaggatggagatattctagcatccaacttctctgttgacacacaagtcgcgtacatcctaagtctgggcgtcgtgaaagagttcaggaagcacggcataggttccctcttacttgaaagtttaaaggatcacatatcaaccaccgcccaggaccactgcaaagccatttacctgcatgtcctcaccaccaacaacacatcccacagtactcccagcttaacttctttgatcaccaccaccaagtccaccccacacaatgcttcaagcttcacttctgtgagtgccaccacagggatcacgtcacgcagtactcccattttcacttcttcgatcccaccacctacacacctcacacatactcccacccacaa

SEQ ID NO: 23999 - DNA, 461 bp, Homo sapiens
gcactattgacattttgagccaaataattctttgttctggggcctgccctatgcattgtaggattaatgtttagcagcatccttggcctctgctaacttcttctcccctccccagttgtgacaataaacttgttgttcagacattgccaaatgttccaggggggcagggataaacctcctagggttgagaacctttatgtagtaaaatttcaccattcaaatgttccatgagagaatctaaattaaagattagaaagtaagtaaccacttcatgggggaagagttccttagcttctgggccactcccacccccatggcaccttgtgcttttccctgtcagagcactccacatacatattataaaggtgtctgtctattgttctcctggaggattgggactatataatcattgtatccattgtgtctagcaagtactcaataaattatatatttttgaatga

SEQ ID NO: 24000 - DNA, 433 bp, Homo sapiens
gatgaggggactctaaagagggatgatgatctgttatggcccaggaaatcaactacagcattgggactatagtttgtcttcttctcttgaaagtttcccgtggaaacaaaataagtagaatccttaagaagctgtttcccggcctgggcgcggtggcccacacctgtaatcccaccattttgggaggccgagcaggaggatcatgaggtcaggagatcaagaccatcctgaccaacatggtgagaccccgtctccactaaaatacaaaaaattagctgggtgtggtggtgcacgcctgtaatcccagctactcaggaggctgaggcaggggaatcgcttgaacccgggaggtggagattgcagtgagccgagatcgcaccactgcactccagcctggcaacaaaggtgaatccgtctcaaagaaaaaaaaaaa

SEQ ID NO: 24001 - DNA, 453 bp, Homo sapiens
gcccttttttctgatgatttgatttcttctgatttacctaaaaaagagagaaaacatagttctatttcaataatgcaaatgttttattccacataacactgatacattgtacatagtaattaatacaaaagccacctgatgttatattttaaaaaggtggctgggcgtcgtggctgggcacggtggctcacgcctgtaatcccagcactttgggaggccgaggcgggtggattgcctgaggtcaggagtttgagaccagtctggccaacatgggaaaccccgtctctactaaaaatacaaaaatattacccgggcctggtggtgtgagcctgtaatcccagccactcggaaggctaagacagaggaattgcttgaaccagggaggtggaggttgcagtgagctgaaatcactccactgcactccagcctgggcgacaaacaagactccgtctc

SEQ ID NO: 24002 - DNA, 311 bp, Homo sapiens
ggggaacgacacaatctggggtggggggcccaagcgggtctttgtaaaacttagatcacaccatgtcactcccgagcaatcctgtgttcataggacagagtcacatccccagtatcgcgttcaagtccttgaccctgccccacctccttcttccccatctccctcctgtcccccggctccagcccccaccatctgccgcacaccagtctgtcacacgatggcccctttgcacctgctctttcctcaccctggagctcccctccccagctttcaccccctgctgtactcaggctcacccaggcggcacagcc

SEQ ID NO: 24003 - DNA, 992 bp, Homo sapiens
acaaacctgacacgttctgcacatgtatcccagaacttaagtataataataaaaaaaaaacttgcaagattaaaaagaaaatcttaacaaaatccaaaaacactaaagtgagtcaataagaagacccaattatgtctgatctcttgaagttactctgctgaaatgctcaagtccaggttaacctcatcaatctaaatggattagcttaattcatttaaacttagaaatagttgaactactcatttttaggtctcatgcaatttacctgtgtgactcaacatcaaatctgtctgctaggttcatttggcatgttttgtccctaaggatatctgccaaaccaatgcaatcaacctctcaggaagcttttttcatatttaaggaactgcttttaatttctaaggccttcgccatgggtttctgtcatgtatttctcacaaatgacagctactgatatggcagcagctattgggtattgggagggagatgggactcaatgttatatagctatgtatcgttttgagattattatatgtacattacctaattctctcttcagaaacatcccgagagtattattactactattactatactcccccagagtagtattaatactatactattaataacagtgtactataatgctaatattattactatactatgaacagataaatcagtggaggcttaaggacattaaaggaatggaccacattgcgcccaggtgtggtggctcatgcctgtaatcttagcactttgggaggccgaggcaggtggatcacctgaggataaaattattcttttattctactaaaaattaaaaaaaaatatagccaggtgtggtggtgggctcttgtaattccagccacttgggaggctgaggcaggaggatcgcttgaacccaggaggtagaggttgcagtgagctgagatttgccactgcaccccagcccgggcaacagagtaagggtaagactgtctccaaaaaaaaaa

SEQ ID NO: 24004 - DNA, 642 bp, Homo sapiens
aatttttttaactgaagggtatatattttttaaaagaatatgcatgtttatcttttaataattcattctatgggccaaagaacctacttggatccatctttgatcattaaggatgcttcagttctggacttcaaaacctgtagcattaagaacatcatgtaaagtccacacagattagcatgacatgattatgtgtagtctctttgaacctgagtaagtttaaattcagtttcaagtcaattggaaagaagtgttttgcacaatcatgaagtgcaatgattacctggctgtgacttaaatggtgttctccatcaccagaacctgcagaagctctctcatgacagtggttctcaaccactagctgtatattggaatcaccagggagcttcagtgactaggttctgtcatgctgtcgggtgaacccctgattagttctcacgtgaagccaaggtggagaatgactaatttcaggcatttctggtggatatgaaggactaccatagagcagggctatccttactccttgaccttatgttccaggtgatacatttaaagaaagatttagaatcttttctctgaagaagttaaagaacagatgtcattgattcatattaagcaatagcctataagtcttatttccag

SEQ ID NO: 24005 - DNA, 371 bp, Homo sapiens
acacttccttcctgtgtcttttccacatgcaaacttgaggtatggcttcctgtctttagtcatttcatatagtttggtttgtgctatctttggtcatagaaattgttcttctaaaacctctccagatcatccttcatttctgtgttggacatgcatcctccatggctggttttactttacaaggggtgctccccctgaaaacagcactggcaggatggccatgcacagttgattgctgtgacagaggggcttgctgatcctgtggctttatctctatctggtgtctgctatgagtagagaaacatgggagagattgagctgcaaagcaaagccagtttatccagtgctttacagttgtggtttaaaaaaaa

SEQ ID NO: 24006 - DNA, 275 bp, Homo sapiens
ggatggaatggaatggaatgaatttaaaaacaatggaatggaatccaatggaatggaaaggccacgaatggaatggaatggaatggaatggactcgaatggaaaagattggagtttagtggaatggaatctaatggaatggaatggaatggattcgaatgtaatagaatggaatcgaatggaaaggaatgttctgtaatggaatggaatggaatggaatggaatcgaatgcaatggaatttaaaggactcgattgcaatggaatgtactcgaatg

SEQ ID NO: 24007 - DNA, 803 bp, Homo sapiens
cagcaggcccctggtggacatggtacttttcaataggcagagagcctccctctgcagcacatcgttggatcttgcttttaccatactccttgaagagctgaagaaataagagggcccagcaaggttaagtcaagtttccaagcctgttcaggaatatggtgactgaaaggaaactgcaatgagagtctctgactgaagaagatgctctttgcaaactgcctgtaaattcctgtcccctgacagggatggtctggtagaagcatgaactgtggatgcaagaggcagcggggaggagtggaggaagacaggaccagcacatggaatataatctagctgctgggactggcatagtcgatggaggcggtggtccagtgtaaaatgatcagtgaatgtaaattcaatatgttttcatttgggggtgcagagtcgtggctaaaggaatgttcaaatgagtctaccatgagcaagggatcagaggtcctagtggcactatctgttcattcatttttggtacaaccccagccagtcattgagaaggtacactgtgtaagaaaccatcactccagacttacccaaggtatttattgctagatctcaccaagcactgtcaaattcaaaggaggccctgtagtagaccctgggctgtccttacagggccaaaatgcagtgactcaggagcctaatagcacccggtccctccaaaacatgccttctaccaattccattaacagagacaggtgtcagtggaaggggtgggtctcctgttccagaccaccccggcccgggagcagcctgggggatct

SEQ ID NO: 24008 - DNA, 303 bp, Homo sapiens
gatacttaggtcactacaaaataatagtgggagactgcagcatgcccattgacagtattacagatcattgaggcagaaaactaacaaaaatattcagggcctgaatttgacatttgacaaaattgacctaatagacatctaaagaacactccacccaaaaacaacagaatatacattcctcttatctgcacataacacatattgtaaaattaatcacataatcagacatcaagcaatcctcagaaatttttttttaaaaaaatgaaatcataccaaccatgctttcagaccacaatgcaatgg

SEQ ID NO: 24009 - DNA, 611 bp, Homo sapiens
agcctcgcaagtagctgagattacaggcatgcaccactatgctgggctaattttttttatatttttagtagagacacggtttcaccatgttggccaggctggtctggaactcctgacctcaggtgattcaccagcctcagtctcccaaagtgctgggattacaggcgtgagcatctcaccccgctggtattatagcttttagtatacaccaagcatttctttcagtttgtttcattgtacttagttgctcacataattaatctgatgaatataaatagttttatgttctttatttgtactgagatcataccaagtttcagtatgtcgtagctattggaaaaaacttaatggtacctttgcaggctttacacctgcctgcatggtgacaattttctttagtattagctctttcaaaactctttaatttatcttgtttacaatgtgtatgactattaatttttatggtcaatgaaaattttagaaatttctaagtttttttgttacataccaaacaattgataggtaatgtgtgagtttattgttatgaaatttattaatcatagcttgaaaaatgtagacatgttttttaggttattcttagtttaaaataa

SEQ ID NO: 24010 - DNA, 1010 bp, Homo sapiens
atagtcactgaccctttcacgtatgtaataagatacgtctcgttcacacactatttcatttgatctttgtaagaacccagtgtagaataggaatatttaaaatcaacattacccacctccaaggccaacccagagtagtcttgaacctgagtcagcctcagtattgcttgcaaggaagagggaaggggctcattaaaggcctggctcaaaccttagtcttccagactgactagggacgtaagaagacccagggacccaccatgttctcaaaccatctattcagtccaggcctttcagcatagacataaagagcccacccgttactcagtcatgttgccaagtgcaaactgatttatccccagatgaatccctttactgtagcagatccctaatccctaaatttcagccaatttggtagttaattataggagtttattagctaaatgtatgttctgagtaaaagttttgactctttggggaaaatttattttgctgctagcatacaacatttgctatgtatataaacttaagtcaatgccagaaattttaaaaccagctcaaatttataatctgtaatgatcaaatcaaaacatactgtaaactcagagttggaaacgcctggtaatatggttaagtcatgtttaaatatgaatgcaatttaaatgacattggcaatgcctgagatttctttcattgtgaatgattaaaaggcagtccaatatatgaatggatttcatcttacctttctcccgttaatttactaggtgtaacatcttgagtgtaaagtcattcacaggcagttgggttgtggagctagaaagagcctcaaaaaaaaactttttggccagactcctacatcatgaacagggtttttgatgaataatatttattattatgtttctaaagtaatacagtgttggagaatgaaacagtttagtcctttcctcttctgatggaaaagaatcatagcgccgttgccatgacaataacaggatgtagaaagacccatg

SEQ ID NO: 24011 - DNA, 360 bp, Homo sapiens
  misc_feature (55)..(55): n is a, c, g, or t
  misc_feature (61)..(61): n is a, c, g, or t
  misc_feature (67)..(67): n is a, c, g, or t
  misc_feature (78)..(78): n is a, c, g, or t
  misc_feature (112)..(112): n is a, c, g, or t
  misc_feature (125)..(125): n is a, c, g, or t
tttggggggggggaggggggtttttcctttttttcccccccccttgggggcccangggggngggttncttttggcccnaaatttgagggaaacccggggaaaaaaaaaaaanccccttttttttnaaaaaaaaaaaaaaaaaaaaaaaaaaaattataaagaataggagactctgttagcattggatttacagtcataatgccacaagctaaaagacaaaggaaaaaggccttcaaaagtcagaagaggaataattctccccaaatcttttacctagccaaattgtcaagaaatgtgtgaggggaataaggatctttttagacacacagagtctcgtattccacctcctttctcaggaag

SEQ ID NO: 24012 - DNA, 739 bp, Homo sapiens
attgctgtgaagaagaaacattccaggaacgagtggctctcggatgttaccatctagagaagagacaagcccacagtggattgggaggcccttgaagaatcccctcccacagcactgacagacagagctggaagataggaaggatcaggaagtcagaggcgtagtctaggaaatctagcccctgataggagtttcagaaaaagaaaagtgtcccgggacccaaaggctttgcatttccaggttaaaaagtccaccagaaagtccgcccaagaatggaaattacccaaaccacaatgcatcgctgtgaaatttcacaattcctggattaaacaaaggccctgaaagcttccagagcaaacagatcacataaacagctcaccagactggggctgggcatggtagctcatgcctgtgatcccagcactatgggaggccaaggcaggaggatcacttgaggcccagagttcgaggtcagcctgggcaacatagcaagaccacatctctaaaaaaaaaaaaaaaaaaaaaaaaaaaattataaagaataggagactctgttagcattggatttacagtcataatgccacaagctaaaagacaaaggaaaaaggccttcaaaagtcagaagaggaataattctccccaaatcttttacctagccaaattgtcaagaaatgtgtgaggggaataaggatctttttagacacacagagtctcgtattccacctcctttctcaggaag

SEQ ID NO: 24013 - DNA, 449 bp, Homo sapiens
ataaatgcaaagaaaaatgtctgacttctgagaaatttaagctaagtgatctcgaacagtaattctgaaattactgtcttatatgacacctggggtccctgaagtaaaagactatttttattctaatatacaaaaattaaaagcttttcactctcacttttcagaagctacatgaaatgtgacacgtacctgtgtcatcttgagtctttgagaaatttctaaggtagaagtttagggtataatataatatataggtggtctcagagattagctcaatttgttctcagaacttttaactgacttcttaacagcaaatttaagttacacctattataacctgttatctcattatcatccaataaataattattttaaaatcctgaaatttctaaaaatatgctaacaaggccattcttttgactactttattttggaaaatatagttattt

SEQ ID NO: 24014 - DNA, 585 bp, Homo sapiens
actactactactaaattcgcggccgcgtcgaggtaatttataaataaaagaggtttaattaactcacagttcctcatggctggggaggcctcaggaaacttacaatcatggtggaaggggaagaggcatgtcttacatggtagcagatgagagagagtgagcaagattgaggaaaactgccttataaaaccatcagatcttatgagaactcactcactattttgagaacagcatgggggaaaatgcccccatgatccaatcacctcccatatggtacctccctcgacacgtggggattatagggattacaattcgagatgagatttgagtggggacacagaaccaaaccatatcaccaaagtaatgaatcctttctaagggagaaaaactcatatgaaatgtgtgacccacctcatctccaaccacagagaatgaaaatgtaaacttgacatgctaaactcaaacttttcaaagacaaagaagaggctgggaggagaaatgtactagggtggaaattctggctcccatcctccatttgttccctgagaagttagaactgaatgtaaaaaaaaaaaaacatgaagt

SEQ ID NO: 24015 - DNA, 654 bp, Homo sapiens
aaagcactgggattacaggcgtgagccaccacacctagcacatttaggaccgttatatggaattcttcatatcttctaagttttaaaaaaacaaaatctaccaaatattagagatttagtagttaaataaaatcattaggaaagagcaaagacttgcccagttttaggtggagtaaattctggaacttttaatacaaagataggctgggaaactgcaaagataactttgcggttcttcttgtatgcaaatctgtgatcatggatggagaagcctggaggagaatcggaaggcaaggtcaaactttatgggttgtgatccatttggttctttcagtaagaatccacaattgataaaatactagagtttgtgtttcttagctgagaatgcaggcgcgaggaagtaaaatgatttcttctcgtcagtagtagagccacctaaccccagtcttcggcctcaagctctttctgtgctttattaaatcagctgctttttaacagaaaaccgactttgcacaccagactataatgcaggtcttgctttgggaatatttacatggtaatcttatagtcacattatacactaaataaatgttagctgggccatttgtgtagaaatataacttgtgcaaaataaaaccgttaatgtgtaaaaca

SEQ ID NO: 24016 - DNA, 181 bp, Homo sapiens
gtcgcagttgagccaagatcgtgccactgcactccagcctggccagagagtgagaatccgtcccccccgttcccccccaacaaaaaaagaaagtgcttgcttgtattggcactggttctctttctctgcagccttggacttcgcagagcacatcaacatctgacctttcagatgtttgaag

SEQ ID NO: 24017 - DNA, 554 bp, Homo sapiens
cccacctcaagtctggagtagtatgactgccatccaacacccttccaggctgtgacccttctagctctcaggctgaatcaggtgaggtggctgattgtccccagctaatcataaggcatttgcaactggctaccgtgtgtagtggcccctccataggagccacaggccacaaatcaggaagctggccactttccacccagacaacaacagcaaggccttcctgtgcctaaaattgttatttctaactctggaaggtgaatccaatcctcaaactgaactagctcttcctaggcgacatataccatgatctctttatccagaaactgttcagaatagatagtaggggtgggggagtgggcttgggaatgttgaatagattcagagcccacttaggcagctttctcccaagaggagctttataacctagagccctgcagttgacttcatttgcctaagtttatatacatacatatctattctacatatctactgtacatcagtgctctcctggcctcactcacacattaaattctaatacctcttgaagtattaat

SEQ ID NO: 24018 - DNA, 920 bp, Homo sapiens
gcatttttaactgtctgctctgccagagtgacagggcctctgggtgggaggagaggttaggggaagactgtgagcctcaggcttagtgctttgagagccctttttaaagaatgaggctcctcctctgccagcactaccccccagctgtcccgcccccagggtctcagtgcaagagtcagccccacctggaggaaagttattttcccatcaaatcctgaatccaggtggaaaggcaaggttgatatggaatccagagcctcagttccctgccaatgggaagcaaactcactccttgattttcccatctgtgaaatgggaccacagccagtaattatgaggtgctatttgaactggtgggtaatctcttttattattatttatttatttatgtatttattttgaggcagagtcttgccctgtcaccaggctggagtgcagtggtgcgatctcggctcactgcaacctctgcctcctgggttcaagcgattcccctgcctcagcctccagaatagctgggactacaggtgtgcgccaccacgcccggctaattttttgtattttagtagaaacggggtttcaccatgttggccaagatagtcttgatctcctgacctcatggtccagctgccttcgagcatctctcagggagggttgagagcagcgagggatcagtctcaaaggaccacgcctgggcaacataggggactctgtcacgtctaccagacacacgagtagccaggaatggctggcgccatgcctgtagtctcagcctgcatgagcaggctgagctgcatacggatcggctttggccactcgggagcgccaagcgctgcagtgaggctgtcgcactagcacgtgcctgcacctctagtgcagtcagacgtgcagacccctgctcttaccccaaaccgacaccagcg

SEQ ID NO: 24019 - DNA, 471 bp, Homo sapiens
gcatttttaactgtctgctctgccagagtgacagggcctctgggtgggaggagaggttaggggaagactgtgagcctcaggcttagtgctttgagagccctttttaaagaatgaggctcctcctctgccagcactaccccccagctgtcccgcccccagggtctcagtgcaagagtcagccccacctggaggaaagttattttcccatcaaatcctgaatccaggtggaaaggcaaggttgatatggaatccagagcctcagttccctgccaatgggaagcaaactcactccttgattttcccatctgtgaaatgggaccacagccagtaattatgaggtgctatttgaactggtgggtaatctcttttattattatttatttatttatgtatttattttgaggcagagtcttgccctgtcaccactgcgctccagcctaggtgaaagagcaagactccatctcaaaaaaa

SEQ ID NO: 24020 - DNA, 147 bp, Homo sapiens
tggtttgccaattttccactcattctatttccactcaacaataccaactccttccagctattccacctttttctggcttttcagataacttagttattagaaaatgagagaaacttcactcaacttatgttgatgaccccttgcgcc

SEQ ID NO: 24021 - DNA, 761 bp, Homo sapiens
gggtcctgtaaaaatgaatacgattttgatgatagtaatgagtaaggacatttgagactgatagaagagtacatacaatatgtagtgatggggaaagataaggtactgtcaaaggacaatgtgttttctggtatgacagagaagtagaatgtgttaagggaagccgagtaccagaaagatccgggtgtcacagtttgtgtagggtgtttaaagctaaaccacagagtttaattttatccaatagaagaggagccacagaagagtttccatttattcattaatttattcatttattcaaaaaatatttgagtgcttattataagccaggtactatgccaggcacctgggataagacatagtcccttctgtcaagtctttacattgggtggatgtgggagggacagatgacagaacaatatgcattgagtgtaagtgctatggtataggaagctctgagtgggaggggcatggaagccgtggaagaccatggaaggcttcccaggagaagtgacgtctggactgatcctttggtcaagcaggagttaaagaggagaaaaggagagatatgggtgttcccgagagaggaagaagccttgtcccaggagcaaagtgagggtgattgttccagaaatgtgagtgattcttttaaggctcaagcaaagcatgtgattcttctttataccttctatttctttgctgagtgtttctgttcttttgtttcaagcatgctgcaattgctcattaaagcatgtttatgatgg

SEQ ID NO: 24022 - DNA, 589 bp, Homo sapiens
cgtggcagaactttgattgaacccattgtctatttgactttgaagctgttgttataacgactatatttcattatcttctaaacctctaactcagatctccttggttttagactgacatccaactacccactggatgtagctcaggtacttctgccttagtaggtattaaactaaattcatattacttgtccctcctttcaaccccttttctacccttcaattgtccctatttcaacaccgggcttttctcagatcacgtacgatgtctaatgacgctctgtcccaagattgaacccttgcggacagactggagaggatctctgtctcattgtaatgtatcgctggttaccaagtcaccacagaggcgtctctgaatgccagcccagccgccattcccctaagcttcataatagacttatgtgcctagtgagtttcctcgatgtgcagacgtttctcctcccctcttgttatagtgcctcagcttctccaagtatgctaatgtcatcaggccactacaccatgattatctcctaattgggcgttttcacctacgtagaatatatgagtttcatcgaggatcatcctcaga

SEQ ID NO: 24023 - DNA, 739 bp, Homo sapiens
cgtggcagaactttgattgaacccattgtctatttgactttgaagctgttgttataacgactatatttcattatcttctaaacctctaactcagatctccttggttttagactgacatccaactacccactggatgtagctcaggtacttctgccttagtaggtattaaactaaattcatattacttgtccctcctttcaaccccttttctacccttcaattgtccctatttcaacacctccttctctgatatttcttatttcttatcatgctttctcctttaatccaccccttaagaacactttggattttctctctccctcattgtaatttccgttggtctccaagtcaccacagaggcgtctctgcatcccagcgcagccggcattcccctctgcttcctaattgacctctgggctgctgagttcccaactgcagttggttctccctacagctgtcaaggttagcttttcaaaaaatcaatgtcatcattccactccacctaaaaatctccaatgggccttgtcacctccagagtcatttgtgttcttagaggatttcttgtgttcttagaggatttatagagacataaatggccgtgccttccttgcctgtcagacacatcatgaacatatgtgaataattacattttaagatatatgtagatacttcttatgctgaagaaaacaagtttcaaaatctttactaaattttaaataaattcattaaattaaaaatg

SEQ ID NO: 24024 - DNA, 431 bp, Homo sapiens
cacacattgtacttgtcaagccactgaaacattctatgcataaaatctgcataggaaactccaatatggagatggtgcctgcggttaggagggtggagatgaatggaggatctcctagcttgttgataaatgggaacagttaggtgtggaaatcctgtctgtgtccagaagatggtttccattatcacagccaaagaaaatcctggaagctacaaaaatctagaaaggaaattccaggtgggaggcctgccctgactcttgtggagcaagcctctgcatttcctggtggggttgattcctgctgcttccaccatgtctaccacggcttccctccggcaccagggtgcacaaaactcaagtcccttacttattttcgtcttagcacagctaaaacaagatggcattttcaaaagtaacaactttaaactctt

SEQ ID NO: 24025 - DNA, 3942 bp, Homo sapiens
  misc_feature (457)..(457): n is a, c, g, or t
  misc_feature (795)..(795): n is a, c, g, or t
tgttcgcagcgttatttgcagtggctttggggactcagcagtggcaagtccctgtgcataatgtgaacctgcagacttcaagatggggcccctcctgcacccactaacatgtctgcctttttttgtttttatcctggaacaagtggagaaatggcagagctggctgactctggggacccttccctttttcccatggcttcatttcttcctcaccacaactaattcggggagctgagaagtcacacagggtattcctctcccttctctgatgttattaattaatagaccagagaataaggttgcagatattacatttgttgtgtttttgtgttttgtttttttttttaaggaaaatcccaaacaaagcccagcatgatttgagaaaagaggatgttttcccagggaaaataatttttttaacctgcctgagaatgatttatttatttgttggaggccnttggtcagacagcctggagcttgggctgtggaagatttcaaaagcatagggctgtggtctctggaaacctattacagcctgcagctgtgagctgagccagtgacgaggtccctggaaactcaggaaggctgacaggtgggccttggggtattggtttgtggagaaggaagcattctttaggctgcggcactccttatagtttcccacccaccgagtgacattcaggcagaaattgagctcaggagacagccagccttcccacatcccacttcacttcccggtccacacgtaaagcagtgtgtctccaaggaggcagtgagcaattcccaaggtccccntgttgtgagaagcgcgctgctttctccctttgcagggaaaaaaaaaggctttcctggtgagatcatgagtccttccggcttcatttctcattgtgggtttaacttctaaaacgcaaatggagtttagagaggatgagcagaaccacaggacctgcccccatctctcactcactgcaattgcttctactctgggcacaagtagggtgtctgaagaccatgtttccctctggttctctagtttgcagataacacagaagacactggctagaaccttaagctttctgccaaaaagatgcagagagcagggcagtagctactggcagtggggtgtgaataaagagtcctttcacaaccaagttcactgaggatttggagcaccagcttcccagcagtatcgaggggtggagaggtgtacattcaggtggaggggtacatctaggggtggagaggtgtacattctagaaacagctgttaacacactccactttaaagacagcaagctagacctgcaggatcaaagccacacactgtggtaggggttacaaatgtttatggggcccagaatactagcatagatgcgtgaaatggttggtgtgaggcaaaagggcatggtgggggcaaggatggggactgtggtcttactggcatgcacgtgacctacccagaatgagcagctgctactcagccccaacctgtcattgtttgtaaaaatgtaagcacagtgtagtggaatcttccaatttggaagggaagccggaaatccagatttaatggaaaaaatctgatttttcaacgtcgggttttttgtttgtttgtttttgttttttttaacagatagtgggcaaagaaaaattccactgttccacgtgtacactgccagcaacctctgctctctggagaggtggtttaaagtgagattatgcattgccctggtagaagaggaaaaaagccagcatcaggtcagggcaaaaataacagcccatgttgaactcggaatggggacctcttgctaagtcattccactcctcaagagaccattccacagaggggggatggatcattcagctctcctggtcccaagattgtgctgaagggaagaaggaatagaatctggagatctggactgctgccccttagatatgcagaggtccacatctgcctggggctacagcttgtgggactccatcaaaccaggccgaaatggcaaagacagtctaggaggaggaggaggtagggtgtgaaacagccaggctctctccaaatcccaagtgttgacacagccatcttgtcccatccctggaagcctctttggaaaccacatagagctgtgctggctcacgggatgtcctgtttgcttctgcctcagttaccttactttgcccatgggtctaccacaggcgctacctcattgtgtctgctgagaagtttacctgggaggggggaacaaagttgtccaaatctgcttgagctgaatgtatgatctatgcaaattctctctctcctctctctcttcctctctggctctcttagaagtttttttgttttgttttgttttgttttgtgtttaccttgcaaacaagatactgtataggaccctcttaagatggaggagggctttcttgcgccacctgtgtctacccctcacgttgtctttggctctggtcttaccaggcgtatgcagggagaaagtgacctctcttccctctccacttggctgggaatattccaactgcctctgcctacagataccaccagaaagcgggttctgcaccttgtcatccccctccctaacgtcatctactccatccctcatgttcctccaacttgcttctcccatccctccttcaaaaacaaaacaaaacaaaacaaaagccttaggtttctcctttttgaaatgtggccttaacattatttttgggaagctgaccatccatcctttccctcccatctccaccaacatcagagaagacagcatcgtgaagcttctgtggcagcctcctaaggaaggggctgccaatctgtagttggcagatgctataggaattgcttacaaatgtcgtctttaagaaaaatgttcttatatttttcctatgggcaaaatgaaggcttgggtgctcatctaaagctcagccaactcctgaagcactctctcagagcatactgctgctgtaatgggctggcttaattatcggcagagtgcttgaaaaggctttgcagacctcccctgcccccaagactgggtgactttatatgtacttcattcaagggtaaatcaggagacgttctccatttatctcttcgtccttcctgcctggaaagtgatagcactaaatattcccagcagatgggtagtgttctcaaaggaatcaccctttccctaccttcagactctattctttacccttccattgctccagtgctgatggaggccaaagacaaccccagggttttcataggaaattcactggaattgtgcgcaattgtctttgtagtccttttgccttttttttttttaaatattatgttgtcaatagcatttgtttgggtatttgttttagaggcctcactctaagttattaccgtccccttcattgttttcaaagacatgtggtgatatagtttttaaaaataactattttgttatagatcataatatgcataaaactgtacagaaatattttgtaatgtgttgattttaaaaaaagaatctgtaaataaagttttaaaaaaagaattcaaatggcacacgctgaaatatgtagatattttgctatttatttaaaggagtattttaagagatattgaactatctgaaattgaccagtaatcaaagttccaatcatctgaatgcttttccttgaggtagaatgtgagtctcagaaatgactgcattacctgcccttttttgcaccttttctgtctttttattttgcagaacaacaacaacaacaaaattgtgccttagctgtatttttttgtctaggggagtttgtttctgtctgacaaagcaacattttttgcagaaaacagtggatgtattaaatactgtatcataccaaaaacactgcaggtgtatatagatgctttctgtcatactgtgttttcagatgcagaattttaaaattaaaaaaacactgcctttatgga

SEQ ID NO: 24026 - DNA, 4427 bp, Homo sapiens
  misc_feature (457)..(457): n is a, c, g, or t
  misc_feature (795)..(795): n is a, c, g, or t
tgttcgcagcgttatttgcagtggctttggggactcagcagtggcaagtccctgtgcataatgtgaacctgcagacttcaagatggggcccctcctgcacccactaacatgtctgcctttttttgtttttatcctggaacaagtggagaaatggcagagctggctgactctggggacccttccctttttcccatggcttcatttcttcctcaccacaactaattcggggagctgagaagtcacacagggtattcctctcccttctctgatgttattaattaatagaccagagaataaggttgcagatattacatttgttgtgtttttgtgttttgtttttttttttaaggaaaatcccaaacaaagcccagcatgatttgagaaaagaggatgttttcccagggaaaataatttttttaacctgcctgagaatgatttatttatttgttggaggccnttggtcagacagcctggagcttgggctgtggaagatttcaaaagcatagggctgtggtctctggaaacctattacagcctgcagctgtgagctgagccagtgacgaggtccctggaaactcaggaaggctgacaggtgggccttggggtattggtttgtggagaaggaagcattctttaggctgcggcactccttatagtttcccacccaccgagtgacattcaggcagaaattgagctcaggagacagccagccttcccacatcccacttcacttcccggtccacacgtaaagcagtgtgtctccaaggaggcagtgagcaattcccaaggtccccntgttgtgagaagcgcgctgctttctccctttgcagggaaaaaaaaaggctttcctggtgagatcatgagtccttccggcttcatttctcattgtgggtttaacttctaaaacgcaaatggagtttagagaggatgagcagaaccacaggacctgcccccatctctcactcactgcaattgcttctactctgggcacaagtagggtgtctgaagaccatgtttccctctggttctctagtttgcagataacacagaagacactggctagaaccttaagctttctgccaaaaagatgcagagagcagggcagtagctactggcagtggggtgtgaataaagagtcctttcacaaccaagttcactgaggatttggagcaccagcttcccagcagtatcgaggggtggagaggtgtacattcaggtggaggggtacatctaggggtggagaggtgtacattctagaaacagctgttaacacactccactttaaagacagcaagctagacctgcaggatcaaagccacacactgtggtaggggttacaaatgtttatggggcccagaatactagcatagatgcgtgaaatggttggtgtgaggcaaaagggcatggtgggggcaaggatggggactgtggtcttactggcatgcacgtgacctacccagaatgagcagctgctactcagccccaacctgtcattgtttgtaaaaatgtaagcacagtgtagtggaatcttccaatttggaagggaagccggaaatccagatttaatggaaaaaatctgatttttcaacgtcgggttttttgtttgtttgtttttgttttttttaacagatagtgggcaaagaaaaattccactgttccacgtgtacactgccagcaacctctgctctctggagaggtggtttaaagtgagattatgcattgccctggtagaagaggaaaaaagccagcatcaggtcagggcaaaaataacagcccatgttgaactcggaatggggacctcttgctaagtcattccactcctcaagagaccattccacagaggggggatggatcattcagctctcctggtcccaagattgtgctgaagggaagaaggaatagaatctggagatctggactgctgccccttagatatgcagaggtccacatctgcctggggctacagcttgtgggactccatcaaaccaggccgaaatggcaaagacagtctaggaggaggaggaggtagggtgtgaaacagccaggctctctccaaatcccaagtgttgacacagccatcttgtcccatccctggaagcctctttggaaaccacatagagctgtgctggctcacgggatgtcctgtttgcttctgcctcagttaccttactttgcccatgggtctaccacaggcgctacctcattgtgtctgctgagaagtttacctgggaggggggaacaaagttgtccaaatctgcttgagctgaatgtatgatctatgcaaattctctctctcctctctctcttcctctctggctctcttagaagtttttttgttttgttttgttttgttttgtgtttaccttgcaaacaagatactgtataggaccctcttaagatggaggagggctttcttgcgccacctgtgtctacccctcacgttgtctttggctctggtcttaccaggcgtatgcagggagaaagtgacctctcttccctctccacttggctgggaatattccaactgcctctgcctacagataccaccagaaagcgggttctgcaccttgtcatccccctccctaacgtcatctactccatccctcatgttcctccaacttgcttctcccatccctccttcaaaaacaaaacaaaacaaaacaaaagccttaggtttctcctttttgaaatgtggccttaacattatttttgggaagctgaccatccatcctttccctcccatctccaccaacatcagagaagacagcatcgtgaagcttctgtggcagcctcctaaggaaggggctgccaatctgtagttggcagatgctataggaattgcttacaaatgtcgtctttaagaaaaatgttcttatatttttcctatgggcaaaatgaaggcttgggtgctcatctaaagctcagccaactcctgaagcactctctcagagcatactgctgctgtaatgggctggcttaattatcggcagagtgcttgaaaaggctttgcagacctcccctgcccccaagactgggtgactttatatgtacttcattcaagggtaaatcaggagacgttctccatttatctcttcgtccttcctgcctggaaagtgatagcactaaatattcccagcagatgggtagtgttctcaaaggaatcaccctttccctaccttcagactctattctttacccttccattgctccagtgctgatggaggccaaagacaaccccagggttttcataggaaattcactggaattgtgcgcaattgtctttgtagtccttttgccttttttttttttaaatattatgttgtcaatagcatttgtttgggtatttgttttagaggcctcactctaagttattaccgtccccttcattgttttcaaagacatgtggtgatatagtttttaaaaataactattttgttatagatcataatatgcataaaactgtacagaaatattttgtaatgtgttgattttaaaaaaagaatctgtaaataaagttttaaaaaaagaattcaaatggcacacgctgaaatatgtagatattttgctatttatttaaaggagtattttaagagatattgaactatctgaaattgaccagtaatcaaagttccaatcatctgaatgcttttccttgaggtagaatgtgagtctcagaaatgactgcattacctgcccttttttgcaccttttctgtctttttattttgcagaacaacaacaacaacaaaattgtgccttagctgtatttttttgtctaggggagtttgtttctgtctgacaaagcaacattttttgcagaaaacagtggatgtattaaatactgtatcataccaaaaacactgcaggtgtatatagatgctttctgtcatactgtgttttcagatgcagaattttaaaattaaaaaaacactgcctttatggaacagtgactatatgtggcttcttttcagcaacattgtgcatctttacacaatctcatattctcttctgtcatctgcatggtgaagacaggatgactatataatttatcatccaaactgggatacttttgagagttaaaggaagcaccacgtggatgggatgctgagactgcaggcataaatggcctatcctgggaaaacctgggtgtgtggacacatttccctcataaaaactgctgtcatcttctaactggattatagcaacaacctcctataagtacctcctggttgaggcagaagtatatgatttttaaacccgtactgagtagagaataacaagaagggactgccatggaaagttgcagtttcctatacccaactggttggttggttggcaaacgtgttttcctttcctctttaccacagagactacatttcccagactgccttgctcttagctgtgaccatgtgaccaggccaatggaac

SEQ ID NO: 24027 - DNA, 1205 bp, Homo sapiens
  misc_feature (7)..(7): n is a, c, g, or t
  misc_feature (9)..(9): n is a, c, g, or t
ctcgcangnggaggacgagggagaagacagcatcgtgaagcttctgtggcagcctcctaaggaaggggctgccaatctgtagttggcagatgctataggaattgcttacaaatgtcgtctttaagaaaaatgttcttatatttttcctatgggcaaaatgaaggcttgggtgctcatctaaagctcagccaactcctgaagcactctctcagagcatactgctgctgtaatgggctggcttaattatcggcagagtgcttgaaaaggctttgcagacctcccctgcccccaagactgggtgactttatatgtacttcattcaagggtaaatcaggagacgttctccatttatctcttcgtccttcctgcctggaaagtgatagcactaaatattcccagcagatgggtagtgttctcaaaggaatcaccctttccctaccttcagactctattctttacccttccattgctccagtgctgatggaggccaaagacaaccccagggttttcataggaaattcactggaattgtgcgcaattgtctttgtagtccttttgccttttttttttttaaatattatgttgtcaatagcatttgtttgggtatttgttttagaggcctcactctaagttattaccgtccccttcattgttttcaaagacatgtggtgatatagtttttaaaaataactattttgttatagatcataatatgcataaaactgtacagaaatattttgtaatgtgttgattttaaaaaaagaatctgtaaataaagttttaaaaaaagaattcaaatggcacacgctgaaatatgtagatattttgctatttatttaaaggagtattttaagagatattgaactatctgaaattgaccagtaatcaaagttccaatcatctgaatgcttttccttgaggtagaatgtgagtctcagaaatgactgcattacctgcccttttttgcaccttttctgtctttttattttgcagaacaacaacaacaacaaaattgtgccttagctgtatttttttgtctaggggagtttgtttctgtctgacaaagcaacattttttgcagaaaacagtggatgtattaaatactgtatcataccaaaaacactgcaggtgtatatagatgctttctgtcatactgtgttttcagatgcagaattttaaaattaaaaaaacactgcctttatgga

SEQ ID NO: 24028 - DNA, 3613 bp, Homo sapiens
  misc_feature (457)..(457): n is a, c, g, or t
  misc_feature (795)..(795): n is a, c, g, or t
  misc_feature (3302)..(3302): n is a, c, g, or t
  misc_feature (3563)..(3563): n is a, c, g, or t
tgttcgcagcgttatttgcagtggctttggggactcagcagtggcaagtccctgtgcataatgtgaacctgcagacttcaagatggggcccctcctgcacccactaacatgtctgcctttttttgtttttatcctggaacaagtggagaaatggcagagctggctgactctggggacccttccctttttcccatggcttcatttcttcctcaccacaactaattcggggagctgagaagtcacacagggtattcctctcccttctctgatgttattaattaatagaccagagaataaggttgcagatattacatttgttgtgtttttgtgttttgtttttttttttaaggaaaatcccaaacaaagcccagcatgatttgagaaaagaggatgttttcccagggaaaataatttttttaacctgcctgagaatgatttatttatttgttggaggccnttggtcagacagcctggagcttgggctgtggaagatttcaaaagcatagggctgtggtctctggaaacctattacagcctgcagctgtgagctgagccagtgacgaggtccctggaaactcaggaaggctgacaggtgggccttggggtattggtttgtggagaaggaagcattctttaggctgcggcactccttatagtttcccacccaccgagtgacattcaggcagaaattgagctcaggagacagccagccttcccacatcccacttcacttcccggtccacacgtaaagcagtgtgtctccaaggaggcagtgagcaattcccaaggtccccntgttgtgagaagcgcgctgctttctccctttgcagggaaaaaaaaaggctttcctggtgagatcatgagtccttccggcttcatttctcattgtgggtttaacttctaaaacgcaaatggagtttagagaggatgagcagaaccacaggacctgcccccatctctcactcactgcaattgcttctactctgggcacaagtagggtgtctgaagaccatgtttccctctggttctctagtttgcagataacacagaagacactggctagaaccttaagctttctgccaaaaagatgcagagagcagggcagtagctactggcagtggggtgtgaataaagagtcctttcacaaccaagttcactgaggatttggagcaccagcttcccagcagtatcgaggggtggagaggtgtacattcaggtggaggggtacatctaggggtggagaggtgtacattctagaaacagctgttaacacactccactttaaagacagcaagctagacctgcaggatcaaagccacacactgtggtaggggttacaaatgtttatggggcccagaatactagcatagatgcgtgaaatggttggtgtgaggcaaaagggcatggtgggggcaaggatggggactgtggtcttactggcatgcacgtgacctacccagaatgagcagctgctactcagccccaacctgtcattgtttgtaaaaatgtaagcacagtgtagtggaatcttccaatttggaagggaagccggaaatccagatttaatggaaaaaatctgatttttcaacgtcgggttttttgtttgtttgtttttgttttttttaacagatagtgggcaaagaaaaattccactgttccacgtgtacactgccagcaacctctgctctctggagaggtggtttaaagtgagattatgcattgccctggtagaagaggaaaaaagccagcatcaggtcagggcaaaaataacagcccatgttgaactcggaatggggacctcttgctaagtcattccactcctcaagagaccattccacagaggggggatggatcattcagctctcctggtcccaagattgtgctgaagggaagaaggaatagaatctggagatctggactgctgccccttagatatgcagaggtccacatctgcctggggctacagcttgtgggactccatcaaaccaggccgaaatggcaaagacagtctaggaggaggaggaggtagggtgtgaaacagccaggctctctccaaatcccaagtgttgacacagccatcttgtcccatccctggaagcctctttggaaaccacatagagctgtgctggctcacgggatgtcctgtttgcttctgcctcagttaccttactttgcccatgggtctaccacaggcgctacctcattgtgtctgctgagaagtttacctgggaggggggaacaaagttgtccaaatctgcttgagctgaatgtatgatctatgcaaattctctctctcctctctctcttcctctctggctctcttagaagtttttttgttttgttttgttttgttttgtgtttaccttgcaaacaagatactgtataggaccctcttaagatggaggagggctttcttgcgccacctgtgtctacccctcacgttgtctttggctctggtcttaccaggcgtatgcagggagaaagtgacctctcttccctctccacttggctgggaatattccaactgcctctgcctacagataccaccagaaagcgggttctgcaccttgtcatccccctccctaacgtcatctactccatccctcatgttcctccaacttgcttctcccatccctccttcaaaaacaaaacaaaacaaaacaaaagccttaggtttctcctttttgaaatgtggccttaacattatttttgggaagctgaccatccatcctttccctcccatctccaccaacatcagagaagacagcatcgtgaagcttctgtggcagcctcctaaggaaggggctgccaatctgtagttggcagatgctataggaattgcttacaaatgtcgtctttaagaaaaatgttcttatatttttcctatgggcaaaatgaaggcttgggtgctcatctaaagctcagccaactcctgaagcactctctcagagcatactgctgctgtaatgggctggcttaattatcggcagagtgcttgaaaaggctttgcagacctcccctgcccccaagactgggtgactttatatgtacttcattcaagggtaaatcaggagacgttctccatttatctcttcgtccttcctgcctggaaagtgatagcactaaatattcccagcagatgggtagtgttctcaaaggaatcaccctttccctaccttcagacacacaaaaccttcgtcaattgcacaccggtgctgttgggagtgaccaaaccacatgaaccagacttttcccgtccaggaaatagcatttcagatttggcttttaatttcatgcccttncgccacaggcttaacgggacatgcaacataaaaatgggaaggttatttaaacaacaaaaaacagtatgatttaaagtgtgaagtaccacgaacctcaaagggtttcttgccacgagccccctggagtgtcaatccttgtcccaagaatgtgcttaaaggaagaaggaataggatcttgagaactggactgctgccccctagatatgctgattgagcccaagaccatctcacggtttcataggaaaatcacctgcaatgtgngcaaatggctttggaggcccttttgcctttttttttaaaaatatagtgga

SEQ ID NO: 24029 - DNA, 315 bp, Homo sapiens
gcagcaaccttaacagctcatgtctatccaacctttacacagcttaccattttatttttagaaaaatgactcttgttttctgcactcatatttcagcactttttgtaacatttaaattacgtaattataatttcaaattacactaacataaatagatttgaggaaacgtctagaaaagctctagaatagcttattggtgtgagagttcctgtacttcaggcagcctgactgtgttttcagggggaataaagagtgtcccttaagctggtgagtggattaggtggaattttgtgaaaggacttcaactatactgag

SEQ ID NO: 24030 - DNA, 2966 bp, Homo sapiens
tgcattttataaattagtgattattgttagttgaatgatctataagtaaaatccttgcacatgcattcaacagaatacactaggatagaaaatttctgaaaggtataccagaagctatacatggtggtccctagagagtgcagctaggtgtggggaggaagcagacttattttactttatgccagttagtgccctttgaaatggtcttaaacagaaatagtgtattactgtaataattatagtgaagtactgcacttgggcaggatattcccttccagggctcctaccctctcctgattttgcatccagggacgtcctctgtgcttttgaatgtattaaggagtgacgtacggctggattcactctgatctcattcactgacagtggtgggagagcccagagctgagtagaaactggttctggggcatcgtgtggctagggtgccaaagccgagaaaggtcccgtagtccctgtgtggtcagcagggaaggcagcagtgctctgtcagtattgattcttcaggggcaggctgcccacttaccaaagttatgcttagcagaggggctctggctcactccccgtccctcatcctaccaggtgtgaggctgccaggagccgatcgcacaaggcttggcaaggcagatgctccccagctcctgacatcagagagaagggctgggattgtggcctgcggttggtgggcaggagagcctggtctgatgacagcaaccaccctttgactaccttctctgtggctgttactgtctgattccaaccttccactgttgaacagacctcctaccactttcctactactccccctaatgataacatactgaactcacttttatgaatttgttgagaccttaccacttttcaagtgtgtgttcaggaacagcaaacttttgtcttgcttggatccacccacatacccaaatcaccatgggtatcagacacactgggtagctgagtgctcagaggaagatgcgaggtattcagggaaagtgtcagtggggtctcccagtgcctgtttggtccacagttaggagaggccctgcttgcacttctaatacagtcccggaaagacggggccagaacttaggaggggagcgctttgcagcaacttttcaagaaaaggggaaaatttaagcaccatactgttatgtggtccttgtacccagaggccctgttcagctccagtgatcagctctcttagggcacaccctccaaggtgcctaaatgccatcccaggattggttccagtgtctattatctgtttgactccaaatggccaaacacctgacttcctctctggtagcctggcttttatcttctaggacatccagggcccctctctttgccttcccctctttcttccttctactgcttcagcagacatcatgtgaccttgaggatggatgtcacatgctggaggaaacagaaggccgaaaccctgatgacttcacagagctgccaaaacagttcctgactgtttattccgggtctttaacaaagtgatgaaaagaaatccttgcagtatgaaaacaacttttctattccatggagccaaacctcattataacagataacgtgaccctcagcgatatcccaagtattttcctgttctcatctatactatggcaaaggggcaaatacctctcagtaaagaaagaaataacaacttctatcttgggcgaggcatttcttctgttagaactttgtacacggaataaaatagatctgtttgtgcttatctttctccttagaattattgaatttgaagtctttcccagggtgggggtggagtgaagctggggtttcataagcacatagatagtagtgtctcttagcttccgtttaaatatgggggtagcgatgtggagggcccagaagtatcagagaggagagacaggctgctctgattgcctttgtaaaatgcacatttgagcttgtgcaaagccctgggcctgagctcagaaaaagcaaggccaggaatgaggctcttggttcagttcccctgcacaccctgggcggggaggggttgttagagtcatggaacccctattttttttttttttttgaccgggtcttgcttggtcacccagccagagtgcagaggtatgtgcacagctcactgcagcctcaacttcctgggctcaagcgatcttcctgcctcagcccccagagttgctggagctacagccccatgccactacacctgtctaacttttgtactttttgtagagacagggttttgtcatatcgcccaggctgctctcgaactcctgagcttaagaccaggttgctcaagtgatccacccacgtcggcctcccagggtgctaggattacaggcatgatctacccctcctggtttatctttcttaagcttggagtcatctttttaaaacagccacaatgaggtataattgatatacaatacactgcttatatttaaagtggataatttgataagttttgccatatgtttacatctgtgaaactgtcaccacaatcaacagggggatcatatccatcacccacaaaagttttcttaggcctcttccccctgagaaaaccctctctctggcagccactgaactgctttctgtccctgcagattcgtttgcattttcttaagttttatataaatggaatcatagagtacgtgctcttcttttgtctgtcttctttcacgcagcataattattttttagattcttgtgtcttgtgtgtgtcaattcttttctttttattgatgaataacattccattgtatggatataccacatctgtacagtttgtttaatccattcacctgtcgatggacatttggatcacttccaatatttggctattaaaataaagctactctgaacatttgtgtatgtgcctttgtgttattcttgggtatatatccagcagtagaatgctagatcatgtggtaggttttttgggtttttttttt

SEQ ID NO: 24031 - DNA, 574 bp, Homo sapiens
cgccccattaagtggatggagtcccctcatagggccgcccggtctttccctattagccgcggaccggtattttgtggggaatgtgtggggactgcatttgtcccaggaacatttttgcccctatttggccgagctcgcaattgaccccccgttaaggaccccaatctgatgtcccccccggggggggcccctctaggcgtgttggtccccccgggtgcgaggtttgggcccggggagagagagagatggagagagagagagagagagagagagagagagagacagagaaaaagagagataatgatctcattgtttattaacctgtattctgtttacatgtctttaaaacagtggttcttaaattgtaagctcaggttcaaagtgttggtaatgcctgattcacaactttgagaaggtagcactggagagaattggaatgggtggcggtaattggtgatacttctttgaatgtagatttccaatcacatctttagtgtctgaatatatccaaatgttttaggatgtatgttacttcttagagagaaataaagcatttttgggaagaatatatcta

SEQ ID NO: 24032 - DNA, 1727 bp, Homo sapiens
ttaaaaaaaaaaaaacaacgaactccatctgggatagcaataacctgtgaaaatgctcccccggctaatttgtatcaatgattatgaacaacatgctaaatcagtacttccaaagtctatatatgactattacaggtctggggcaaatgatgaagaaactttggctgataatattgcagcattttccagatggaagctgtatccaaggatgctccggaatgttgctgaaacagatctgtcgacttctgttttaggacagagggtcagcatgccaatatgtgtgggggctacggccatgcagcgcatggctcatgtggacggcgagcttgccactgtgagagcctgtcagtccctgggaacgggcatgatgttgagttcctgggccacctcctcaattgaagaagtggcggaagctggtcctgaggcacttcgttggctgcaactgtatatctacaaggaccgagaagtcaccaagaagctagtgcggcaggcagagaagatgggctacaaggccatatttgtgacagtggacacaccttacctgggcaaccgtctggatgatgtgcgtaacagattcaaactgccgccacaactcaggatgaaaaattttgaaaccagtactttatcattttctcctgaggaaaattttggagacgacagtggacttgctgcatatgtggctaaagcaatagacccatctatcagctgggaagatatcaaatggctgagaagactgacatcattgccaattgttgcaaagggcattttgagaggtgatgatgccagggaggctgttaaacatggcttgaatgggatcttggtgtcgaatcatggggctcgacaactcgatggggtgccagccactattgatgttctgccagaaattgtggaggctgtggaagggaaggtggaagtcttcctggacgggggtgtgcggaaaggcactgatgttctgaaagctctggctcttggcgccaaggctgtgtttgtggggagaccaatcgtttggggcttagctttccagggggagaaaggtgttcaagatgtcctcgagatactaaaggaagaattccggttggccatggctctgagtgggtgccagaatgtgaaagtcatcgacaagacattggtgaggaaaaatcctttggccgtttccaagatctgacagtgcacaatattttcccatctgtattattttttttcagcatgtattacttgacaaagagacactgtgcagagggtgaccacagtctgtaattccccacttcaatacaaagggtgtcgttcttttccaacaaaatagcaatcccttttatttcattgcttttgacttttcaatgggtgtcctaggaaccttttagaaagaaatggactttcatcctggaaatatattaactgttaaaaagaaaacattgaaaatgtgtttagacaacgtcatcccctggcaggctaaagtgctgtatcctttagtaaaattggaggtagcaaacactaaggtgaaaagataatgatctcattgtttattaacctgtattctgtttacatgtctgattcacaactttgagaaggtagcactggagagaattggaatgggtggcggtaattggtgatacttctttgaatgtagatttccaatcacatctttagtgtctgaatatatccaaatgttttaggatgtatgttacttcttagagagaaataaagcatttttgggaagaatatatcta

SEQ ID NO: 24033 - DNA, 1142 bp, Homo sapiens
ctgtcgccacacctcaggatgagaaattttgaaaccagtactttatcattttctcctgaggtatcactgggaagatatcaaatggctgagaagactgacatcattgccaattgttgcaaagggcattttgagaggtgatgatgccagggaggctgttaaacatggcttgaatgggatcttggtgtcgaatcatggggctcgacaactcgatggggtgccagccactattgatgttctgccagaaattgtggaggctgtggaagggaaggtggaagtcttcctggacgggggtgtgcggaaaggcactgatgttctgaaagctctggctcttggcgccaaggctgtgtttgtggggagaccaatcgtttggggcttagctttccagggggagaaaggtgttcaagatgtcctcgagatactaaaggaagaattccggttggccatggctctgagtgggtgccagaatgtgaaagtcatcgacaagacattggtgaggaaaaatcctttggccgtttccaagatctgacagtgcacaatattttcccatctgtattattttttttcagcatgtattacttgacaaagagacactgtgcagagggtgaccacagtctgtaattccccacttcaatacaaagggtgtcgttcttttccaacaaaatagcaatcccttttatttcattgcttttgacttttcaatgggtgtcctaggaaccttttagaaagaaatggactttcatcctggaaatatattaactgttaaaaagaaaacattgaaaatgtgtttagacaacgtcatcccctggcaggctaaagtgctgtatcctttagtaaaattggaggtagcaaacactaaggtgaaaagataatgatctcattgtttattaacctgtattctgtttacatgtctttaaaacagtggttcttaaattgtaagctcaggttcaaagtgttggtaatgcctgattcacaactttgagaaggtagcactggagagaattggaatgggtggcggtaattggtgatacttctttgaatgtagatttccaatcacatctttagtgtctgaatatatccaaatgttttaggatgtatgttacttcttagagagaaataaagcatttttgggaagaatatatcta

SEQ ID NO: 24034 - DNA, 1781 bp, Homo sapiens
ttaaaaaaaaaaaaacaacgaactccatctgggatagcaataacctgtgaaaatgctcccccggctaatttgtatcaatgattatgaacaacatgctaaatcagtacttccaaagtctatatatgactattacaggtctggggcaaatgatgaagaaactttggctgataatattgcagcattttccagatggaagctgtatccaaggatgctccggaatgttgctgaaacagatctgtcgacttctgttttaggacagagggtcagcatgccaatatgtgtgggggctacggccatgcagcgcatggctcatgtggacggcgagcttgccactgtgagagcctgtcagtccctgggaacgggcatgatgttgagttcctgggccacctcctcaattgaagaagtggcggaagctggtcctgaggcacttcgttggctgcaactgtatatctacaaggaccgagaagtcaccaagaagctagtgcggcaggcagagaagatgggctacaaggccatatttgtgacagtggacacaccttacctgggcaaccgtctggatgatgtgcgtaacagattcaaactgccgccacaactcaggatgaaaaattttgaaaccagtactttatcattttctcctgaggaaaattttggagacgacagtggacttgctgcatatgtggctaaagcaatagacccatctatcagctgggaagatatcaaatggctgagaagactgacatcattgccaattgttgcaaagggcattttgagaggtgatgatgccagggaggctgttaaacatggcttgaatgggatcttggtgtcgaatcatggggctcgacaactcgatggggtgccagccactattgatgttctgccagaaattgtggaggctgtggaagggaaggtggaagtcttcctggacgggggtgtgcggaaaggcactgatgttctgaaagctctggctcttggcgccaaggctgtgtttgtggggagaccaatcgtttggggcttagctttccagggggagaaaggtgttcaagatgtcctcgagatactaaaggaagaattccggttggccatggctctgagtgggtgccagaatgtgaaagtcatcgacaagacattggtgaggaaaaatcctttggccgtttccaagatctgacagtgcacaatattttcccatctgtattattttttttcagcatgtattacttgacaaagagacactgtgcagagggtgaccacagtctgtaattccccacttcaatacaaagggtgtcgttcttttccaacaaaatagcaatcccttttatttcattgcttttgacttttcaatgggtgtcctaggaaccttttagaaagaaatggactttcatcctggaaatatattaactgttaaaaagaaaacattgaaaatgtgtttagacaacgtcatcccctggcaggctaaagtgctgtatcctttagtaaaattggaggtagcaaacactaaggtgaaaagataatgatctcattgtttattaacctgtattctgtttacatgtctttaaaacagtggttcttaaattgtaagctcaggttcaaagtgttggtaatgcctgattcacaactttgagaaggtagcactggagagaattggaatgggtggcggtaattggtgatacttctttgaatgtagatttccaatcacatctttagtgtctgaatatatccaaatgttttaggatgtatgttacttcttagagagaaataaagcatttttgggaagaatatatcta

SEQ ID NO: 24035 - DNA, 1812 bp, Homo sapiens
tcgcatcggtaaccgttcgtacgagaatcgctgtcctctccttgcggccgccagtgtggtggaattcgcaataacctgtgaaaatgctcccccggctaatttgtatcaatgattatgaacaacatgctaaatcagtacttccaaagtctatatatgactattacaggtctggggcaaatgatgaagaaactttggctgataatattgcagcattttccagatggaagctgtatccaaggatgctccggaatgttgctgaaacagatctgtcgacttctgttttaggacagagggtcagcatgccaatatgtgtgggggctacggccatgcagcgcatggctcatgtggacggcgagcttgccactgtgagagcctgtcagtccctgggaacgggcatgatgttgagttcctgggccacctcctcaattgaagaagtggcggaagctggtcctgaggcacttcgttggctgcaactgtatatctacaaggaccgagaagtcaccaagaagctagtgcggcaggcagagaagatgggctacaaggccatatttgtgacagtggacacaccttacctgggcaaccgtctggatgatgtgcgtaacagattcaaactgccgccacaactcaggatgaaaaattttgaaaccagtactttatcattttctcctgaggaaaattttggagacgacagtggacttgctgcatatgtggctaaagcaatagacccatctatcagctgggaagatatcaaatggctgagaagactgacatcattgccaattgttgcaaagggcattttgagaggtgatgatgccagggaggctgttaaacatggcttgaatgggatcttggtgtcgaatcatggggctcgacaactcgatggggtgccagccactattgatgttctgccagaaattgtggaggctgtggaagggaaggtggaagtcttcctggacgggggtgtgcggaaaggcactgatgttctgaaagctctggctcttggcgccaaggctgtgtttgtggggagaccaatcgtttggggcttagctttccagggggagaaaggtgttcaagatgtcctcgagatactaaaggaagaattccggttggccatggctctgagtgggtgccagaatgtgaaagtcatcgacaagacattggtgaggaaaaatcctttggccgtttccaagatctgacagtgcacaatattttcccatctgtattattttttttcagcatgtattacttgacaaagagacactgtgcagagggtgaccacagtctgtaattccccacttcaatacaaagggtgtcgttcttttccaacaaaatagcaatcccttttatttcattgcttttgacttttcaatgggtgtcctaggaaccttttagaaagaaatggactttcatcctggaaatatattaactgttaaaaagaaaacattgaaaatgtgtttagacaacgtcatcccctggcaggctaaagtgctgtatcctttagtaaaattggaggtagcaaacactaaggtgaaaagataatgatctcattgtttattaacctgtattctgtttacatgtctttaaaacagtggttcttaaattgtaagctcaggttcaaagtgttggtaatgcctgattcacaactttgagaaggtagcactggagagaattggaatgggtggcggtaattggtgatacttctttgaatgtagatttccaatcacatctttagtgtctgaatatatccaaatgttttaggatgtatgttacttcttagagagaaataaagcatttttgggaagaatatatcta

SEQ ID NO: 24036 - DNA, 3386 bp, Homo sapiens
tcggctccgccgccgcgaaggacagcctttccgcgcgggactccggggcgccacgggggccatgtaagcagctatcttccagagggccacactgggcatggacacccttttccctgcctggaggagcacaggtgatagtgtaattttccagtcacgaaactgctaaggccatctcaggggcgtgtgcgccaggataggcaggcggcgtccgaggaccacatagccatgccttttggtctgaagctccgccggacacggcgctacaacgtcctgagcaagaactgctttgtcacacggattcgcctgctggacagcaatgttatcgagtgcacgctgtcggtggaaagcacagggcaagaatgcctggaggctgtggcccagaggctggagctgcgagagacgcactactttggcctttggtttctcagcaagagccagcaagcacgatgggtggagctggagaaacctctgaagaaacatctggacaaattcgctaatgagcctttgcttttctttggagtcatgttctatgtgccaaatgtgtcatggcttcagcaagaggccacaagatatcagtattacctgcaagtcaaaaaagatgtgcttgaagggcgattacgatgtacattggaccaggtgattcggctagccggcctagctgtgcaagctgattttggagactataatcagtttgattctcaagatttcctcagagagtatgtgctatttcctatggatttggccctggaagaggctgttctggaggagctgacccagaaggtagcccaagaacacaaagcccacagtggaatcctgccagcagaagctgaactgatgtacatcaatgaagttgaacgtttggatggatttggacaggaaatcttccctgtaaaggacaatcatggaaactgtgtacaccttggcattttctttatggggattttcgtgaggaacagaattggaagacaagcggtaatatacaggtggaatgacatggggaatatcactcataacaagtcgaccattctagtggagctcatcaacaaagaagagactgccctctttcacacggatgatatcgaaaatgccaagtatatttctcggttgtttgccacacgacacaagttttacaaacaaaacaaaatctgcactgaacagtcaaattctccaccccccatcagacgccagcccacctggagccgatcctctctgcccaggcagcagccgtacatcctgcctcccgttcacgtccagtgtggtgagcactactcggaaacgcacacctcgcaagacagcatttttcatgggaatgaagaagccttgtattgcaactctcacaacagcctggacttaaattatttaaatggcactgtcaccaatggcagcgtgtgtagcgttcacagcgtcaactccctcaactgctcgcaaagtttcatccaggcctcccctgtatcctccaacctcagtatccctgggagtgacatcatgcgggccgactacatcccgagccaccggcacagcgcgatcatcgtgccctcgtacaggccaacccccgattatgagacagtcatgcgccagatgaagagggggatcctgcatacagacagccagagccagtctctgagaaacctcaacattatcaacacccatgcctacaaccagccagaggatctggtgtacagccaaccggagatgcgggagaggcacccctacactgtcccttatgggccacagggggtctacagcaacaaacttgtcagtccatctgaccagaggaacccaaagaataatgtggtaccaagcaagccgggggcaagcgccatctcgcacacggtgagcaccccagagctggccaacatgcagctgcagggcagccataactacagcacggcccacatgcttaagaactatctcttcaggccaccgcccccctacccacggccacgacctgccaccagcaccccagacctggccagccaccgccacaagtacgtcagcggcagcagcccggacctggtgacccggaaggtgcagctctcggtgaagaccttccaagaggacagctctccggtggttcatcagtctctccaggaggtgagcgagcccctcacggccaccaagcaccacggcactgtgaacaagcgccacagcctggaggtgatgaacagcatggtgcggggcatggaggccatgacgctcaagtcgctccacctccccatggctcgccgcaacacgctccgggagcagggaccgcccgaggaggggtcaggcagccacgaggtcccccagctccctcagtatcaccacaagaagaccttctctgatgccactatgctaatccacagcagcgagagtgaggaggaggaggaggaggctccagaatcggtgccccagatccccatgctccgggagaagatggagtacagtgcccagctgcaggcggccctggcccgcatccccaacaagcccccgcctgagtaccccggtccaaggaagagtgtgagcaatggggctctgaggcaggaccaagccagccttcctcccgccatggccagagccagggtgctgaggcatgggccagccaaggccatcagcatgtctcggactgacccgccggctgtcaacggggcctctctcggcccatccatctcggaacccgacctgactagtgtgaaggagcgggtcaaaaaagagcctgtgaaggagagacctgtgtctgaaatgttttccctggaagacagcattatagagagagagatgatgatcaggaatctagagaagcagaagatggcaggcctggaggcacagaagaggccgctgatgttggcagcattgaatgggctctcggtggctcgagtctcagggcgggaagagaatcgagttgatgccacccgggttcccatggacgagaggttcagaaccctgaagaagaaactagaagagggaatggtgttcacagaatatgagcaaattccaaagaaaaaggcgaatggcattttcagcacagcagctctgccagaaaacgccgagcgcagccgaatccgtgaagttgtcccctatgaggagaatcgagtagagctgataccaaccaaagaaaataacacaggatacattaatgcctcccacatcaaggtggtggttggcggggcagaatggcactacatagccacccaggggcccctgccacacacgtgccacgacttctggcagatggtgtgggagcagggagtgaatgtgattgccatggtcactgcagaggagtgatctttccactggaatttgggagtctcaggctgctctgggcaaatcgacatagacgcccaactccaggcacccagctccacatgccatcatccttatcagctgaaaagagaccagaagccgtt

SEQ ID NO: 24037 - DNA, 483 bp, Homo sapiens
ttgccttctcttgtacctggacatgggcagtgggtgagtgcttcctgaatgagggaatgaggaatgctcaaagggaagcctcctgtctcaggaccttgtgctttctctcttttcttgcagaaggtggaagtgcccatgatgctgaggctcctcagggagcagaggatgttcatgatccagactatcgctcagtacaagtttgtctaccaagtcctcatccagttcctccaaaactccagactcatttaatcaccccaatccagctcctggaggagggacccagctccatcgcgctggaggagagtcacctccagacaacatctgctccccccacaggggtgcaggtggctggcagcaaacaggctctctgaagacagtagccaagattattcacacataccatgtattattttatatgagataatttatttttttcccctttggaataacttttgtgaattattataatgcagtttccctagt

SEQ ID NO: 24038 - DNA, 485 bp, Homo sapiens
ggcatgagccaccacgcccagcctcctaacactttcttgagtggacagcattgcatagtgaaaaacgcatgtgaactgaagttacgtagacattggtttaaattctggcattgccatttacactgtgcacctgtgaatgaatgctttaatctctttgaatcttcctttcttcaactgtaaagtagcttttatcgtatcacccttgtaagataaggcatagggcatgggctctgccaagacacttaggaactccagaacttgcagcttatcaaacctgagtgttgatctgtttggcggggtgggggggggggggggcttctgtgtgtgtggaatatggtaccattgataggtcccttctggagcatgaccatggcatttcttttgcatttacagctatcttccagagggccacactgggcatggacacccttttccctgcctggaggagcacaggtgatagtgtaattttccagtcacgaaactgc

SEQ ID NO: 24039 - DNA, 5503 bp, Homo sapiens
  misc_feature (5278)..(5279): n is a, c, g, or t
  misc_feature (5283)..(5284): n is a, c, g, or t
  misc_feature (5296)..(5296): n is a, c, g, or t
  misc_feature (5299)..(5299): n is a, c, g, or t
  misc_feature (5315)..(5315): n is a, c, g, or t
  misc_feature (5318)..(5318): n is a, c, g, or t
  misc_feature (5330)..(5330): n is a, c, g, or t
  misc_feature (5340)..(5340): n is a, c, g, or t
tcggctccgccgccgcgaaggacagcctttccgcgcgggactccggggcgccacgggggccatgtaagcagctatcttccagagggccacactgggcatggacacccttttccctgcctggaggagcacaggtgatagtgtaattttccagtcacgaaactgctaaggccatctcaggggcgtgtgcgccaggataggcaggcggcgtccgaggaccacatagccatgccttttggtctgaagctccgccggacacggcgctacaacgtcctgagcaagaactgctttgtcacacggattcgcctgctggacagcaatgttatcgagtgcacgctgtcggtggaaagcacagggcaagaatgcctggaggctgtggcccagaggctggagctgcgagagacgcactactttggcctttggtttctcagcaagagccagcaagcacgatgggtggagctggagaaacctctgaagaaacatctggacaaattcgctaatgagcctttgcttttctttggagtcatgttctatgtgccaaatgtgtcatggcttcagcaagaggccacaagatatcagtattacctgcaagtcaaaaaagatgtgcttgaagggcgattacgatgtacattggaccaggtgattcggctagccggcctagctgtgcaagctgattttggagactataatcagtttgattctcaagatttcctcagagagtatgtgctatttcctatggatttggccctggaagaggctgttctggaggagctgacccagaaggtagcccaagaacacaaagcccacagtggaatcctgccagcagaagctgaactgatgtacatcaatgaagttgaacgtttggatggatttggacaggaaatcttccctgtaaaggacaatcatggaaactgtgtacaccttggcattttctttatggggattttcgtgaggaacagaattggaagacaagcggtaatatacaggtggaatgacatggggaatatcactcataacaagtcgaccattctagtggagctcatcaacaaagaagagactgccctctttcacacggatgatatcgaaaatgccaagtatatttctcggttgtttgccacacgacacaagttttacaaacaaaacaaaatctgcactgaacagtcaaattctccaccccccatcagacgccagcccacctggagccgatcctctctgcccaggcagcagccgtacatcctgcctcccgttcacgtccagtgtggtgagcactactcggaaacgcacacctcgcaagacagcatttttcatgggaatgaagaagccttgtattgcaactctcacaacagcctggacttaaattatttaaatggcactgtcaccaatggcagcgtgtgtagcgttcacagcgtcaactccctcaactgctcgcaaagtttcatccaggcctcccctgtatcctccaacctcagtatccctgggagtgacatcatgcgggccgactacatcccgagccaccggcacagcgcgatcatcgtgccctcgtacaggccaacccccgattatgagacagtcatgcgccagatgaagagggggatcctgcatacagacagccagagccagtctctgagaaacctcaacattatcaacacccatgcctacaaccagccagaggatctggtgtacagccaaccggagatgcgggagaggcacccctacactgtcccttatgggccacagggggtctacagcaacaaacttgtcagtccatctgaccagaggaacccaaagaataatgtggtaccaagcaagccgggggcaagcgccatctcgcacacggtgagcaccccagagctggccaacatgcagctgcagggcagccataactacagcacggcccacatgcttaagaactatctcttcaggccaccgcccccctacccacggccacgacctgccaccagcaccccagacctggccagccaccgccacaagtacgtcagcggcagcagcccggacctggtgacccggaaggtgcagctctcggtgaagaccttccaagaggacagctctccggtggttcatcagtctctccaggaggtgagcgagcccctcacggccaccaagcaccacggcactgtgaacaagcgccacagcctggaggtgatgaacagcatggtgcggggcatggaggccatgacgctcaagtcgctccacctccccatggctcgccgcaacacgctccgggagcagggaccgcccgaggaggggtcaggcagccacgaggtcccccagctccctcagtatcaccacaagaagaccttctctgatgccactatgctaatccacagcagcgagagtgaggaggaggaggaggaggctccagaatcggtgccccagatccccatgctccgggagaagatggagtacagtgcccagctgcaggcggccctggcccgcatccccaacaagcccccgcctgagtaccccggtccaaggaagagtgtgagcaatggggctctgaggcaggaccaagccagccttcctcccgccatggccagagccagggtgctgaggcatgggccagccaaggccatcagcatgtctcggactgacccgccggctgtcaacggggcctctctcggcccatccatctcggaacccgacctgactagtgtgaaggagcgggtcaaaaaagagcctgtgaaggagagacctgtgtctgaaatgttttccctggaagacagcattatagagagagagatgatgatcaggaatctagagaagcagaagatggcaggcctggaggcacagaagaggccgctgatgttggcagcattgaatgggctctcggtggctcgagtctcagggcgggaagagaatcgagttgatgccacccgggttcccatggacgagaggttcagaaccctgaagaagaaactagaagagggaatggtgttcacagaatatgagcaaattccaaagaaaaaggcgaatggcattttcagcacagcagctctgccagaaaacgccgagcgcagccgaatccgtgaagttgtcccctatgaggagaatcgagtagagctgataccaaccaaagaaaataacacaggatacattaatgcctcccacatcaaggtggtggttggcggggcagaatggcactacatagccacccaggggcccctgccacacacgtgccacgacttctggcagatggtgtgggagcagggagtgaatgtgattgccatggtcactgcagaggaggagggtggacgaaccaaaagccaccgatactggcccaaactaggttcaaagcacagctcagccacctatggcaagttcaaggtcaccacgaagtttcgaacggattctgtttgctatgcaaccacgggcttgaaggtcaagcaccttttgtctgggcaagaaaggacggtgtggcatttacaatatactgactggccagatcacggctgtccagaggatgtccaaggatttttatcctacttggaggagatccagtcggtccgtcgccataccaacagcatgctggaaggcaccaagaaccggcacccgcccatcgtggtccactgtagtgctggggtgggaaggaccggcgtgctcattctttctgagctgatgatctactgcttggaacataacgaaaaggtggaagtgcccatgatgctgaggctcctcagggagcagaggatgttcatgatccagactatcgctcagtacaagtttgtctaccaagtcctcatccagttcctccaaaactccagactcatttaatcaccccaatccagctcctggaggagggacccagctccatcgcgctggaggagagtcacctccagacaacatctgctccccccacaggggtgcaggtggctggcagcaaacaggctctctgaagacagtagccaagattattcacacataccatgtattattttatatgagataatttatttttttcccctttggaataacttttgtgaattattataatgcagtttccctagtaatatagtacttttcatttgaaccacatcttgactgatctgtattgtaatatatgtcagcaggtaaggttgcctgctggatcattttgaggacagaggcatgagggagcacatctcttgtgaagttgcagccagatttgtaaccaaccctgaaattcatcagcttaattcatttatcagcttgattcattcatcattcattgcttatatccaaagcaaagacggtaagaaaatgaattcatcctgaaatataaagaaaagggtctgaaggaacaaacacgattctcttatattttggggctcatgagccttgatagacagtttcctctcgtcttcatttccacccctcatcctcagtagtctcctctcccccacgccccaccccaacttcccccccaagcttgagttaaagacagaatagctaaagacagtgctgcctttacaatgcagtaattgccatctttggggccgaaagacaagctctgtgttgtgcttttcttgaccaccccttatcctgggctctggagcttgtgtttccctgctggcgactgtaccttgggtatttgttgctacctctcctgtttgctcagtaggaccctgtctggtggcattgaggctctggaccagaccatctgtgcagttaaggctctaccctgattgagagaggatagcagacctagaaagagaaaggagttgggcagggcctttgaggattgtgtttttcaggcagggccttgatgatcattgttttttatttaaataagatgtgtgtgctggacagagacctaaaagttgaggtcactaagtcattggaaaggccatcaaggaaacagatggggaagctgatttatgggagctgtaaggcatttagctacataacaggggtcctggccaggaaacacatcaaatgtgacccccgctgtgctgatatcatcttcaggctttggtctgcaagatcagaattaatcccactcgggaccccatagtccaaacttggggccacttgatgaacgatggtagaattgtcattggcagagccctgtgcttctttccttttcttcataaaatccactcgctggtcagttatcttcactttgaagcccagttcttagtttcttcctatggcttcattggtcagtgtccttctgaatttccaaggatggtacacaataaatcatgttttgtacttttttcctcttactgcattttggggatttatcattctatgtctacttttcttgatcagttgattgacnntgtnntgtgtggagtcnagngtccttctgttattgngcnatttctgttttngttggaaagngggggaagctggatgccacaggtgttcagaaaacgtgtaaaatgtgtccaggacggggcacgtgccagtgtagaaggggatgttcagtgtaaaggcaagtagacctaaaaaaagggtgtgtcccgggggggcaaacaaggacttccgtgacggctcgagtttt

SEQ ID NO: 24040 - DNA, 557 bp, Homo sapiens
gagaagatggagtacagtgcccagctgcaggcggccctggcccgcatccccaacaagcccccgcctgagtaccccggtccaaggaagagtgtgagcaatggggctctgaggcaggaccaagccagccttcctcccgccatggccagagccagggtgctgaggcatgggccagccaaggccatcagcatgtctcggactgacccgccggctgtcaacggggcctctctcggcccatccatctcggaacccgacctgactagtgtgaaggagcgggtcaaaaaagagcctgtgaaggagagacctgtgtctgaaatgttttccctggaagacagcattatagagagagagatgatgatcagggtgagtgtcctcctctcccagggcattttccagtgtgaaagcacatgcttcaggcactgagcaaggggcagggcttatgcagggaacgtggtaggtttttaaggaatcattgagcatttaaaaggtagtactttattacacaaaatgttgagtttttgccctttcagataaatcttccattctcatttgtggcttct

SEQ ID NO: 24041 - DNA, 2672 bp, Homo sapiens
gatggttgggtagttaagtgaataagctagaaagacatgtttataaagctatttgatgacaatctcaggcatatttatacagagatgttcttaactgtttgctacaaaaacatgaagatcaaaaactttcttgaagcttacgcttaacttatttggggaaacaaaactccagcccttcttgtgtatgttctgatatccctttgctctacttttagaggagtgaaccctaataggatggtagcagcattcttgtttctttatatctctcctctgtgattgtataccgttttttcaacttaaagcaacttcagctggaaatatgtagaggttggccaaggtgaactaaatagtctgtaacattgattagatatcaagcaacgtgagcatggtagcaaaagcactaactgaagccagtgatttaatttttaattctgattctgataattgatgatatagctcctcgaactttgttttttgttaaaacttggaaaatatatttgtattattttggacaaattatttgaactctctggaccttgattcaatttatatataaggtaaaggcattatactggattatcctgcaatttctttgagttgttagaatataatgtagcttattaatagcaatattagcagtgtagtagattctgactgcaaaacctagccttttctattgattcattagtggtagtaaaggtattatctgatttatcctttttaataggcagtgctttgatcaagtgggaaatagtaatggacaaataaaatcaatgatcattatctaacttgatgcctgcttttcaaaaagtgagcaaatttcacatcttcacccttagacattaattcatggcacctactataagtactcatcctcttcttacctatcttcttttctataggagataaagtggttattcagaccccccaatacaattttttggtttgttttcacagctacttaaaagattaaaataactattcttgcagatatttctaggaatatttttagaaataatatgaaatacagggataataggccaattatgatctttatttttaatttctacagaaaagtactagagaatatatctatagaaacttctttcagataaccctaaagatgatactagaatgtttataaaattattgagaagattatttgtgttataaagcttatttgtaccatagtaaaggatgtttttgttcctcttcattctgggctaatctgtcaatactgaagtccagtcttttcccccttttcttaccagctcaaccttgattcctgtgacccattctttctgatctttcgtagttcatagtcaccaggcatgagtaccttggatagccctctgaagtctgttaccacccagatttccaactcgggttaattggtactaattctattagctggtataaataatccaaaatctgtgcagactctgggagcaaaatgttctactcagtttggaatactgtgccttaaaatatatttcattgtaacagcaccttgtatatatagttggccaaggacagagttgttacaagttacgtggaactttcatagcaaatcttgacagtaaataccttgttcttgtattaggtctatatcctgaattgacctttagcaagaatctttagatctgctggagggctgggatggcttttggacttcagtgaaaaagaatttctgctactcattgttgataacgcttcagtactgtataaatgtttatccttttccacgtaatttgttttctatgatatgagaacttttattataatttgcctcagtcttgatagaatcttaacaaaaataaaatctgtggtcgtctgaggtattctccatgctataacccagtttagctgatgcatttggagcttgggtgctgaaattaaatataacctatttgagttaaggatttattactagtgctccagtggtcacaggaacaataaaaaaggaacaacgatagaaatacgtgatctaggaaagaaggcaactgaaaaacctgaaagaaaaaaaatgaaagattaaaagtatacgatattctattttgatttagcaattacttgttttctagtgttctgtcaatttttggtgacttttataattacattaaaactaagatgctgaattaaaaaaaagtttctcttttattcaagcaccaacattcacttatattacctatatattgcatcaagttttgagccttcaatcccagaagcattgattgactgtctactgtggttcaagtactgtgcataaagatgaataaatattctgtccttggcttagtctaatagtaaaggcactcttagaggagggacaaatattttgcctagataagatttgagagatagtaagtgcggaatttctcttcataaaaatggtagtgttagttgtttagagggagaagtccagctatgtaaggtgaaagtggggcttataaaagtggatctgttgtttaaaaattagtactttgctcctaaaatttttacctaagtgttacatccaacaacagatgaaagtaattcgacagtagcatctgctttattcatttcatatttccagtgcctgacatattgcttggcatatagtagtttagtggatgtgtttgatgaatgaatgagtaaaaattatttttcatgttaaaataaaactttgaatt

SEQ ID NO: 24042 - DNA, 638 bp, Homo sapiens
cctgtgaagcacagtaattgaggtacaataagcgcttagtaaatattagctactatcatcaattattactttctgcaatccaggacttcttatcaaagcatttgtagaagaggattttctagttccctactgttgccttaccacttcccttagtaactcaatgagctgtccaccccaacacagtctgccagtaattataatattaaaaacagcatagctgctatttattgacattcttcaaattattagaatctgaaactacagatcaaacatcatcccggttacccttacaataaccagttaggcagatgttattatctatgttttaaagatgatgccactctgcctcccggattcatctataatcctgtaaacagtggagccacagtgcttctcagagaaagagctcaagacccttgtatgggttgaatacctcttaaaatactggcctggaagaagagtttgaacttcagttacacacagaggaagaaacacacttctacctctgttctttccctaacacctactaaaatgacagagaaatgataagaaagcagaaaactacaaaggaaaaaagaaccaatgagaagacaatagcattttggaactataaagcagatggacaagaaataattgac

SEQ ID NO: 24043 - DNA, 429 bp, Homo sapiens
aaaggctacaaactatatgattccatttatatgccattcttgaaatggacaaactatagagacagaaaaccagtcaacagttaccaggagctagatatggggaagggttgtctacaaaagagtatggcagaattttgggggatgatagagctgttctatataaagcagtccgcatttatctgtggttttgctttcctcagtgtttcagttacccacagtcaactgaggtccaaaaatattaattggaaaattccagaaataagcaatttgtaagttttaaactgcatgccattctgaataacatgataaaatctcatgccattggattcagtcccgccctgtccccacctgggaatcattcctttgtctagcatatcaacgctgtatttaccacatgccctttagtcactgagtagccctctcaattat

SEQ ID NO: 24044 - DNA, 336 bp, Homo sapiens
ataattaaagtcctctaaatcctcatagaaaaccagaaatgtctgacagcaacatataaatgagtgcttcacaaagccactgtgacttctctttccatcgctccttgtaccaggatgtgtattagtttcctatggctgctatgataaatttctacaggcttagtggcttaaaacaacacacattaattttcttatagttgcagaggccaggtgtcagaaattggtttcactgggctaaagtcaaagtgttggtagagctgattccttctgggggagacaggggagaatctgtttccttacctttcctggcatctgcaggcctcctgcgttccttgg

SEQ ID NO: 24045 - DNA, 316 bp, Homo sapiens
agcacttgccctgcacaggctctctcccccatctccactcctccatacagatcccatccagtcttgtggctttaagtatcacctatgtactgccagcccccaaatttaaatcccaagtctcaacctctcacccgactccagtagcctacacagcatctcaactttcatctcaactttcctgtctgtcagacaacccccctcaacttgccctgatcttcctccccaaacctgctccacccagtttctcttcttgagcggcaactccatccttctagttgttcagggcacaaatgttggcgtcactcttgggtcccct

SEQ ID NO: 24046 - DNA, 291 bp, Homo sapiens
ttactgtttattggatgactactatgtgtcagccatggattctgtgtattaatcccttccatcctcatgacaaccttataaggtagatgctagaacagctggggggaactgaggcttagagcacttaagcaatttgtccactgttacatggttagaaagcggcagacctgggctataaagtcaggctctagagttttaaattcttaactatgatgctgtcttacctctcagtaaatgagtatctgattaacaaagaatttttcatgaaataaaatgcagcagaaattactg

SEQ ID NO: 24047 - DNA, 3809 bp, Homo sapiens
tgtgccccagcctggatattcgctcagaggtggcagagcttcgtcagctggagaactgcagcgtggtggagggccacctgcagatcctgctcatgttcacagccaccggggaggacttccgcggcctcagcttccctcgcctcacccaggtcaccgactacctgctgctcttccgtgtctacggactggagagcctgcgcgacctcttccccaacctagcagtcatccgcgggacgcgcctcttcctgggctatgcactggtcatctttgagatgccacatctgcgtgacgtggcactgcctgcacttggggccgtgctgcgtggggctgtgcgtgtggagaagaaccaggagctctgccacctctccaccattgactggggactgctgcagccagcacctggcgccaaccacatcgtgggcaacaagctgggcgaggagtgtgctgacgtgtgccctggtgtgctgggtgctgctggtgagccctgtgccaagaccaccttcagcgggcacactgactacagatgctggacctccagccactgccagagagtgtgcccctgcccccatgggatggcttgcacagcgaggggcgagtgctgccacaccgaatgcctggggggctgcagccagccagaagaccctcgtgcctgtgtagcttgccgccacctctacttccagggtgcctgcctgtgggcctgcccgccaggcacctaccagtatgagtcctggcgctgtgtcacagctgagcgctgtgccagcctgcactctgtgcccggccgtgcctccaccttcggcatacaccagggcagttgcctggcccagtgcccttctggcttcacccgtaatagcagcagcatattctgccacaagtgcgaggggctgtgccctaaagagtgcaaggtaggcaccaagaccatcgactccatccaggcggcacaggatcttgtgggctgcacgcatgtggagggaagcctcatcctcaaccttcgccagggctacaacctggagccacagctgcagcacagcctggggctggtagaaaccattactggcttcctcaaaatcaagcactcctttgccctcgtgtccctgggctttttcaagaacctcaaactaatccggggagacgccatggtggatgggaactacactctctacgtgctggacaaccagaacctacaacagctagggtcctgggtggccgcggggctcaccattcccgtgggcaagatctacttcgccttcaacccgcgcctctgcttggaacacatctaccgactggaggaggtgacaggcacgcgaggtcggcagaacaaggctgagatcaacccccgcaccaacggagaccgcgccgcctgccagactcgcaccctgcgcttcgtgtccaacgtgacggaggcagaccgcatcctgctacgctgggagcgctatgagccactggaggcccgcgacctgctcagcttcatcgtgtactacaaggagtccccattccagaacgccacagagcacgtgggtccagatgcttgtggaacccagagctggaacctgctggatgtggagctgcccctaagccgcacccaggagccaggggtgaccctagcctccctcaagccttggacacagtacgcagtgtttgtgcgggccatcacgctaaccactgaggaggacagccctcatcaaggagcccagagtcccatcgtctacctccgaacgctgcctgcagctcccacggtgccccaagacgtcatctccacgtccaactcctcctcccacctcctggtgcgctggaagccaccgacccagcgcaatgggaacctcacctactacctggtgctgtggcagcggctggcagaggacggcgacctctacctcaatgactactgccaccgcggcttgcggctgcccaccagcaacaacgatccgcgcttcgacggcgaagacggggatcctgaggccgagatggagtccgactgctgcccttgccagcacccacctcctggtcaggttctgcccccgctggaggcgcaagaggcctcgttccagaagaagtttgaaaactttctacacaacgcgatcaccatccccatatccccttggaaggtgacgtccatcaacaagagcccccaaagggactcagggcggcaccgccgggcagctgggcccctccggctggggggcaacagctcggatttcgagatccaggaggacaaggtgccccgtgagcgagcggtgctgagcggcctgcgccacttcacggaataccggatcgacatccatgcctgcaaccacgcggcgcacaccgtgggctgcagcgccgccaccttcgtctttgcgcgcaccatgccccacagagaggctgatggtattccaggaaaggtggcctgggaggcctccagcaagaacagtgtccttctgcgctggctcgagccaccagaccccaacggactcatcctcaagtacgaaatcaagtaccgccgcttgggagaggaggccacagtgctgtgtgtgtcccgtcttcgatatgcgaagtttgggggagtccacctggccctgctgccccctggaaactactctgccagggttagggcaacctcactggctggcaatggctcttggacagacagtgttgccttctacatccttggcccagaggaggaggatgctggggggctgcatgtcctcctcactgccacccctgtggggctcacgctgctcatcgttcttgctgcccttggtttcttctacggcaagaagagaaacagaaccctgtatgcttctgtgaatccagagtacttcagcgcctctgatatgtatgtccctgatgaatgggaggtgcctcgggagcagatctcgataatccgggaactgggccagggctcttttgggatggtatatgaggggctggcacgaggacttgaggctggagaggagtccacacccgtggccctgaagacggtgaatgagctggccagcccacgggaatgcattgagttcctcaaggaagcttctgtcatgaaagccttcaagtgtcaccatgtggtgcgtctcctgggtgtggtatctcagggccagccaactctggtcatcatggagttaatgacccgtggggacctcaagagccatcttcgatctttgcggcctgaggcagagaacaaccctgggctcccacagccagcattgggggaaatgatccaaatggctggtgagattgcagacggcatggcctaccttgctgccaacaagtttgtgcaccgagatctagcagcccgcaactgcatggtgtcccaggacttcaccgtcaagatcggggacttcgggatgactcgggacgtgtatgagacagactattaccgcaagggtgggaaggggctgctgcccgtgcgctggatggcccccgagtccctcaaagatgggatcttcaccacccactcggatgtctggtcctttggcgtggtactctgggagattgtgaccctggcagaacaaccctaccagggcctgtccaatgagcaggtgctgaagttcgtcatggatggcggggtcctggaggagctggagggctgtccccttcagctgcaggagctgatgagccgctgctggcagccgaacccacgcctgcgcccatctttcacacacattctggacagcatacaggaggagctgcggccctccttccgcctcctctccttctactacagcccggaatgccggggggcccggggctccctgcctaccaccgatgcagagcctgactcctcacccactccaagagactgcagccctcaaaatgggggtccagggcactga

SEQ ID NO: 24048 - DNA, 4041 bp, Homo sapiens
tgtgccccagcctggatattcgctcagaggtggcagagcttcgtcagctggagaactgcagcgtggtggagggccacctgcagatcctgctcatgttcacagccaccggggaggacttccgcggcctcagcttccctcgcctcacccaggtcaccgactacctgctgctcttccgtgtctacggactggagagcctgcgcgacctcttccccaacctagcagtcatccgcgggacgcgcctcttcctgggctatgcactggtcatctttgagatgccacatctgcgtgacgtggcactgcctgcacttggggccgtgctgcgtggggctgtgcgtgtggagaagaaccaggagctctgccacctctccaccattgactggggactgctgcagccagcacctggcgccaaccacatcgtgggcaacaagctgggcgaggagtgtgctgacgtgtgccctggtgtgctgggtgctgctggtgagccctgtgccaagaccaccttcagcgggcacactgactacagatgctggacctccagccactgccagagagtgtgcccctgcccccatgggatggcttgcacagcgaggggcgagtgctgccacaccgaatgcctggggggctgcagccagccagaagaccctcgtgcctgtgtagcttgccgccacctctacttccagggtgcctgcctgtgggcctgcccgccaggcacctaccagtatgagtcctggcgctgtgtcacagctgagcgctgtgccagcctgcactctgtgcccggccgtgcctccaccttcggcatacaccagggcagttgcctggcccagtgcccttctggcttcacccgtaatagcagcagcatattctgccacaagtgcgaggggctgtgccctaaagagtgcaaggtaggcaccaagaccatcgactccatccaggcggcacaggatcttgtgggctgcacgcatgtggagggaagcctcatcctcaaccttcgccagggctacaacctggagccacagctgcagcacagcctggggctggtagaaaccattactggcttcctcaaaatcaagcactcctttgccctcgtgtccctgggctttttcaagaacctcaaactaatccggggagacgccatggtggatgggaactacactctctacgtgctggacaaccagaacctacaacagctagggtcctgggtggccgcggggctcaccattcccgtgggcaagatctacttcgccttcaacccgcgcctctgcttggaacacatctaccgactggaggaggtgacaggcacgcgaggtcggcagaacaaggctgagatcaacccccgcaccaacggagaccgcgccgcctgccagactcgcaccctgcgcttcgtgtccaacgtgacggaggcagaccgcatcctgctacgctgggagcgctatgagccactggaggcccgcgacctgctcagcttcatcgtgtactacaaggagtccccattccagaacgccacagagcacgtgggtccagatgcttgtggaacccagagctggaacctgctggatgtggagctgcccctaagccgcacccaggagccaggggtgaccctagcctccctcaagccttggacacagtacgcagtgtttgtgcgggccatcacgctaaccactgaggaggacagccctcatcaaggagcccagagtcccatcgtctacctccgaacgctgcctgcagctcccacggtgccccaagacgtcatctccacgtccaactcctcctcccacctcctggtgcgctggaagccaccgacccagcgcaatgggaacctcacctactacctggtgctgtggcagcggctggcagaggacggcgacctctacctcaatgactactgccaccgcggcttgcggctgcccaccagcaacaacgatccgcgcttcgacggcgaagacggggatcctgaggccgagatggagtccgactgctgcccttgccagcacccacctcctggtcaggttctgcccccgctggaggcgcaagaggcctcgttccagaagaagtttgaaaactttctacacaacgcgatcaccatccccatatccccttggaaggtgacgtccatcaacaagagcccccaaagggactcagggcggcaccgccgggcagctgggcccctccggctggggggcaacagctcggatttcgagatccaggaggacaaggtgccccgtgagcgagcggtgctgagcggcctgcgccacttcacggaataccggatcgacatccatgcctgcaaccacgcggcgcacaccgtgggctgcagcgccgccaccttcgtctttgcgcgcaccatgccccacagtaggtgatccacacacacaccttctacccccatcaccgaccccaaggaccctgtgcaaaggtttggggtttgacttctcgctaaccccagagcctcgctttgcttgcccctctcagttcccataatcccaaagctttccccacctcccagctcagcccagtttagcttgggtttgaacataaggtgagatgaaccacttttggcccggctgctggatgccccttcccgcaggagaggctgatggtattccaggaaaggtggcctgggaggcctccagcaagaacagtgtccttctgcgctggctcgagccaccagaccccaacggactcatcctcaagtacgaaatcaagtaccgccgcttgggagaggaggccacagtgctgtgtgtgtcccgtcttcgatatgcgaagtttgggggagtccacctggccctgctgccccctggaaactactctgccagggttagggcaacctcactggctggcaatggctcttggacagacagtgttgccttctacatccttggcccagaggaggaggatgctggggggctgcatgtcctcctcactgccacccctgtggggctcacgctgctcatcgttcttgctgcccttggtttcttctacggcaagaagagaaacagaaccctgtatgcttctgtgaatccagagtacttcagcgcctctgatatgtatgtccctgatgaatgggaggtgcctcgggagcagatctcgataatccgggaactgggccagggctcttttgggatggtatatgaggggctggcacgaggacttgaggctggagaggagtccacacccgtggccctgaagacggtgaatgagctggccagcccacgggaatgcattgagttcctcaaggaagcttctgtcatgaaagccttcaagtgtcaccatgtggtgcgtctcctgggtgtggtatctcagggccagccaactctggtcatcatggagttaatgacccgtggggacctcaagagccatcttcgatctttgcggcctgaggcagagaacaaccctgggctcccacagccagcattgggggaaatgatccaaatggctggtgagattgcagacggcatggcctaccttgctgccaacaagtttgtgcaccgagatctagcagcccgcaactgcatggtgtcccaggacttcaccgtcaagatcggggacttcgggatgactcgggacgtgtatgagacagactattaccgcaagggtgggaaggggctgctgcccgtgcgctggatggcccccgagtccctcaaagatgggatcttcaccacccactcggatgtctggtcctttggcgtggtactctgggagattgtgaccctggcagaacaaccctaccagggcctgtccaatgagcaggtgctgaagttcgtcatggatggcggggtcctggaggagctggagggctgtccccttcagctgcaggagctgatgagccgctgctggcagccgaacccacgcctgcgcccatctttcacacacattctggacagcatacaggaggagctgcggccctccttccgcctcctctccttctactacagcccggaatgccggggggcccggggctccctgcctaccaccgatgcagagcctgactcctcacccactccaagagactgcagccctcaaaatgggggtccagggcactga

SEQ ID NO: 24049 - DNA, 2860 bp, Homo sapiens
tttcacacacactttcttgttttatttattcaatgcaagattttttcaatattcattgaaactagaacttgatattccctgctaaggatgaggagctatatcattacaaatttcactgacacagatatcacagtccctcccctcctccgcccccccttgccaaggtctaacaggtggctggagtcatggctttgccctcatgcatactggaaggacaatgacagtcctggggtgattcagagcgggggtgccagaacttgagggtggggttgaatgacccctcagctctggggatgggtgttcagcccattccagaacgccacagagcacgtgggtccagatgcttgtggaacccagagctggaacctgctggatgtggagctgcccctaagccgcacccaggagccaggggtgaccctagcctccctcaagccttggacacagtacgcagtgtttgtgcgggccatcacgctaaccactgaggaggacagccctcatcaaggagcccagagtcccatcgtctacctccgaacgctgcctgcagctcccacggtgccccaagacgtcatctccacgtccaactcctcctcccacctcctggtgcgctggaagccaccgacccagcgcaatgggaacctcacctactacctggtgctgtggcagcggctggcagaggacggcgacctctacctcaatgactactgccaccgcggcttgcggctgcccaccagcaacaacgatccgcgcttcgacggcgaagacggggatcctgaggccgagatggagtccgactgctgcccttgccagcacccacctcctggtcaggttctgcccccgctggaggcgcaagaggcctcgttccagaagaagtttgaaaactttctacacaacgcgatcaccatccccatatccccttggaaggtgacgtccatcaacaagagcccccaaagggactcagggcggcaccgccgggcagctgggcccctccggctggggggcaacagctcggatttcgagatccaggaggacaaggtgccccgtgagcgagcggtgctgagcggcctgcgccacttcacggaataccggatcgacatccatgcctgcaaccacgcggcgcacaccgtgggctgcagcgccgccaccttcgtctttgcgcgcaccatgccccacagtaggtgatccacacacacaccttctacccccatcaccgaccccaaggaccctgtgcaaaggtttggggtttgacttctcgctaaccccagagcctcgctttgcttgcccctctcagttcccataatcccaaagctttccccacctcccagctcagcccagtttagcttgggtttgaacataaggtgagatgaaccacttttggcccggctgctggatgccccttcccgcaggagaggctgatggtattccaggaaaggtggcctgggaggcctccagcaagaacagtgtccttctgcgctggctcgagccaccagaccccaacggactcatcctcaagtacgaaatcaagtaccgccgcttgggagaggaggccacagtgctgtgtgtgtcccgtcttcgatatgcgaagtttgggggagtccacctggccctgctgccccctggaaactactctgccagggttagggcaacctcactggctggcaatggctcttggacagacagtgttgccttctacatccttggcccagaggaggaggatgctggggggctgcatgtcctcctcactgccacccctgtggggctcacgctgctcatcgttcttgctgcccttggtttcttctacggcaagaagagaaacagaaccctgtatgcttctgtgaatccagagtacttcagcgcctctgatatgtatgtccctgatgaatgggaggtgcctcgggagcagatctcgataatccgggaactgggccagggctcttttgggatggtatatgaggggctggcacgaggacttgaggctggagaggagtccacacccgtggccctgaagacggtgaatgagctggccagcccacgggaatgcattgagttcctcaaggaagcttctgtcatgaaagccttcaagtgtcaccatgtggtgcgtctcctgggtgtggtatctcagggccagccaactctggtcatcatggagttaatgacccgtggggacctcaagagccatcttcgatctttgcggcctgaggcagagaacaaccctgggctcccacagccagcattgggggaaatgatccaaatggctggtgagattgcagacggcatggcctaccttgctgccaacaagtttgtgcaccgagatctagcagcccgcaactgcatggtgtcccaggacttcaccgtcaagatcggggacttcgggatgactcgggacgtgtatgagacagactattaccgcaagggtgggaaggggctgctgcccgtgcgctggatggcccccgagtccctcaaagatgggatcttcaccacccactcggatgtctggtcctttggcgtggtactctgggagattgtgaccctggcagaacaaccctaccagggcctgtccaatgagcaggtgctgaagttcgtcatggatggcggggtcctggaggagctggagggctgtccccttcagctgcaggagctgatgagccgctgctggcagccgaacccacgcctgcgcccatctttcacacacattctggacagcatacaggaggagctgcggccctccttccgcctcctctccttctactacagcccggaatgccggggggcccggggctccctgcctaccaccgatgcagagcctgactcctcacccactccaagagactgcagccctcaaaatgggggtccagggcactga

SEQ ID NO: 24050 - DNA, 355 bp, Homo sapiens
gtcatcaaaagggctaattagaaacttccaatccccaggagcactcaagtagaagacggatagaagacacttcttagagcaacactgctgctttggtccgactgtgcctatgaaggaactgggttttgcctggtctccatagataccgccttcttcactgactttatcttagactcacactacttgtttccaatacgagatagcaaagcatatgaatagaaaatgaagagaggtgacctgattggactgaggaaggcaaggccccttgaggagacagacagtttggtgttttgttagaaagtgatatgcatgggaggaagagggagagagagaactattcagagaactgtgtgag

SEQ ID NO: 24051 - DNA, 809 bp, Homo sapiens
cattcccctacacaactgtggggatggtccagctacacatagacaggaagcccagagaaacgctcgatgtgagggtccccgcaagcccgtcgggctctttcggcacctggcccccccaaagctcctcaacgaggagtagagactgccaagcccttccactcattcatcatcataaaaatgtaacttgctatggcagcctcttggccattaagggctatactttgtgacctctgtccttgagatctttgctctgacaagttctatagccttctcagtgctgctatcgtgacgcagtgtccctgctgtggctaagtaacctttcgttttgatcaagatttgtccacgcagactcctacctctgcgcctttgcccgtgccgttcccactacctggaaggtctccccgttgctctccagctttgaggtggagacagagcatctcacacttccttttggtgtctcctgacccttttgctccctgctggacttggcgatgtcctcttctgggctcccctagtccttgttttggttgtgagcgaccgcaccagggagcaaaaccttctatggccccggccacaggagcagcaagcactgggcagtgccccagacggaaggaccatcgcgagaataaaggcactgagatgtctggcatcttgcccaaatggccacttatcaccgtgattgaggcacgtcttaacttgctgaagtggaaacagggtaactcaatgcacgcctctgcaccatccctggaaaccaatccagatctatgagaagaaaactggtcatcatagcactggtgattcaacggcac

SEQ ID NO: 24052 - DNA, 656 bp, Homo sapiens
ttttttttcatgtcagacaacgtgcagacattaataaggtttgagggtagtacacctcacacatgcacatgaaaatccaatcatcgtgctatggactacaaaatgactacatactattactcattttagagaaggcatttagaaattaagcaacttgcttaaagttatccagttattaagtggcagagactggcagactctgcagtctggctccagagtccatactctttaccactacgttgcactggagacttagagaccacagcatctgagtaagagagcctcatgcagcacaggagctcaaaaatgaatttactcaaaccttatatgatgtattatctccctcctcctcccaagggagaaaaagagggaaattcctctaagcctaaaatttatatcttaatacatatttttgggtaccattgcatttacaaaggactagggaacttaatgggataagaggagaaatatctgaattctagcccaattcagcctcctaatagccatttaacttggacaaatcaactaataaggctatccatctttcacttttctcaactataagtaggtatgataatccctgattcacctaatttgcagtaagccgagattgcaccattgtactccagcctgggcaagtgacggagtgaaactcc

SEQ ID NO: 24053 - DNA, 398 bp, Homo sapiens
  misc_feature (13)..(13): n is a, c, g, or t
  misc_feature (32)..(32): n is a, c, g, or t
  misc_feature (36)..(36): n is a, c, g, or t
  misc_feature (38)..(39): n is a, c, g, or t
gtggtgaagtagngagggtggctttggggtgngggngnngctatgtggatgtctcttggggtgacactgctacaaatgaattttctgacaaattttagcaaatttgtcatttggcaaattatttgataaatggactgttaaacagacctattgcctgctcatattctctttcctttggaattatttcccaatcattttcattcatagtgactcttttctaatcccgttcacattctctctctgaactgcactgtccattgtggtatgctgtgctattcgccaattatggatgctacataatgatcatgtttatgatgtagttcatgaaaatgatagccctgtacaaataaagtgctaaattctacagttacacgattagaaaacaatgtagtatatga

SEQ ID NO: 24054 - DNA, 435 bp, Homo sapiens
gttagactcctcaaatgtctatcaatctgggctaccaatctcacagtttagacacctgtgtccctttctgctcctggctatgtggatgtctcttggggtgacactgctacaaatgaattttctgacaaattttagcaaatttgtcatttggcaaattatttgataaatggactgttaaacagacctattgcctgctcatattctctttcctttggaattatttcccaatcattttcattcatagtgactcttttctaatcccgttcacattctctctctgaactgcactgtccattgtggtatgctgtgctattcgccaattatggatgctacataatgatcatgtttatgatgtagttcatgaaaatgatagccctgtacaaataaagtgctaaattctacagttacacgattagaaaacaatgtagtatatga

SEQ ID NO: 24055 - DNA, 380 bp, Homo sapiens
gttagcccaagaaactcctctgcactgtgcctctcttccctctctttggcttcttggtttaagaagcagtagtctggtgccaggaaagggattgggttttagtaggagtgtccaatatgtccagtatattacttcactatttgggggtgacagatgcataatgcccaatctgggtacatgtacaatctggtacatgataggtgctcaatcagtacaagttcccttacaccatcctcgcatttataaaatgagagcattgagctcctaatctctaaagctcctttccatgctgatttctgaacctctgtatagaaagttcaccatttctgcaaaccatatgaccctaagatacatctgatgactctcccccagaaattcca

SEQ ID NO: 24056 - DNA, 273 bp, Homo sapiens
cttgaggtcaggagttggagatcagcctggccgacatggtgaaaccccgtctctactaaaaatacgaaaattagctgggcgtggtgccacacgcctatagtcccagctactcgggaggctgaggcaggagaatcgcttgaacccgagaggtggaagttgcagtgagccaagattgcaccgctgctttccagcctgggagacagagtgagactctcataaagaaagagatacatttggaaatctccgtgaaaccttactgtgctccgtggccgg

SEQ ID NO: 24057 - DNA, 235 bp, Homo sapiens
ggaacatggcctcttttacactcaatggctatccaaggctaaggcctgctggctacacagatatgttcatttcactgcagagacagggagggtgtcagtaaatggcttcattttgtatcccttgtatctgcaggccacagaggaaaggctctacacccagacacacaaggaataaagcagtgtgtgcctcccagagtgggtggaaagccaatgatcggacaatcaaatggggtca

SEQ ID NO: 24058 - DNA, 459 bp, Homo sapiens
gccctttggccctgaataaccagcggtgatacccaagtaatacgctgtgggccttgggtgagactctgagtcttgctggctccagatgcgacttagcacattcccatctgtggtggctatggggcaacactcctgcttaagaaaagtggagggacaaggaaaggggactttgccttgcacattaggtaccagctcggccacagtggggaaggggtctttggaaaggggagggaagagtgggaagggctgcatctcatggcttgagtgccagctcagccacagtacactagaacaccaagtagacttctaaggtttttgactgcagtccctggctcccagacagcacctctagacctgcccacggcctgggggaacttgctacagaggttacactgagccgagatcatgccactgcactccagcctgggcgatacagcgagactgcatctcaaaaaaaaa

SEQ ID NO: 24059 - DNA, 320 bp, Homo sapiens
tggggaaatgaaaacttccacatttgtgatgatggctgcacagctctgtgaatataggacactaaaacccactgatttgtatgctttaaatgagtgggttatatctcaataaagctgtgtgcatgtgaccaaaaaaagattatgaaacaagagccctcagggcttacacgggaatggggcttctgcactcatgtcaatattataaaaagccttacgtgccctgtggctaaccaggctgcacacagaatcctaaccacatgagtttctttgccatggggctgggattgtattaactcccaggagtaacactggttcttgag

SEQ ID NO: 24060 - DNA, 370 bp, Homo sapiens
caaatagaagttttaattttaagcattccttatgatattttttaagcctaaaaaccattcaaattgcttgacaaaattatttcatggtgaattttataaggttgatagaagtaaaagctatttttcccaaaacaaacaaaataccatacatagttttttgggtttggtttgttgatgtcatgccaatttccaagcaccaactggttaccacaaacatgggaatatttagtgatatctttgtagtcatcgttaaaattcctgggaaaaaaagaaaaagtttacgtcaaaggaaaattcacctcccacaaggaaagtctgagatgttcatcctgacatttgcgttcctgattatttgtggacatttcttcat

SEQ ID NO: 24061 - DNA, 356 bp, Homo sapiens
tgccataaaactttctctgttacttgcagtgtagtctagattctgtgtctcatattacagactcacatggtcccagtatgcacgtccacattttttttgttgttttttaagagacagggtcttgctctctgccacccatgctagagtacattggtgtgatcatggctcactgcagcttcaaacttctgggctcaaatgatcctcccgccttggcctcccaacgtgctgggattataggcatgagctaccacacccgaccccagatcaattttttaaactaaaacaagataataaatcatttaatttagctaaaacaggttatcagtttcttttattaagctcgtttggaacacatg

SEQ ID NO: 24062 - DNA, 779 bp, Homo sapiens
ggtaaggatccattatgggctcaagggggtccacaactttaaaagtttcaattactactattttaggggctttcctatttaaataactaaaacataaaactaaatataaaggatcgcaaaggaaactgatcatgttaaaataaagttgatattttcaaagttttatgatccagtaacatacatattctgttaacacaaaataagactgcatggtggttctaaaattactataattcaaattcatatcttgaaatatctaacaactgtaatatatctaaatgtctcatttctattggtgacaaagtcacaggtactctgatcctactgtggactgtttcctatattcgtaattgaaggaaatgttatatttcagttagaagttggtgaaaagaaagatttaaaatttttcccatccaagttcaccagacccctggtttagaggttgtcttaattttacttttgtcattttaagagtaaattattttgttttcttgttcaattctcaattatttgggcttattttactgcctcttgcatgcttttttatgcttgaatggtttttgcagtgttagaacagtaataattgaagacttgggtggaaaaaaatcagcacctgattgaaaatgaaaggtttcaacaaaagctcttgataatgttacctccaggtgtaccatcatgccaccattattggtgctacaaatctgttaatttatttatgcttaagtatgtaaactttaataaaacttggatcatctgcattaaaaaataatgctatcttg

SEQ ID NO: 24063 - DNA, 725 bp, Homo sapiens
ggtaaggatccattatgggctcaagggggtccacaactttaaaagtttcaattactactattttaggggctttcctatttaaataactaaaacataaaactaaatataaaggatcgcaaaggaaactgatcatgttaaaataaagttgatattttcaaagttttatgatccagtaacatacatattctgttaacacaaaataagactgcatggtggttatctaaatgtctcatttctattggtgacaaagtcacaggtactctgatcctactgtggactgtttcctatattcgtaattgaaggaaatgttatatttcagttagaagttggtgaaaagaaagatttaaaatttttcccatccaagttcaccagacccctggtttagaggttgtcttaattttacttttgtcattttaagagtaaattattttgttttcttgttcaattctcaattatttgggcttattttactgcctcttgcatgcttttttatgcttgaatggtttttgcagtgttagaacagtaataattgaagacttgggtggaaaaaaatcagcacctgattgaaaatgaaaggtttcaacaaaagctcttgataatgttacctccaggtgtaccatcatgccaccattattggtgctacaaatctgttaatttatttatgcttaagtatgtaaactttaataaaacttggatcatctgcattaaaaaataatgctatcttg

SEQ ID NO: 24064 - DNA, 438 bp, Homo sapiens
gccattgagctttttagtgatccagtgaagcctgtggaccccctctcatagtaatgttttcaaagcataaaactaaatataaaggatcgcaaaggaaactgatcatgttaaaataaagttgatattttcaaagttttatgatccagtaacatacatattctgttaacacaaaataagactgcatggtggttctaaaattactataattcaaattcatatcttgaaatatctaacaactgtaatatatctaaatgtctcatttctattggtgacaaagtcacaggtactctgatcctactgtggactgtttcctatattcgtaattgaaggaaatgttatatttcagttagaagttggtgaaaagaaagatttaaaatttttcccatccaagttcaccagacccctggtttagaggttgtcttaattttacttttgtca

SEQ ID NO: 24065 - DNA, 1346 bp, Homo sapiens
aacttacaactattgaatctgtacctttatgccagtaactatgccagtgaagttcctattacttcttatgattgggagcttagaattgtgttctttactgtaaacctttaagatgatttcacaggaataatccctttaacttaacaaatgaactaactcccagatgagatgaaactttttaattttttttgcttctaagtctgtatttaagacactcaacaaatgagttgtgtgaatcttacttgtgcttgttcggatactgaacctacaacagtataggtttaaaataagttaagcgccttgagttccaaaacttgtaccacagtgcacagtgtggtcgattttaaagtcctgactcttaatttggaatggcctgtaaaaacgaaacagtggtcctggttatgtggcttttgtatgaaattttatttgctaagtattctattgtatattgaggtaagtaaacagtaaattgaaatatctaaaattggaaactgcggaagtcccaacacgaagccagtcaaatatttaaaattgtacactgttgcctatgttgcctatcatattgaaacttaaaacttagctggtttttcttcatatttttaccatgagtatttttattagtagtagcagtaggactttccattgtattggcatgtctttcctccatagaagataaatttccggttattaactactgaatgtaatttatatgcacatgtagaagtttgagatatactaggaaatgttgcttacttttgaggttggctgtttttatgaaccagggacattgtagtttgaatttgtgggtgatatttttatctgttcttctctagggaaggcgatttcaagcaagaaggtatgccacagataaccatgactgaggtggcaatgtaattaggcagtgtaatggaaagtataataaaaccaaatcatttagccttcaattgtagtaaagaggtgcaaattagttctaataaaaaatgtctttaacaaaatgtgaatacgtgactaagatgggaaagtaggtagcagtaatataaatatggaacaatgtagactactaattggaatagtaaagggagccattttaccaaataaaattaaaatgtaagattctgcagtcagaaacaaaactttaaaaactccgaacagtggttacctctgacagcatatggactgggaaggggcaaaaggaatgctttttgcatctcagcatagtgagaccttgtctctacaaacaataaagcagccaggagaatcacctgaacctggcaggtggaggttgtagtgagctgagatcgtgccactgcattcctgcctgggcgacagagtgagactctgtctca

SEQ ID NO: 24066 - DNA, 1779 bp, Homo sapiens
  misc_feature (1526)..(1526): n is a, c, g, or t
ttggtgtgtattgaatctgattcagccatgagtcagatacatgtggttatttagttcagtagtccttcattgtacctcaaggttgtgatgaaattttaatgaattaagttgaatagctcaaaagtatatacttcgtaacactcagtttcagttacagtcactgactgatgtagttctgctggcacctgacagctctcagttactaagcttctgcgatatgctaggcactgtgctggatgataagacagcacccctgccctctagaagctcgggcagttaaaatggagcagagggaagcaacggagactcagaaaataactatacacactaagggagagcttggtctggggctggtgaataggaatctgttagggaagtgacagatgcaaagctggaaatgttaatcagatggctaaattcaggccaaaatttaaatatcttcaattttcaactcaagaaaggcatttggcagaaaccatgtttggaaaagaaattaaaatttacaagaatttttattaagcactttgcctagcaaaagatttttgttaaaaaaaaaaaaaaaaacttgtcatccctactttcagggagtagaatcctggaatttttgaagcatactgtaagatggtgattatatctcagaaggggttccgtggtgtctgtaccctctctgccacaggcaatactgagcaccataggcttgagtatgccatttaactgtttggttttgtttctatttgtcactttatacaatgtttgataatatctcctcattgaactgggctatttcagtcaaggttctccagagaaacagaaccaagagaacgtacatgtgtgcgtgtgtctgtgtgtgtgtatgcacatacacacacacatatatatagagagagagatttattggctgaatttcagaaattggcttgtgtgattgtagggcttggcaagtctgaaatttgtaggacaggctagcaggctggaaactcaggcaggatttctgtgttacagtcctgaagcagaaacctcagcttttgctcttaaggtcttcacttgattggatgagatctacgaatattactaagattaatctttacttaaaatcaggtaattttagatgttaatcacatctacaaaataccctcacagcaacatctagagtagtgtttgatggaacaactggggaccatagcccagccaagttgacacataatattcattgtcacatggtgtgaagacctatcaatcaatttttgttaaacaagtaaatcaggaaaaatattttttgtcattattacattaagaaaatttattatccaggtgacagtacatactggagtttttggaagaagtgaggagccatgacctaaaaaagcttgtgtttcctgccagcagcacatcttaaccaaagatgttccagctaagttaacccagaatattagacaggaaagaaatctgaaaacagatgatgcacttgcaaattgtgcaaggcttgttctgtaatgcaaataggatgtcttctttgaaatgtaaangcactgagcctaagcatgaggaattttaatgtctaatgatgaagctatagagagaaatttcagttaatgaccaggtaggtataagatggtgtccttagataattctgatatcagaactgatgttaattgtagtttaagacaactctcctgagacaggagaaccgcttgaacccgggaggcagaggttggggtgagccgagatcgcgccattgcactccagcctggacaacgaaagcgaaactctgtcccagga

SEQ ID NO: 24067 - DNA, 259 bp, Homo sapiens
aaggaccactcacatacatccatttgatattttttggtatcaagaaagtctttaaacaatcagtaccaccaatagcagtaaaaagacaaaactgtctgaaagtacctatctgtttaaaactttaattagctttatccatccattaaatagttattgaatataaaactgtatcattcactcttctacactctgaggaaatagtggtaaataaagcagatattgtccctactatcaggaaatttacattttagtagtaata

SEQ ID NO: 24068 - DNA, 427 bp, Homo sapiens
tcccacaaccttctcctcaggctcaattaatttgcaagagcggctcacagaactcggagaaacactctacttacatttactggtttattaataaagcatatgataaaggatagaaatgaaaagccagacagagttgcgtagaacaaagtgtggggaagggacacagagcttccatgcacactccaggaacatccacgtgtccagcaatcggaagctctctgaaccccttccttttgggtgtttatggaggattcattgcatagacatgattgattacatcattggccactggtgatcaaattaaccttcaggccctctttcctgcctggaagttagaggaggggggtgttgaaagtcccaaccctctaatcctgtcttggtctttctagtgaccggcccccatcctgaagctaccaaggatctgcca

SEQ ID NO: 24069 - DNA, 261 bp, Homo sapiens
agcagcatgttttataatcctttaggtatataccctttctcaatgaacttccaaagaatatagttcaggccagacacagtggctcacgcctgtagtcccagcactatgggaggctgaggtaggagtactgcttgagtccaggagttcgaaaccagcttgggcaacatagtgagaccttgcctctacaaaaatgcctaaaaaattagccaggcatggtggcacttccctgtagtcccagctactccagaggctgggactctc

SEQ ID NO: 24070 - DNA, 601 bp, Homo sapiens
gagacagagtctcgcactgtcgcccgggctggagtgcaatagcacgatctctgctcactgcaacctccgcctcccaggttcaagagattctcctgcttcagcctcctgagtagctgagattacagatgcccaccaccatgcccagctaattttttgtatttttagtagagatggggtttcattatgttggtcaggctggtcttgaactcctgacctcgtgatccacctgcctcggcctcccaaagtgctgggattataggcatgagccaccacgctcagcctatactctgcttatatatttttaaaaagtttaaaatcataggtataaactaaaaataatacatttaatattctaatcaatggaataaatatggacaactgaaaaaaactaaagctaaaagttgttttattttgaaaggtaaaaaattgataaaactttagcaagattgatcaagaaaaagttaaaaacacaaattactaatactagaaatatgagggatgtcaccacagatcatacaaatatagtgttctgaacaacgtaataaaaatcaattcagtaactgagataacatgaaaaatctcaaaaaattaatttttttat

SEQ ID NO: 24071 - DNA, 566 bp, Homo sapiens
atcaatccatacagtcagtgtaattccattcaatgcccaaccagcaccccccacctgccccgcattttttttggtaagaattaataagctagtcctgaaattcaaatagaaatgcaaagggtgacactcctatttggcagccatttctcttaaagctcagtggttctggacctgcagtatctgctgagttaggagggacaggagagtagcagctaggtcggtggcaaatagcccgcaacattccctttagttacaatgagtttacccctcaatctcaaatatttcctcagtggattaacaggagagccagtgatggtgaagcttaagtgggaatggagtataagggctacctggtatctgtagatggctatatgaacatgcagcttgcagatacagaattcataaatgaggcattgcctggacatctaggtgaagttttaataaggtgtaataatgtcctttatatcagagatgtggaagaagaggaaatggggaaatgagtgaatagcatcttttgaagaggattttttaaatatgtatttctagacaataaagatttgtttttc

SEQ ID NO: 24072 - DNA, 302 bp, Homo sapiens
cccctgacaatctctccatattgcacctagtacaacagatgtacctgtggatccactgggcttttattgggttttgggaatactgatgttatttcacttaaaaactaatccaagcttaatgttttgatgaaaatgaaaatatatccacagggaagcaaatatccacagccacccagtcctctaaatgccacacacatctcattttatctaaagtgttttttcttcccttccaattacaaaataattcagtttactcctaggaagatcttcctattcactgtttttagtcatgctagcacatc

SEQ ID NO: 24073 - DNA, 450 bp, Homo sapiens
tacccacttatgttctgtccatttttctaataggtctttttcttcactgttactgataaggtagaattcctttatatactatggatattaacccttcattagacatatacgtctgactttattcgcagagtctgtaccttgtgttggcttttgtttaaagtgtattttttatatatctgtatttgaaaattttaacatggtaagatttgtaattgggtgttttgctctaaaggcctcccaatcaccaatatcatacagatgtcttcccatattttcttctaaaagtttagaaatgttcctttaaaataggattaaatggctttaattcatctagaatttacaggaatatatttttatcatactgtcccaccactacttcttaaatagccatcaatacttttgaattactgacttgtatacaatgtcaaaaacaagttcccgtgcatgtgg

SEQ ID NO: 24074 - DNA, 1260 bp, Homo sapiens
tccccggagctgagctggggaagggagaccagggttcaccacgttagcattcgcattcctgggaggatgcagccctcgcctggacctgggcgatagacgccttcttctgtttttatttttggaggggagcgccctgtaattgtcctgaacacatgcttcccccccttcctccagccacccgcggaggagagagtcccccttttttgcatttatcttttccttcccctttctttattaaaggtccgggagtggcggcggccaatcagcgcgcggcttccattttgtgagttcaactccgaggctcccgggcttcgcgaggacgcgtttgcagccccctctgccgctcctctctggcggccgaggcgcaggagccgcctcgccggggctcggagctggtgtagctcatattggggctcttttcggggtttgtaatttggccgtgggtaggtaattggctggagcagggcggcagggcgcggcagccaatcagcgcgcggcttctatagggcttgagttattagacgctgatctcaaaacatccttcatcagacacgaaggagaggccaacagatgagggaagccatttttctgcaatggaattaaatggccaaagcagtaaacagtcctcagcgaagccgcctttttgcctacccaaccctggaaagtttgcagaagtggaaggagcagaacgtgagggtgtaacttacaaaaaggttctgggccggagaaggggcgacgttcgggcaccccccgaatggacaatctttccttctgtcaacggcaggggcaggcctagtttgactctgacagtcctcccactaaggaattcctggtgactggaagggggagtgactcaggccctcaacctctagcaggtaagggtgctacctcctgggtgggcatgcccagttcctcagtgggcccagcgcggcccagcctccgaggaagctctgagcagctggcttggctccgaggtatttttagctacagatccagcccccctccatcaccacaacagtcgagtccaaatcaaacgcgctccaggcaggtggggctggggttctgccagcgctgggttacccaccctactttccctgcctgccctccagtgctgccaggcctagtgtgccagccagcgctcagccttcagtaaagggttcccctgcttccaacctccattgcactgcttcccctaagactgtgacctcctggaaggctggagcacaactgcctctcaataaacgtgttgcaaaaaaggaa

SEQ ID NO: 24075 - DNA, 686 bp, Homo sapiens
cagaagagcggggtcggggccggctgaccaggaacctgggcgagcagcggcgggggcccgaggggttctgggccggagaaggggcgacgttcgggcaccccccgaatggacaatctttccttctgtcaacggcaggggcaggcctagtttgactctgacagtcctcccactaaggaattcctggtgactggaagggggagtgactcaggccctcaacctctagcagagtgccttggctccctcctgtcgtcctggggaacctcggccccagccctgcctccccagccagtcacagctcctccctggtcaccctgagggagctcagggcccggctggtagctgggttgctctgcttctgtccccgactcctgtggagcctggcaggcaactccatgatctgaccccggttaccttgacagccctgcctggcctcccctctcatggcccagccaccccagaacctgaagaggttttctagctgccgtgcatttgccaggctgggttacccaccctactttccctgcctgccctccagtgctgccaggcctagtgtgccagccagcgctcagccttcagtaaagggttcccctgcttccaacctccattgcactgcttcccctaagactgtgacctcctggaaggctggagcacaactgcctctcaataaacgtgttgcaaaaaaggaa

SEQ ID NO: 24076 - DNA, 1158 bp, Homo sapiens
gagacagagtttcgctcttgttgcccaggcaatggtgtgatctgggctcaccgcaacctccgcctccagggttcaagcgattctcctgcctcagcctccgagtagctgggattacaggcatgcgccaccacgcccggataattttgtatttttagtagagacagggtttctccatgttggtcaggctggtctcaaactgacctcaggtgatccgcccacctcggcctcccaaagtgctgggattacaggcatgagccactgcgcctggccggacaataatgttttgagctgttgctgagtctggcttttgtgacgggaacttttagcactcaaggagtggccttgtctctggcctgtcccccagtgctcatgggcagccaaggcctggggactgctcaggcagggtagatgtatttgccaggccagctcccgtccctgggacctcagggagtagcttcatccctgaaggctgagtgtcttctgcctcatgtgggtggcccctctgcagggttctcaggcatccagggaagtgggtgccacagcgttgcctccagcctcactggggctggctggactttgctctgacaacacagcagtggctgggcccctgcaactctccagggctcagtttccctgttggccgcactatggcataggcccctgtgtggacaccgatgagctgaccccacaaatgccacccggccgctcccccaggcttcagtggcctaacagctgttgtgtcaggaaccagcttaaagaatctttcttgctttctcaaactctccaggaattcctggtgactggaagggggagtgactcaggccctcaacctctagcaggtaagggtgctacctcctgggtgggcatgcccagttcctcagtgggcccagcgcggcccagcctccgaggaagctctgagcaccaccccagaacctgaagaggttttctagctgccgtgcatttgccaggctgggttacccaccctactttccctgcctgccctccagtgctgccaggcctagtgtgccagccagcgctcagccttcagtaaagggttcccctgcttccaacctccattgcactgcttcccctaagactgtgacctcctggaaggctggagcacaactgcctctcaataaacgtgttgcaaaaaaggaa

SEQ ID NO: 24077 - DNA, 1226 bp, Homo sapiens
tgtgcctcttctgccccaagggcgagaagacgggcttcgcagcgaccctcgggggtccatggagccgcctgccttcgccccctcgctcttcccaggtctgaacctggatggggagaagaaattgaagtgctttggagacgggggggcttaaaacactagggagcctcatcgcccagccttgggcccactttcctttcgatcgtgaggattccgcaccccgaagccgtcttctcggggctccggggcgcgcctgcgctggcaacgcgaaggaggacaaaaggccggcgtccatgttggcaccatgacgcagcatctccgcccgcagcccggagctgctgtcctcccggccgcgctcgctcctcctcccaaacaccagttttctttacaggcttcgagcccgtcgcggctgggccgggctggtctggcaggcgggcccagccgggcagggctgctttgctaatggcggcggctctctttccttccttcctcctttcctccgtccccccggtcgtggggagcccggagcaggaggcgggcccgcggccaggtcgggccccgagagcccgcggggcgcagcgctggcgaccgggtgtcgggggccgtttcgggggccgtgggcctcgggggcgtcgcgcgccgcgcctcccgcgctcgcctcagccgggcgcggcggcctgatgggcgccatttcgcgcgctgcccgtggctggggcggtggcggccgccgcgcgccgggcgggaggagcggcaggggtagggggctgggcgacccggcggcccacgcgggcaccaggaggcctcgccccggaccgcttccctctttcgtctttgtcctgcgcgggcgcccgcagccgagggccacggggtcggcggggcttcgaggccgccccgggtcccaccggctcctccggaagccgcggaccggcctggccctgaccccaggccgccccccgctgcccacccagctctgggcgcccaggtccgacctcccagtcgccctctgagagccgagtcagcgcggggcggggggtcgccccctttgtcctcactcagggcgggaggccctcggggtggccgcagacgccccgttgggcagccctccagcccagctctccaggcaggaggtgggggaagcctgggaaagcggagggggggccccgggatcccccgaggcgcggggctcccggcgaagcctcagatctccggcccttcccggggagggtgcg

SEQ ID NO: 24078 - DNA, 2775 bp, Homo sapiens
tccccggagctgagctggggaagggagaccagggttcaccacgttagcattcgcattcctgggaggatgcagccctcgcctggacctgggcgatagacgccttcttctgtttttatttttggaggggagcgccctgtaattgtcctgaacacatgcttcccccccttcctccagccacccgcggaggagagagtcccccttttttgcatttatcttttccttcccctttctttattaaaggtccgggagtggcggcggccaatcagcgcgcggcttccattttgtgagttcaactccgaggctcccgggcttcgcgaggacgcgtttgcagccccctctgccgctcctctctggcggccgaggcgcaggagccgcctcgccggggctcggagctggtgtagctcatattggggctcttttcggggtttgtaatttggccgtgggtaggtaattggctggagcagggcggcagggcgcggcagccaatcagcgcgcggcttctatagggcttgagttattagacgctgatctcaaaacatccttcatcagacacgaaggagaggccaacagatgagggaagccatttttctgcaatggaattaaatggccaagcccaaggactcacagttggaagactggagaagactttttaaaaagatctggatttttccttatgacttggaatccatctttgtcttgtataactaggtcatagcacaccattcatgtcagcagttaacagttttgaattccaaaaaaacctaagtaaatgacatattttttttcctctttttgttctatgggtgggtggggggagcttggagctgtcttaatctgtattctcttgactgaacaataaatttttaaatatatctagtttcctctattaaacacttaaacctggccatcttattaactccttctctctttttaacaaggtaatgttttaaatgtatatagctttaggactagcgaaatggcagcaacaaaaaattgtgagcagttgttactcttttagtttttaaaaaaccttttacattgtaagtacccaatccattctgtcctgacgcagtacagttttgatgttaatgttgctgagatgtccttaattttccgaaccttcatctgcatgtatgtctttgtctctcttgtctaatataagccagttaagatgcttgagacgatcttgctttataaagctaaggttctagctttatgcttttgaaaatgtttacagcactaaatgctagtcagctttcttccccgtagcttgtacactttctttgaaaatcgatctatttgaagaaaaacagccctgtttttctcgtctttggtgttgggggttggggggagctggtgggtgagggaaaggaagaccttttctttgtgtagagagactaaagccgtcacaggaaactagattaaaactggaaaacaagtcctagctggttccagcaaacaccaacgttaagtggggggtattttctatggtggttgggcggctggtgcgtcttgtgccttttgtttgatttgactgtattttcgccttttgtctcttaatgacgatcacaccattgctatatccagagcagtaaacagtcctcagcgaagccgcctttttgcctacccaaccctggaaagtttgcagaagtggaaggagcagaacgtgagggtgtaacttacaaaaaggttctgggccggagaaggggcgacgttcgggcaccccccgaatggacaatctttccttctgtcaacggcaggggcaggcctagtttgactctgacagtcctcccactaaggaattcctggtgactggaagggggagtgactcaggccctcaacctctagcaggtaagggtgctacctcctgggtgggcatgcccagttcctcagtgggcccagcgcggcccagcctccgaggaagctctgagcagctggcttggctccgaggtatttttagctacagatccagcccccctccatcaccacaacagtcgagtccaaatcaaacgcgctccaggcaggtggggctggggttctgccagcctcctggccagcaggggtgggtgggcagactggggccagtatcagctgttctgcctggacccaggccgggctgggaaggcacacttgtgcttatttcccgcctccacttctgtgcaagcttgtgctgtcataagcagagatcacagccccatttcttggatggagaaagtggacactgaggtctgaggcttttgaggacagtcaggagccctcctatgggctccagtgatgcactcaccagcttctggtcctcttcttccacctcttagagtgccttggctccctcctgtcgtcctggggaacctcggccccagccctgcctccccagccagtcacagctcctccctggtcaccctgagggagctcagggcccggctggtagctgggttgctctgcttctgtccccgactcctgtggagcctggcaggcaactccatgatctgaccccggttaccttgacagccctgcctggcctcccctctcatggcccagccaccccagaacctgaagaggttttctagctgccgtgcatttgccaggctgggttacccaccctactttccctgcctgccctccagtgctgccaggcctagtgtgccagccagcgctcagccttcagtaaagggttcccctgcttccaacctccattgcactgcttcccctaagactgtgacctcctggaaggctggagcacaactgcctctcaataaacgtgttgcaaaaaaggaa

SEQ ID NO: 24079 - DNA, 2869 bp, Homo sapiens
tccccggagctgagctggggaagggagaccagggttcaccacgttagcattcgcattcctgggaggatgcagccctcgcctggacctgggcgatagacgccttcttctgtttttatttttggaggggagcgccctgtaattgtcctgaacacatgcttcccccccttcctccagccacccgcggaggagagagtcccccttttttgcatttatcttttccttcccctttctttattaaaggtccgggagtggcggcggccaatcagcgcgcggcttccattttgtgagttcaactccgaggctcccgggcttcgcgaggacgcgtttgcagccccctctgccgctcctctctggcggccgaggcgcaggagccgcctcgccggggctcggagctggtgtagctcatattggggctcttttcggggtttgtaatttggccgtgggtaggtaattggctggagcagggcggcagggcgcggcagccaatcagcgcgcggcttctatagggcttgagttattagacgctgatctcaaaacatccttcatcagacacgaaggagaggccaacagatgagggaagccatttttctgcaatggaattaaatggccaagtgggtttttcctttgttgcaaatggggaatgtttttcctttgactctaccatccagttcaggacgtctcagtgtgtttaacatttgtcaacaggcccaaggactcacagttggaagactggagaagactttttaaaaagatctggatttttccttatgacttggaatccatctttgtcttgtataactaggtcatagcacaccattcatgtcagcagttaacagttttgaattccaaaaaaacctaagtaaatgacatattttttttcctctttttgttctatgggtgggtggggggagcttggagctgtcttaatctgtattctcttgactgaacaataaatttttaaatatatctagtttcctctattaaacacttaaacctggccatcttattaactccttctctctttttaacaaggtaatgttttaaatgtatatagctttaggactagcgaaatggcagcaacaaaaaattgtgagcagttgttactcttttagtttttaaaaaaccttttacattgtaagtacccaatccattctgtcctgacgcagtacagttttgatgttaatgttgctgagatgtccttaattttccgaaccttcatctgcatgtatgtctttgtctctcttgtctaatataagccagttaagatgcttgagacgatcttgctttataaagctaaggttctagctttatgcttttgaaaatgtttacagcactaaatgctagtcagctttcttccccgtagcttgtacactttctttgaaaatcgatctatttgaagaaaaacagccctgtttttctcgtctttggtgttgggggttggggggagctggtgggtgagggaaaggaagaccttttctttgtgtagagagactaaagccgtcacaggaaactagattaaaactggaaaacaagtcctagctggttccagcaaacaccaacgttaagtggggggtattttctatggtggttgggcggctggtgcgtcttgtgccttttgtttgatttgactgtattttcgccttttgtctcttaatgacgatcacaccattgctatatccagagcagtaaacagtcctcagcgaagccgcctttttgcctacccaaccctggaaagtttgcagaagtggaaggagcagaacgtgagggtgtaacttacaaaaaggttctgggccggagaaggggcgacgttcgggcaccccccgaatggacaatctttccttctgtcaacggcaggggcaggcctagtttgactctgacagtcctcccactaaggaattcctggtgactggaagggggagtgactcaggccctcaacctctagcaggtaagggtgctacctcctgggtgggcatgcccagttcctcagtgggcccagcgcggcccagcctccgaggaagctctgagcagctggcttggctccgaggtatttttagctacagatccagcccccctccatcaccacaacagtcgagtccaaatcaaacgcgctccaggcaggtggggctggggttctgccagcctcctggccagcaggggtgggtgggcagactggggccagtatcagctgttctgcctggacccaggccgggctgggaaggcacacttgtgcttatttcccgcctccacttctgtgcaagcttgtgctgtcataagcagagatcacagccccatttcttggatggagaaagtggacactgaggtctgaggcttttgaggacagtcaggagccctcctatgggctccagtgatgcactcaccagcttctggtcctcttcttccacctcttagagtgccttggctccctcctgtcgtcctggggaacctcggccccagccctgcctccccagccagtcacagctcctccctggtcaccctgagggagctcagggcccggctggtagctgggttgctctgcttctgtccccgactcctgtggagcctggcaggcaactccatgatctgaccccggttaccttgacagccctgcctggcctcccctctcatggcccagccaccccagaacctgaagaggttttctagctgccgtgcatttgccaggctgggttacccaccctactttccctgcctgccctccagtgctgccaggcctagtgtgccagccagcgctcagccttcagtaaagggttcccctgcttccaacctccattgcactgcttcccctaagactgtgacctcctggaaggctggagcacaactgcctctcaataaacgtgttgcaaaaaaggaa

SEQ ID NO: 24080 - DNA, 1953 bp, Homo sapiens
tccccggagctgagctggggaagggagaccagggttcaccacgttagcattcgcattcctgggaggatgcagccctcgcctggacctgggcgatagacgccttcttctgtttttatttttggaggggagcgccctgtaattgtcctgaacacatgcttcccccccttcctccagccacccgcggaggagagagtcccccttttttgcatttatcttttccttcccctttctttattaaaggtccgggagtggcggcggccaatcagcgcgcggcttccattttgtgagttcaactccgaggctcccgggcttcgcgaggacgcgtttgcagccccctctgccgctcctctctggcggccgaggcgcaggagccgcctcgccggggctcggagctggtgtagctcatattggggctcttttcggggtttgtaatttggccgtgggtaggtaattggctggagcagggcggcagggcgcggcagccaatcagcgcgcggcttctatagggcttgagttattagacgctgatctcaaaacatccttcatcagacacgaaggagaggccaacagatgagggaagccatttttctgcaatggaattaaatggccaagcccaaggactcacagttggaagactggagaagactttttaaaaagatctggatttttccttatgacttggaatccatctttgtcttgtataactaggtcatagcacaccattcatgtcagcagttaacagttttgaattccaaaaaaacctaaagcagtaaacagtcctcagcgaagccgcctttttgcctacccaaccctggaaagtttgcagaagtggaaggagcagaacgtgagggtgtaacttacaaaaaggttctgggccggagaaggggcgacgttcgggcaccccccgaatggacaatctttccttctgtcaacggcaggggcaggcctagtttgactctgacagtcctcccactaaggaattcctggtgactggaagggggagtgactcaggccctcaacctctagcaggtaagggtgctacctcctgggtgggcatgcccagttcctcagtgggcccagcgcggcccagcctccgaggaagctctgagcagctggcttggctccgaggtatttttagctacagatccagcccccctccatcaccacaacagtcgagtccaaatcaaacgcgctccaggcaggtggggctggggttctgccagcctcctggccagcaggggtgggtgggcagactggggccagtatcagctgttctgcctggacccaggccgggctgggaaggcacacttgtgcttatttcccgcctccacttctgtgcaagcttgtgctgtcataagcagagatcacagccccatttcttggatggagaaagtggacactgaggtctgaggcttttgaggacagtcaggagccctcctatgggctccagtgatgcactcaccagcttctggtcctcttcttccacctcttagagtgccttggctccctcctgtcgtcctggggaacctcggccccagccctgcctccccagccagtcacagctcctccctggtcaccctgagggagctcagggcccggctggtagctgggttgctctgcttctgtccccgactcctgtggagcctggcaggcaactccatgatctgaccccggttaccttgacagccctgcctggcctcccctctcatggcccagccaccccagaacctgaagaggttttctagctgccgtgcatttgccaggctgggttacccaccctactttccctgcctgccctccagtgctgccaggcctagtgtgccagccagcgctcagccttcagtaaagggttcccctgcttccaacctccattgcactgcttcccctaagactgtgacctcctggaaggctggagcacaactgcctctcaataaacgtgttgcaaaaaaggaa

SEQ ID NO: 24081 - DNA, 1799 bp, Homo sapiens
tccccggagctgagctggggaagggagaccagggttcaccacgttagcattcgcattcctgggaggatgcagccctcgcctggacctgggcgatagacgccttcttctgtttttatttttggaggggagcgccctgtaattgtcctgaacacatgcttcccccccttcctccagccacccgcggaggagagagtcccccttttttgcatttatcttttccttcccctttctttattaaaggtccgggagtggcggcggccaatcagcgcgcggcttccattttgtgagttcaactccgaggctcccgggcttcgcgaggacgcgtttgcagccccctctgccgctcctctctggcggccgaggcgcaggagccgcctcgccggggctcggagctggtgtagctcatattggggctcttttcggggtttgtaatttggccgtgggtaggtaattggctggagcagggcggcagggcgcggcagccaatcagcgcgcggcttctatagggcttgagttattagacgctgatctcaaaacatccttcatcagacacgaaggagaggccaacagatgagggaagccatttttctgcaatggaattaaatggccaaagcagtaaacagtcctcagcgaagccgcctttttgcctacccaaccctggaaagtttgcagaagtggaaggagcagaacgtgagggtgtaacttacaaaaaggttctgggccggagaaggggcgacgttcgggcaccccccgaatggacaatctttccttctgtcaacggcaggggcaggcctagtttgactctgacagtcctcccactaaggaattcctggtgactggaagggggagtgactcaggccctcaacctctagcaggtaagggtgctacctcctgggtgggcatgcccagttcctcagtgggcccagcgcggcccagcctccgaggaagctctgagcagctggcttggctccgaggtatttttagctacagatccagcccccctccatcaccacaacagtcgagtccaaatcaaacgcgctccaggcaggtggggctggggttctgccagcctcctggccagcaggggtgggtgggcagactggggccagtatcagctgttctgcctggacccaggccgggctgggaaggcacacttgtgcttatttcccgcctccacttctgtgcaagcttgtgctgtcataagcagagatcacagccccatttcttggatggagaaagtggacactgaggtctgaggcttttgaggacagtcaggagccctcctatgggctccagtgatgcactcaccagcttctggtcctcttcttccacctcttagagtgccttggctccctcctgtcgtcctggggaacctcggccccagccctgcctccccagccagtcacagctcctccctggtcaccctgagggagctcagggcccggctggtagctgggttgctctgcttctgtccccgactcctgtggagcctggcaggcaactccatgatctgaccccggttaccttgacagccctgcctggcctcccctctcatggcccagccaccccagaacctgaagaggttttctagctgccgtgcatttgccaggctgggttacccaccctactttccctgcctgccctccagtgctgccaggcctagtgtgccagccagcgctcagccttcagtaaagggttcccctgcttccaacctccattgcactgcttcccctaagactgtgacctcctggaaggctggagcacaactgcctctcaataaacgtgttgcaaaaaaggaa

SEQ ID NO: 24082 - DNA, 2311 bp, Homo sapiens
tccccggagctgagctggggaagggagaccagggttcaccacgttagcattcgcattcctgggaggatgcagccctcgcctggacctgggcgatagacgccttcttctgtttttatttttggaggggagcgccctgtaattgtcctgaacacatgcttcccccccttcctccagccacccgcggaggagagagtcccccttttttgcatttatcttttccttcccctttctttattaaaggtccgggagtggcggcggccaatcagcgcgcggcttccattttgtgagttcaactccgaggctcccgggcttcgcgaggacgcgtttgcagccccctctgccgctcctctctggcggccgaggcgcaggagccgcctcgccggggctcggagctggtgtagctcatattggggctcttttcggggtttgtaatttggccgtgggtaggtaattggctggagcagggcggcagggcgcggcagccaatcagcgcgcggcttctatagggcttgagttattagacgctgatctcaaaacatccttcatcagacacgaaggagaggccaacagatgagggaagccatttttctgcaatggaattaaatggccaagcccaaggactcacagttggaagactggagaagactttttaaaaagatctggatttttccttatgacttggaatccatctttgtcttgtataactaggtcatagcacaccattcatgtcagcagttaacagttttgaattccaaaaaaacctaagtaaatgacatattttttttcctctttttgttctatgggtgggtggggggagcttggagctgtcttaatctgtattctcttgactgaacaataaatttttaaatatatctagtttcctctattaaacacttaaacctggccatcttattaactccttctctctttttaacaaggtaatgttttaaatgtatatagctttaggactagcgaaatggcagcaacaaaaaattgtgagcagttgttactcttttagtttttaaaaaaccttttacattgtaagtacccaatccattctgtcctgacgcagtacagttttgatgttaatgttgctgagatgtccttaattttccgaaccttcatctgcatgtatgtctttgtctctcttgtctaatataagccagttaagatgcttgagacgatcttgctttataaagctaaggttctagctttatgcttttgaaaatgtttacagcactaaatgctagtcagctttcttccccgtagcttgtacactttctttgaaaatcgatctatttgaagaaaaacagccctgtttttctcgtctttggtgttgggggttggggggagctggtgggtgagggaaaggaagaccttttctttgtgtagagagactaaagccgtcacaggaaactagattaaaactggaaaacaagtcctagctggttccagcaaacaccaacgttaagtggggggtattttctatggtggttgggcggctggtgcgtcttgtgccttttgtttgatttgactgtattttcgccttttgtctcttaatgacgatcacaccattgctatatccagagcagtaaacagtcctcagcgaagccgcctttttgcctacccaaccctggaaagtttgcagaagtggaaggagcagaacgtgagggtgtaacttacaaaaaggttctgggccggagaaggggcgacgttcgggcaccccccgaatggacaatctttccttctgtcaacggcaggggcaggcctagtttgactctgacagtcctcccactaaggaattcctggtgactggaagggggagtgactcaggccctcaacctctagcagagtgccttggctccctcctgtcgtcctggggaacctcggccccagccctgcctccccagccagtcacagctcctccctggtcaccctgagggagctcagggcccggctggtagctgggttgctctgcttctgtccccgactcctgtggagcctggcaggcaactccatgatctgaccccggttaccttgacagccctgcctggcctcccctctcatggcccagccaccccagaacctgaagaggttttctagctgccgtgcatttgccaggctgggttacccaccctactttccctgcctgccctccagtgctgccaggcctagtgtgccagccagcgctcagccttcagtaaagggttcccctgcttccaacctccattgcactgcttcccctaagactgtgacctcctggaaggctggagcacaactgcctctcaataaacgtgttgcaaaaaaggaa

SEQ ID NO: 24083 - DNA, 2943 bp, Homo sapiens
tccccggagctgagctggggaagggagaccagggttcaccacgttagcattcgcattcctgggaggatgcagccctcgcctggacctgggcgatagacgccttcttctgtttttatttttggaggggagcgccctgtaattgtcctgaacacatgcttcccccccttcctccagccacccgcggaggagagagtcccccttttttgcatttatcttttccttcccctttctttattaaaggtccgggagtggcggcggccaatcagcgcgcggcttccattttgtgagttcaactccgaggctcccgggcttcgcgaggacgcgtttgcagccccctctgccgctcctctctggcggccgaggcgcaggagccgcctcgccggggctcggagctggtgtagctcatattggggctcttttcggggtttgtaatttggccgtgggtaggtaattggctggagcagggcggcagggcgcggcagccaatcagcgcgcggcttctatagggcttgagttattagacgctgatctcaaaacatccttcatcagacacgaaggagaggccaacagatgagggaagccatttttctgcaatggaattaaatggccaagcccaaggactcacagttggaagactggagaagactttttaaaaagatctggatttttccttatgacttggaatccatctttgtcttgtataactaggtcatagcacaccattcatgtcagcagttaacagttttgaattccaaaaaaacctaagtaaatgacatattttttttcctctttttgttctatgggtgggtggggggagcttggagctgtcttaatctgtattctcttgactgaacaataaatttttaaatatatctagtttcctctattaaacacttaaacctggccatcttattaactccttctctctttttaacaaggtaatgttttaaatgtatatagctttaggactagcgaaatggcagcaacaaaaaattgtgagcagttgttactcttttagtttttaaaaaaccttttacattgtaagtacccaatccattctgtcctgacgcagtacagttttgatgttaatgttgctgagatgtccttaattttccgaaccttcatctgcatgtatgtctttgtctctcttgtctaatataagccagttaagatgcttgagacgatcttgctttataaagctaaggttctagctttatgcttttgaaaatgtttacagcactaaatgctagtcagctttcttccccgtagcttgtacactttctttgaaaatcgatctatttgaagaaaaacagccctgtttttctcgtctttggtgttgggggttggggggagctggtgggtgagggaaaggaagaccttttctttgtgtagagagactaaagccgtcacaggaaactagattaaaactggaaaacaagtcctagctggttccagcaaacaccaacgttaagtggggggtattttctatggtggttgggcggctggtgcgtcttgtgccttttgtttgatttgactgtattttcgccttttgtctcttaatgacgatcacaccattgctatatccagagcagtaaacagtcctcagcgaagccgcctttttgcctacccaaccctggaaagtttgcagaagtggaaggagcagaacgtgagggtgtaacttacaaaaaggttctgggccggagaaggggcgacgttcgggcaccccccgaatggacaatctttccttctgtcaacggcaggggcaggcctagtttgactctgacagtcctcccactaaggaattcctggtgactggaagggggagtgactcaggccctcaacctctagcaggtaagggtgctacctcctgggtgggcatgcccagttcctcagtgggcccagcgcggcccagcctccgaggaagctctgagcagctggcttggctccgaggtatttttagctacagatccagcccccctccatcaccacaacagtcgagtccaaatcaaacgcgctccaggcaggtggggctggggttctgccagcctcctggccagcaggggtgggtgggcagactggggccagtatcagctgttctgcctggacccaggccgggctgggaaggcacacttgtgcttatttcccgcctccacttctgtgcaagcttgtgctgtcataagcagagatcacagccccatttcttggatggagaaagtggacactgaggtctgaggcttttgaggacagtcaggagccctcctatgggctccagtgatgcactcaccagcttctggtcctcttcttccacctcttagagtgccttggctccctcctgtcgtcctggggaacctcggccccagccctgcctccccagccagtcacagctcctccctggtcaccctgagggagctcagggcccggctggtagctgggttgctctgcttctgtccccgactcctgtggagcctggcaggcaactccatgatctgaccccggttaccttgacagccctgcctggcctcccctctcatggcccagccaccccagaacctgaagaggttttctagctgccgtgcatttgccaggctgggttacccaccctactttccctgcctgccctccagtgctgccaggcctagtgtgccagccagcgctcagccttcagtaaagggttcccctgcttccaacctccattgcactgcttcccctaagactgtgacctcctggaaggctggagcacaactgcctctcaataaacgtgttgcaaaaaaggaaaaaaaaaaagaagacaaacatgaaaagcaaaaagtgcccagcaagcatgtagaacacagcaaccaaggaagcgcaagacaggccggaaatgaaggtgtccagccagacatcaaccggaccgcgcaggcacagaaacaggacaccgggcatgcggacggaaggaagaaa

SEQ ID NO: 24084 - DNA, 3151 bp, Homo sapiens
tccccggagctgagctggggaagggagaccagggttcaccacgttagcattcgcattcctgggaggatgcagccctcgcctggacctgggcgatagacgccttcttctgtttttatttttggaggggagcgccctgtaattgtcctgaacacatgcttcccccccttcctccagccacccgcggaggagagagtcccccttttttgcatttatcttttccttcccctttctttattaaaggtccgggagtggcggcggccaatcagcgcgcggcttccattttgtgagttcaactccgaggctcccgggcttcgcgaggacgcgtttgcagccccctctgccgctcctctctggcggccgaggcgcaggagccgcctcgccggggctcggagctggtgtagctcatattggggctcttttcggggtttgtaatttggccgtgggtaggtaattggctggagcagggcggcagggcgcggcagccaatcagcgcgcggcttctatagggcttgagttattagacgctgatctcaaaacatccttcatcagacacgaaggagaggccaacagatgagggaagccatttttctgcaatggaattaaatggccaagcccaaggactcacagttggaagactggagaagactttttaaaaagatctggatttttccttatgacttggaatccatctttgtcttgtataactaggtcatagcacaccattcatgtcagcagttaacagttttgaattccaaaaaaacctaagtaaatgacatattttttttcctctttttgttctatgggtgggtggggggagcttggagctgtcttaatctgtattctcttgactgaacaataaatttttaaatatatctagtttcctctattaaacacttaaacctggccatcttattaactccttctctctttttaacaaggtaatgttttaaatgtatatagctttaggactagcgaaatggcagcaacaaaaaattgtgagcagttgttactcttttagtttttaaaaaaccttttacattgtaagtacccaatccattctgtcctgacgcagtacagttttgatgttaatgttgctgagatgtccttaattttccgaaccttcatctgcatgtatgtctttgtctctcttgtctaatataagccagttaagatgcttgagacgatcttgctttataaagctaaggttctagctttatgcttttgaaaatgtttacagcactaaatgctagtcagctttcttccccgtagcttgtacactttctttgaaaatcgatctatttgaagaaaaacagccctgtttttctcgtctttggtgttgggggttggggggagctggtgggtgagggaaaggaagaccttttctttgtgtagagagactaaagccgtcacaggaaactagattaaaactggaaaacaagtcctagctggttccagcaaacaccaacgttaagtggggggtattttctatggtggttgggcggctggtgcgtcttgtgccttttgtttgatttgactgtattttcgccttttgtctcttaatgacgatcacaccattgctatatccagagcagtaaacagtcctcagcgaagccgcctttttgcctacccaaccctggaaagtttgcagaagtggaaggagcagaacgtgagggtgtaacttacaaaaaggttctgggccggagaaggggcgacgttcgggcaccccccgaatggacaatctttccttctgtcaacggcaggggcaggcctagtttgactctgacagtcctcccactaaggaattcctggtgactggaagggggagtgactcaggccctcaacctctagcaggtaagggtgctacctcctgggtgggcatgcccagttcctcagtgggcccagcgcggcccagcctccgaggaagctctgagcagctggcttggctccgaggtatttttagctacagatccagcccccctccatcaccacaacagtcgagtccaaatcaaacgcgctccaggcaggtggggctggggttctgccagcctcctggccagcaggggtgggtgggcagactggggccagtatcagctgttctgcctggacccaggccgggctgggaaggcacacttgtgcttatttcccgcctccacttctgtgcaagcttgtgctgtcataagcagagatcacagccccatttcttggatggagaaagtggacactgaggtctgaggcttttgaggacagtcaggagccctcctatgggctccagtgatgcactcaccagcttctggtcctcttcttccacctcttagagtgccttggctccctcctgtcgtcctggggaacctcggccccagccctgcctccccagccagtcacagctcctccctggtcaccctgagggagctcagggcccggctggtagctgggttgctctgcttctgtccccgactcctgtggagcctggcaggcaactccatgatctgaccccggttaccttgacagccctgcctggcctcccctctcatggcccagccaccccagaacctgaagaggttttctagctgccgtgcatttgccaggctgggttacccaccctactttccctgcctgccctccagtgctgccaggcctagtgtgccagccagcgctcagccttcagtaaagggttcccctgcttccaacctccattgcactgcttcccctaagactgtgacctcctggaaggctggagcacaactgcctctcaataaacgtgttgcaaaaaaggaaaaaaaaaaaaaaaaaaaaaaaaaaaaaaaaaaaaaaaaggggggggccgcaaaaaatttccccccgaggggggcgcaagatttgggggttaccaagatttgttttgtaaacaaggggggggcccataatatgaggctggcaattacttagagcgcacagagggaccgctgggcgccgctttttaaaagagtttgtgaagggcggaaaaactgctcgcgcgggggggcatcttgggaaaaagaaacccaaaacaggggggggggggaaccatagtgggcaatcatacctacgggaaattttaacagctcagaggaaatatagacttgtaacgctgtatagtgggcttaacccaaggcggcatggtactgttgcgtta

SEQ ID NO: 24085 - DNA, 1169 bp, Homo sapiens
tgtgcctcttctgccccaagggcgagaagacgggcttcgcagcgaccctcgggggtccatggagccgcctgccttcgccccctcgctcttcccaggtctgaacctggatggggagaagaaattgaagtgctttggagacgggggggcttaaaacactagggagcctcatcgcccagccttgggcccactttcctttcgatcgtgaggattccgcaccccgaagccgtcttctcggggctccggggcgcgcctgcgctggcaacgcgaaggaggacaaaaggccggcgtccatgttggcaccatgacgcagcatctccgcccgcagcccggagctgctgtcctcccggccgcgctcgctcctcctcccaaacaccagttttctttacaggcttcgagcccgtcgcggctgggccgggctggtctggcaggcgggcccagccgggcagggctgctttgctaatggcggcggctctctttccttccttcctcctttcctccgtccccccggtcgtggggagcccggagcaggaggcgggcccgcggccaggttctgggccggagaaggggcgacgttcgggcaccccccgaatggacaatctttccttctgtcaacggcaggggcaggcctagtttgactctgacagtcctcccactaaggaattcctggtgactggaagggggagtgactcaggccctcaacctctagcagagtgccttggctccctcctgtcgtcctggggaacctcggccccagccctgcctccccagccagtcacagctcctccctggtcaccctgagggagctcagggcccggctggtagctgggttgctctgcttctgtccccgactcctgtggagcctggcaggcaactccatgatctgaccccggttaccttgacagccctgcctggcctcccctctcatggcccagccaccccagaacctgaagaggttttctagctgccgtgcatttgccaggctgggttacccaccctactttccctgcctgccctccagtgctgccaggcctagtgtgccagccagcgctcagccttcagtaaagggttcccctgcttccaacctccattgcactgcttcccctaagactgtgacctcctggaaggctggagcacaactgcctctcaataaacgtgttgcaaaaaaggaa

SEQ ID NO: 24086 - DNA, 2236 bp, Homo sapiens
tccccggagctgagctggggaagggagaccagggttcaccacgttagcattcgcattcctgggaggatgcagccctcgcctggacctgggcgatagacgccttcttctgtttttatttttggaggggagcgccctgtaattgtcctgaacacatgcttcccccccttcctccagccacccgcggaggagagagtcccccttttttgcatttatcttttccttcccctttctttattaaaggtccgggagtggcggcggccaatcagcgcgcggcttccattttgtgagttcaactccgaggctcccgggcttcgcgaggacgcgtttgcagccccctctgccgctcctctctggcggccgaggcgcaggagccgcctcgccggggctcggagctggtgtagctcatattggggctcttttcggggtttgtaatttggccgtgggtaggtaattggctggagcagggcggcagggcgcggcagccaatcagcgcgcggcttctatagggcttgagttattagacgctgatctcaaaacatccttcatcagacacgaaggagaggccaacagatgagggaagccatttttctgcaatggaattaaatggccaagcccaaggactcacagttggaagactggagaagactttttaaaaagatctggatttttccttatgacttggaatccatctttgtcttgtataactaggtcatagcacaccattcatgtcagcagttaacagttttgaattccaaaaaaacctaagtaaatgacatattttttttcctctttttgttctatgggtgggtggggggagcttggagctgtcttaatctgtattctcttgactgaacaataaatttttaaatatatctagtttcctctattaaacacttaaacctggccatcttattaactccttctctctttttaacaaggtaatgttttaaatgtatatagctttaggactagcgaaatggcagcaacaaaaaattgtgagcagttgttactcttttagtttttaaaaaaccttttacattgtaagtacccaatccattctgtcctgacgcagtacagttttgatgttaatgttgctgagatgtccttaattttccgaaccttcatctgcatgtatgtctttgtctctcttgtctaatataagccagttaagatgcttgagacgatcttgctttataaagctaaggttctagctttatgcttttgaaaatgtttacagcactaaatgctagtcagctttcttccccgtagcttgtacactttctttgaaaatcgatctatttgaagaaaaacagccctgtttttctcgtctttggtgttgggggttggggggagctggtgggtgagggaaaggaagaccttttctttgtgtagagagactaaagccgtcacaggaaactagattaaaactggaaaacaagtcctagctggttccagcaaacaccaacgttaagtggggggtattttctatggtggttgggcggctggtgcgtcttgtgccttttgtttgatttgactgtattttcgccttttgtctcttaatgacgatcacaccattgctatatccagagcagtaaacagtcctcagcgaagccgcctttttgcctacccaaccctggaaagtttgcagaagtggaaggagcagaacgtgagggtgtaacttacaaaaaggttctgggccggagaaggggcgacgttcgggcaccccccgaatggacaatctttccttctgtcaacggcaggggcaggcctagtttgactctgacagtcctcccactaaggaattcctggtgactggaagggggagtgactcaggccctcaacctctagcaggtaagggtgctacctcctgggtgggcatgcccagttcctcagtgggcccagcgcggcccagcctccgaggaagctctgagcagctggcttggctccgaggtatttttagctacagatccagcccccctccatcaccacaacagtcgagtccaaatcaaacgcgctccaggcaggtggggctggggttctgccagcgctgggttacccaccctactttccctgcctgccctccagtgctgccaggcctagtgtgccagccagcgctcagccttcagtaaagggttcccctgcttccaacctccattgcactgcttcccctaagactgtgacctcctggaaggctggagcacaactgcctctcaataaacgtgttgcaaaaaaggaa

SEQ ID NO: 24087 - DNA, 1564 bp, Homo sapiens
tccccggagctgagctggggaagggagaccagggttcaccacgttagcattcgcattcctgggaggatgcagccctcgcctggacctgggcgatagacgccttcttctgtttttatttttggaggggagcgccctgtaattgtcctgaacacatgcttcccccccttcctccagccacccgcggaggagagagtcccccttttttgcatttatcttttccttcccctttctttattaaaggtccgggagtggcggcggccaatcagcgcgcggcttccattttgtgagttcaactccgaggctcccgggcttcgcgaggacgcgtttgcagccccctctgccgctcctctctggcggccgaggcgcaggagccgcctcgccggggctcggagctggtgtagctcatattggggctcttttcggggtttgtaatttggccgtgggtaggtaattggctggagcagggcggcagggcgcggcagccaatcagcgcgcggcttctatagggcttgagttattagacgctgatctcaaaacatccttcatcagacacgaaggagaggccaacagatgagggaagccatttttctgcaatggaattaaatggccaagcccaaggactcacagttggaagactggagaagactttttaaaaagatctggatttttccttatgacttggaatccatctttgtcttgtataactaggtcatagcacaccattcatgtcagcagttaacagttttgaattccaaaaaaacctaaagcagtaaacagtcctcagcgaagccgcctttttgcctacccaaccctggaaagtttgcagaagtggaaggagcagaacgtgagggtgtaacttacaaaaagaacagaaccagagaaaagacaacagtaacagagcaccccccgaatgggacaaactattcctacagacaacaacaaaaacaaaccaataaaaacacaaacaaaccacccacaaagaaaaaccaaaaacaaaaataaaacaaacacaagccctcaacctctagcaggtaagggtgctacctcctgggtgggcatgcccagttcctcagtgggcccagcgcggcccagcctccgaggaagctctgagcagctggcttggctccgaggtatttttagcgtggaggaagaccaacgcccccaccaacagcacaacaaacaaaaccaaaacaaacacacaccaaacaaaaaaacaaaaaacaaccaaccaccaaccaacaaaaaaaaacagacgaaaaccagaacaagaaaacaacctaagatccctaagttctcagttgtaattgaaagtatctactcgtaagatcgggaaaagtgcccgggcggaccgcaggcgaaaagcaaagccagaggactgagtgcaaaagggccgtaaaaagacagaggtcccagggggcaagggagagatgagaagtgaggatcgtcgaaatgggcaaaaggcgtgttaaaatgaacgggtcgaagaaggtgtacgaaagatgtggccagggagagcacgggcagcagggggatagggccggcgtggagctactgtcgtagaggg

SEQ ID NO: 24088 - DNA, 2047 bp, Homo sapiens
tccccggagctgagctggggaagggagaccagggttcaccacgttagcattcgcattcctgggaggatgcagccctcgcctggacctgggcgatagacgccttcttctgtttttatttttggaggggagcgccctgtaattgtcctgaacacatgcttcccccccttcctccagccacccgcggaggagagagtcccccttttttgcatttatcttttccttcccctttctttattaaaggtccgggagtggcggcggccaatcagcgcgcggcttccattttgtgagttcaactccgaggctcccgggcttcgcgaggacgcgtttgcagccccctctgccgctcctctctggcggccgaggcgcaggagccgcctcgccggggctcggagctggtgtagctcatattggggctcttttcggggtttgtaatttggccgtgggtaggtaattggctggagcagggcggcagggcgcggcagccaatcagcgcgcggcttctatagggcttgagttattagacgctgatctcaaaacatccttcatcagacacgaaggagaggccaacagatgagggaagccatttttctgcaatggaattaaatggccaagtgggtttttcctttgttgcaaatggggaatgtttttcctttgactctaccatccagttcaggacgtctcagtgtgtttaacatttgtcaacaggcccaaggactcacagttggaagactggagaagactttttaaaaagatctggatttttccttatgacttggaatccatctttgtcttgtataactaggtcatagcacaccattcatgtcagcagttaacagttttgaattccaaaaaaacctaaagcagtaaacagtcctcagcgaagccgcctttttgcctacccaaccctggaaagtttgcagaagtggaaggagcagaacgtgagggtgtaacttacaaaaaggttctgggccggagaaggggcgacgttcgggcaccccccgaatggacaatctttccttctgtcaacggcaggggcaggcctagtttgactctgacagtcctcccactaaggaattcctggtgactggaagggggagtgactcaggccctcaacctctagcaggtaagggtgctacctcctgggtgggcatgcccagttcctcagtgggcccagcgcggcccagcctccgaggaagctctgagcagctggcttggctccgaggtatttttagctacagatccagcccccctccatcaccacaacagtcgagtccaaatcaaacgcgctccaggcaggtggggctggggttctgccagcctcctggccagcaggggtgggtgggcagactggggccagtatcagctgttctgcctggacccaggccgggctgggaaggcacacttgtgcttatttcccgcctccacttctgtgcaagcttgtgctgtcataagcagagatcacagccccatttcttggatggagaaagtggacactgaggtctgaggcttttgaggacagtcaggagccctcctatgggctccagtgatgcactcaccagcttctggtcctcttcttccacctcttagagtgccttggctccctcctgtcgtcctggggaacctcggccccagccctgcctccccagccagtcacagctcctccctggtcaccctgagggagctcagggcccggctggtagctgggttgctctgcttctgtccccgactcctgtggagcctggcaggcaactccatgatctgaccccggttaccttgacagccctgcctggcctcccctctcatggcccagccaccccagaacctgaagaggttttctagctgccgtgcatttgccaggctgggttacccaccctactttccctgcctgccctccagtgctgccaggcctagtgtgccagccagcgctcagccttcagtaaagggttcccctgcttccaacctccattgcactgcttcccctaagactgtgacctcctggaaggctggagcacaactgcctctcaataaacgtgttgcaaaaaaggaa

SEQ ID NO: 24089 - DNA, 1763 bp, Homo sapiens
gagacagagtttcgctcttgttgcccaggcaatggtgtgatctgggctcaccgcaacctccgcctccagggttcaagcgattctcctgcctcagcctccgagtagctgggattacaggcatgcgccaccacgcccggataattttgtatttttagtagagacagggtttctccatgttggtcaggctggtctcaaactgacctcaggtgatccgcccacctcggcctcccaaagtgctgggattacaggcatgagccactgcgcctggccggacaataatgttttgagctgttgctgagtctggcttttgtgacgggaacttttagcactcaaggagtggccttgtctctggcctgtcccccagtgctcatgggcagccaaggcctggggactgctcaggcagggtagatgtatttgccaggccagctcccgtccctgggacctcagggagtagcttcatccctgaaggctgagtgtcttctgcctcatgtgggtggcccctctgcagggttctcaggcatccagggaagtgggtgccacagcgttgcctccagcctcactggggctggctggactttgctctgacaacacagcagtggctgggcccctgcaactctccagggctcagtttccctgttggccgcactatggcataggcccctgtgtggacaccgatgagctgaccccacaaatgccacccggccgctcccccaggcttcagtggcctaacagctgttgtgtcaggaaccagcttaaagaatctttcttgctttctcaaactctccaggaattcctggtgactggaagggggagtgactcaggccctcaacctctagcaggtaagggtgctacctcctgggtgggcatgcccagttcctcagtgggcccagcgcggcccagcctccgaggaagctctgagcagctggcttggctccgaggtatttttagctacagatccagcccccctccatcaccacaacagtcgagtccaaatcaaacgcgctccaggcaggtggggctggggttctgccagcctcctggccagcaggggtgggtgggcagactggggccagtatcagctgttctgcctggacccaggccgggctgggaaggcacacttgtgcttatttcccgcctccacttctgtgcaagcttgtgctgtcataagcagagatcacagccccatttcttggatggagaaagtggacactgaggtctgaggcttttgaggacagtcaggagccctcctatgggctccagtgatgcactcaccagcttctggtcctcttcttccacctcttagagtgccttggctccctcctgtcgtcctggggaacctcggccccagccctgcctccccagccagtcacagctcctccctggtcaccctgagggagctcagggcccggctggtagctgggttgctctgcttctgtccccgactcctgtggagcctggcaggcaactccatgatctgaccccggttaccttgacagccctgcctggcctcccctctcatggcccagccaccccagaacctgaagaggttttctagctgccgtgcatttgccaggctgggttacccaccctactttccctgcctgccctccagtgctgccaggcctagtgtgccagccagcgctcagccttcagtaaagggttcccctgcttccaacctccattgcactgcttcccctaagactgtgacctcctggaaggctggagcacaactgcctctcaataaacgtgttgcaaaaaaggaa

SEQ ID NO: 24090 - DNA, 3177 bp, Homo sapiens
gcgcccggcaggcgttcagggaagcgcggccacgcctgggccggccaccatttcccgggcgccgcggcggcgccgactcgcgggcagcggcccctcagtgcgcccagccgggcccccgaacgccgggagcatgagcgcgggctcggagcgcggggcggcggcaacccccgggggtttgcccgcgccctgcgcctcgaaggtggagctgcggctcagctgccggcacctgctggaccgcgacccgctcaccaagtccgaccccagcgtggcgttgctgcagcaggcgcagggccagtgggtgcaggtgggcagaaccgaggtggtccggagcagcctgcatcccgtgttctccaaggtcttcacggtggactactacttcgaggaggtgcagaggctgcgctttgaggtgtacgacacgcatgggcccagcggcttcagctgtcaggaggacgatttcctggggggcatggagtgcaccctggggcagccagcccaaaagtggcttctgcaagtcgtgatgagagtgtctgttgatgtgctgggccctgctggacactgcgctaagcacttcctgtgctgcacggaatcctcacaccttgccaggacgggtccttcttttttattgaggtatgatgacctctgcctcccctgggcgactgctggcgccgtgaggtggtggacgtgcaggggtggccacacgcagggatggcagattgtggcccagaagaaggtgacccgcccgctgctgctcaagtttggcaggaacgctggcaagtccaccatcacggtgatcgccgaggacatctcggggaacaacggctacgtggagctctccttccgggccaggaagctggacgacaaggacctcttcagcaagtccgaccccttcctggagctctacagggtcaacgacgaccagggcttgcagctggtgtacaggacggaggtggtgaagaacaacctgaacccggtgtgggaggccttcaaagtctctctgagttccctctgcagctgcgaggagacaaggcctctaaagtgcctggtctgggattacgactctcgaggaaagcacgacttcatcggagaattctctaccaccttcgaggagatgcagaaggcctttgaggaggggcaggcccagtgggactgtgtgaaccccaaatacaagcagaagagacgcagttataagaactcaggagtggtcgtcctggctgacctcaagttccacagggtgtactccttcctggactatatcatgggcggctgccagatccacttcaccgtggccattgacttcaccgcctccaatggagacccgcggaacagctgctccctgcactacatcaacccctaccagccgaacgagtacctgaaggcactggtgtccgtgggcgagatctgccaggactatgacagtgacaagaggttttccgctttggggtttggagcccggatccctcccaagtatgaggtgtcccatgactttgccatcaatttcaaccctgaggacgatgagtgtgaaggcatccagggcgtggtggaggcctaccagaactgcctgcccagggtccagctctacggccccaccaacgtggcgcccatcatctccaaggtggcacgcgtggcggcggccgaggagagcaccgggaaagcctctcaatactacatcctgctgatcctgacggacggcgtggtgaccgacatggccgacacacgggaggccattgtgcgtgcctcacgcctgcccatgtccatcatcatcgtgggcgtgggcaacgccgacttcaccgacatgcaggtcctggacggcgacgacggcgtcctgcgctccccacggggtgagcccgcgctccgggacatcgtacagttcgtgcccttccgggagctcaagaacgcatcccctgcggcgctggccaagtgcgtgctggccgaggtcccgaagcaggtggtggagtactacagccacagaggcctgcccccgagaagcctgggtgtccctgccggagaggccagcccaggctgcacaccgtgaagatgtggagggcgtagggtgggggcagtgaggaatgggtccgtacagcctctgtctgcaacatgcttggggtcccttaagctccctccgacctcccagaagcctccagtccccaccaggccccactcccagtcctcctgggatcctgctggcttgggcccggctctggggcccccaaggccgaagggtgacaaaatacaggcccccatgcctggccctgcctgagccaggtgggtggagggagggagatcatgagggacttggagggagctgggagttcatccacgggagaccctgccccgatgagaaggggcagggactgggggctctgctttgcgtctaacctttgtgggggagggccagcaaggcagtccccccacgcccgagaaagcctgggggacccagacacctgtccccacagtcaaagcctggggacccagacatcctgtccccacagtcagcctcctgtccctgctggtgcccccacacccacctaccctgtgctttttgccgtcgggcctctgcacctgggtccatggggtctgcggggtctgcggggtctgcctggcctgtgggttctgccggtggggcttcaggagtaataaagtgtcaccctaaaaaaaaaaaaaaaaaaaaaaaaaaaaaaaaaaaaaaaaaaaaaaaaaaaaaaaaaaaacgggggcgcggcgcgcacacaaagataccccgcgggggggggcgcacatatatcagcagcaccccgcaaattttgtgaacaagaaggggcgccccaataacaggaggagcgcgcctaataaaaacacacgacaccgacgagaggcggcggcgatacacaagacgcggggagcggcgggaacaacacgcgtacagaggaggaaaccatgtcgggaggaaagaggccggcccatacaatgatggagggggggggggacaccgaaaacgtggggaacaacaactccccctctacgaggaagttattgtagctgcgtccagcgagggatataataatacacaacttgtcaagaagagtaaataatattggtgggtacaaaaccacacgtagataaattagtatgtgtagtgtgagcaaaaattggggtaacaggggagtgagtgttagtcaaaaaactttttttcccgaggcg

SEQ ID NO: 24091 - DNA, 2952 bp, Homo sapiens
gcgcccggcaggcgttcagggaagcgcggccacgcctgggccggccaccatttcccgggcgccgcggcggcgccgactcgcgggcagcggcccctcagtgcgcccagccgggcccccgaacgccgggagcatgagcgcgggctcggagcgcggggcggcggcaacccccgggggtttgcccgcgccctgcgcctcgaaggtggagctgcggctcagctgccggcacctgctggaccgcgacccgctcaccaagtccgaccccagcgtggcgttgctgcagcaggcgcagggccagtgggtgcaggtgggcagaaccgaggtggtccggagcagcctgcatcccgtgttctccaaggtcttcacggtggactactacttcgaggaggtgcagaggctgcgctttgaggtgtacgacacgcatgggcccagcggcttcagctgtcaggaggacgatttcctggggggcatggagtgcaccctggggcagattgtggcccagaagaaggtgacccgcccgctgctgctcaagtttggcaggaacgctggcaagtccaccatcacggtgatcgccgaggacatctcggggaacaacggctacgtggagctctccttccgggccaggaagctggacgacaaggacctcttcagcaagtccgaccccttcctggagctctacagggtcaacgacgaccagggcttgcagctggtgtacaggacggaggtggtgaagaacaacctgaacccggtgtgggaggccttcaaagtctctctgagttccctctgcagctgcgaggagacaaggcctctaaagtgcctggtctgggattacgactctcgaggaaagcacgacttcatcggagaattctctaccaccttcgaggagatgcagaaggcctttgaggaggggcaggcccagtgggactgtgtgaaccccaaatacaagcagaagagacgcagttataagaactcaggagtggtcgtcctggctgacctcaagttccacagggtgtactccttcctggactatatcatgggcggctgccagatccacttcaccgtggccattgacttcaccgcctccaatggagacccgcggaacagctgctccctgcactacatcaacccctaccagccgaacgagtacctgaaggcactggtgtccgtgggcgagatctgccaggactatgacagtgacaagaggttttccgctttggggtttggagcccggatccctcccaagtatgaggtgtcccatgactttgccatcaatttcaaccctgaggacgatgagtgtgaaggcatccagggcgtggtggaggcctaccagaactgcctgcccagggtccagctctacggccccaccaacgtggcgcccatcatctccaaggtggcacgcgtggcggcggccgaggagagcaccgggaaagcctctcaatactacatcctgctgatcctgacggacggcgtggtgaccgacatggccgacacacgggaggccattgtgcgtgcctcacgcctgcccatgtccatcatcatcgtgggcgtgggcaacgccgacttcaccgacatgcaggtcctggacggcgacgacggcgtcctgcgctccccacggggtgagcccgcgctccgggacatcgtacagttcgtgcccttccgggagctcaagaacgcatcccctgcggcgctggccaagtgcgtgctggccgaggtcccgaagcaggtggtggagtactacagccacagaggcctgcccccgagaagcctgggtgtccctgccggagaggccagcccaggctgcacaccgtgaagatgtggagggcgtagggtgggggcagtgaggaatgggtccgtacagcctctgtctgcaacatgcttggggtcccttaagctccctccgacctcccagaagcctccagtccccaccaggccccactcccagtcctcctgggatcctgctggcttgggcccggctctggggcccccaaggccgaagggtgacaaaatacaggcccccatgcctggccctgcctgagccaggtgggtggagggagggagatcatgagggacttggagggagctgggagttcatccacgggagaccctgccccgatgagaaggggcagggactgggggctctgctttgcgtctaacctttgtgggggagggccagcaaggcagtccccccacgcccgagaaagcctgggggacccagacacctgtccccacagtcaaagcctggggacccagacatcctgtccccacagtcagcctcctgtccctgctggtgcccccacacccacctaccctgtgctttttgccgtcgggcctctgcacctgggtccatggggtctgcggggtctgcggggtctgcctggcctgtgggttctgccggtggggcttcaggagtaataaagtgtcaccctaaaaaaaaaaaaaaaaaaaaaaaaaaaaaaaaaaaaaaaaaaaaaaaaaaaaaaaaaaaacgggggcgcggcgcgcacacaaagataccccgcgggggggggcgcacatatatcagcagcaccccgcaaattttgtgaacaagaaggggcgccccaataacaggaggagcgcgcctaataaaaacacacgacaccgacgagaggcggcggcgatacacaagacgcggggagcggcgggaacaacacgcgtacagaggaggaaaccatgtcgggaggaaagaggccggcccatacaatgatggagggggggggggacaccgaaaacgtggggaacaacaactccccctctacgaggaagttattgtagctgcgtccagcgagggatataataatacacaacttgtcaagaagagtaaataatattggtgggtacaaaaccacacgtagataaattagtatgtgtagtgtgagcaaaaattggggtaacaggggagtgagtgttagtcaaaaaactttttttcccgaggcg

SEQ ID NO: 24092 - DNA, 1583 bp, Homo sapiens
tgatcagctgagccctcggtccctctcctggacacgaagctcccgccctagtggggccccacgcaatactacatcctgctgatcctgacggacggcgtggtgaccgacatggccgacacacgggaggccattgtgcgtgcctcacgcctgcccatgtccatcatcatcgtgggcgtgggcaacgccgacttcaccgacatgcaggtcctggacggcgacgacggcgtcctgcgctccccacggggtgagcccgcgctccgggacatcgtacagttcgtgcccttccgggagctcaagaacgcatcccctgcggcgctggccaagtgcgtgctggccgaggtcccgaagcaggtggtggagtactacagccacagaggcctgcccccgagaagcctgggtgtccctgccggagaggccagcccaggctgcacaccgtgaagatgtggagggcgtagggtgggggcagtgaggaatgggtccgtacagcctctgtctgcaacatgcttggggtcccttaagctccctccgacctcccagaagcctccagtccccaccaggccccactcccagtcctcctgggatcctgctggcttgggcccggctctggggcccccaaggccgaagggtgacaaaatacaggcccccatgcctggccctgcctgagccaggtgggtggagggagggagatcatgagggacttggagggagctgggagttcatccacgggagaccctgccccgatgagaaggggcagggactgggggctctgctttgcgtctaacctttgtgggggagggccagcaaggcagtccccccacgcccgagaaagcctgggggacccagacacctgtccccacagtcaaagcctggggacccagacatcctgtccccacagtcagcctcctgtccctgctggtgcccccacacccacctaccctgtgctttttgccgtcgggcctctgcacctgggtccatggggtctgcggggtctgcggggtctgcctggcctgtgggttctgccggtggggcttcaggagtaataaagtgtcaccctaaaaaaaaaaaaaaaaaaaaaaaaaaaaaaaaaaaaaaaaaaaaaaaaaaaaaaaaaaaacgggggcgcggcgcgcacacaaagataccccgcgggggggggcgcacatatatcagcagcaccccgcaaattttgtgaacaagaaggggcgccccaataacaggaggagcgcgcctaataaaaacacacgacaccgacgagaggcggcggcgatacacaagacgcggggagcggcgggaacaacacgcgtacagaggaggaaaccatgtcgggaggaaagaggccggcccatacaatgatggagggggggggggacaccgaaaacgtggggaacaacaactccccctctacgaggaagttattgtagctgcgtccagcgagggatataataatacacaacttgtcaagaagagtaaataatattggtgggtacaaaaccacacgtagataaattagtatgtgtagtgtgagcaaaaattggggtaacaggggagtgagtgttagtcaaaaaactttttttcccgaggcg

SEQ ID NO: 24093 - DNA, 975 bp, Homo sapiens
actagcccgacagccccgactagcccgacaggcccccatgcctggccctgcctgagccaggtgggtggagggagggagatcatgagggacttggagggagctgggagttcatccacgggagaccctgccccgatgagaaggggcagggactgggggctctgctttgcgtctaacctttgtgggggagggccagcaaggcagtccccccacgcccgagaaagcctgggggacccagacacctgtccccacagtcaaagcctggggacccagacatcctgtccccacagtcagcctcctgtccctgctggtgcccccacacccacctaccctgtgctttttgccgtcgggcctctgcacctgggtccatggggtctgcggggtctgcggggtctgcctggcctgtgggttctgccggtggggcttcaggagtaataaagtgtcaccctaaaaaaaaaaaaaaaaaaaaaaaaaaaaaaaaaaaaaaaaaaaaaaaaaaaaaaaaaaaacgggggcgcggcgcgcacacaaagataccccgcgggggggggcgcacatatatcagcagcaccccgcaaattttgtgaacaagaaggggcgccccaataacaggaggagcgcgcctaataaaaacacacgacaccgacgagaggcggcggcgatacacaagacgcggggagcggcgggaacaacacgcgtacagaggaggaaaccatgtcgggaggaaagaggccggcccatacaatgatggagggggggggggacaccgaaaacgtggggaacaacaactccccctctacgaggaagttattgtagctgcgtccagcgagggatataataatacacaacttgtcaagaagagtaaataatattggtgggtacaaaaccacacgtagataaattagtatgtgtagtgtgagcaaaaattggggtaacaggggagtgagtgttagtcaaaaaactttttttcccgaggcg

SEQ ID NO: 24094 - DNA, 509 bp, Homo sapiens
gagtgcaggggggccgggctcaccccctgccccccacaggcatccagggcgtggtggaggcctaccagaactgcctgcccagggtccagctctacggccccaccaacgtggcgcccatcatctccaaggtggcacgcgtggcggcggccgaggagagcaccgggaaagcctctgtaggtgcccggggggtgtggtgcatgcttggtgtggggtcggctgtgtgtgcaccagcgcgtggacgtcagggaggcacctggcagagggaacagccagcgcagaggcccccaggcaggacagagctcaggagggcgggggcccagctggttgactacgtctccctcaaaggtgcaggtgtctcgggcacagggctgtccatcgcctcacacggtcacggccatggctgcagcgaggctgcccctctcctcttcctctgggcaccacaaggccgcgcacatgtctactgtttggctgtgtgtgtatcgtcattttgtttacatgtgtctttcctt

SEQ ID NO: 24095 - DNA, 259 bp, Homo sapiens
ggaacagccagcgcagaggcccccaggcaggacagagctcaggagggcgggggcccagctggttgactacgtctccctcaaaggtgcaggtgtctcgggcacagggctgtccatcgcctcacacggtcacggccatggctgcagcgaggctgcccctctcctcttcctctgggcaccacaaggccgcgcacatgtctactgtttggctgtgtgtgtatcgtcattttgtttacatgtgtctttccttgcacaaatgata

SEQ ID NO: 24096 - DNA, 2818 bp, Homo sapiens
gcgcccggcaggcgttcagggaagcgcggccacgcctgggccggccaccatttcccgggcgccgcggcggcgccgactcgcgggcagcggcccctcagtgcgcccagccgggcccccgaacgccgggagcatgagcgcgggctcggagcgcggggcggcggcaacccccgggggtttgcccgcgccctgcgcctcgaaggtggagctgcggctcagctgccggcacctgctggaccgcgacccgctcaccaagtccgaccccagcgtggcgttgctgcagcaggcgcagggccagtgggtgcaggtgggcagaaccgaggtggtccggagcagcctgcatcccgtgttctccaaggtcttcacggtggactactacttcgaggaggtgcagaggctgcgctttgaggtgtacgacacgcatgggcccagcggcttcagctgtcaggaggacgatttcctggggggcatggagtgcaccctggggcagattgtggcccagaagaaggtgacccgcccgctgctgctcaagtttggcaggaacgctggcaagtccaccatcacggtgatcgccgaggacatctcggggaacaacggctacgtggagctctccttccgggccaggaagctggacgacaaggacctcttcagcaagtccgaccccttcctggagctctacagggtcaacgacgaccagggcttgcagctggtgtacaggacggaggtggtgaagaacaacctgaacccggtgtgggaggccttcaaagtctctctgagttccctctgcagctgcgaggagacaaggcctctaaagtgcctggtctgggattacgactctcgaggaaagcacgacttcatcggagaattctctaccaccttcgaggagatgcagaaggcctttgaggaggggcaggcccagtgggactgtgtgaaccccaaatacaagcagaagagacgcagttataagaactcaggagtggtcgtcctggctgacctcaagttccacagggtgtactccttcctggactatatcatgggcggctgccagatccacttcaccgtggccattgacttcaccgcctccaatggagacccgcggaacagctgctccctgcactacatcaacccctaccagccgaacgagtacctgaaggcactggtgtccgtgggcgagatctgccaggactatgacagtgacaagaggttttccgctttggggtttggagcccggatccctcccaagtatgaggtgtcccatgactttgccatcaatttcaaccctgaggacgatgagtgtgaagcaatactacatcctgctgatcctgacggacggcgtggtgaccgacatggccgacacacgggaggccattgtgcgtgcctcacgcctgcccatgtccatcatcatcgtgggcgtgggcaacgccgacttcaccgacatgcaggtcctggacggcgacgacggcgtcctgcgctccccacggggtgagcccgcgctccgggacatcgtacagttcgtgcccttccgggagctcaagaacgcatcccctgcggcgctggccaagtgcgtgctggccgaggtcccgaagcaggtggtggagtactacagccacagaggcctgcccccgagaagcctgggtgtccctgccggagaggccagcccaggctgcacaccgtgaagatgtggagggcgtagggtgggggcagtgaggaatgggtccgtacagcctctgtctgcaacatgcttggggtcccttaagctccctccgacctcccagaagcctccagtccccaccaggccccactcccagtcctcctgggatcctgctggcttgggcccggctctggggcccccaaggccgaagggtgacaaaatacaggcccccatgcctggccctgcctgagccaggtgggtggagggagggagatcatgagggacttggagggagctgggagttcatccacgggagaccctgccccgatgagaaggggcagggactgggggctctgctttgcgtctaacctttgtgggggagggccagcaaggcagtccccccacgcccgagaaagcctgggggacccagacacctgtccccacagtcaaagcctggggacccagacatcctgtccccacagtcagcctcctgtccctgctggtgcccccacacccacctaccctgtgctttttgccgtcgggcctctgcacctgggtccatggggtctgcggggtctgcggggtctgcctggcctgtgggttctgccggtggggcttcaggagtaataaagtgtcaccctaaaaaaaaaaaaaaaaaaaaaaaaaaaaaaaaaaaaaaaaaaaaaaaaaaaaaaaaaaaacgggggcgcggcgcgcacacaaagataccccgcgggggggggcgcacatatatcagcagcaccccgcaaattttgtgaacaagaaggggcgccccaataacaggaggagcgcgcctaataaaaacacacgacaccgacgagaggcggcggcgatacacaagacgcggggagcggcgggaacaacacgcgtacagaggaggaaaccatgtcgggaggaaagaggccggcccatacaatgatggagggggggggggacaccgaaaacgtggggaacaacaactccccctctacgaggaagttattgtagctgcgtccagcgagggatataataatacacaacttgtcaagaagagtaaataatattggtgggtacaaaaccacacgtagataaattagtatgtgtagtgtgagcaaaaattggggtaacaggggagtgagtgttagtcaaaaaactttttttcccgaggcg

SEQ ID NO: 24097 - DNA, 1230 bp, Homo sapiens
  misc_feature (1168)..(1168): n is a, c, g, or t
gcgcccggcaggcgttcagggaagcgcggccacgcctgggccggccaccatttcccgggcgccgcggcggcgccgactcgcgggcagcggcccctcagtgcgcccagccgggcccccgaacgccgggagcatgagcgcgggctcggagcgcggggcggcggcaacccccgggggtttgcccgcgccctgcgcctcgaaggtggagctgcggctcagctgccggcacctgctggaccgcgacccgctcaccaagtccgaccccagcgtggcgttgctgcagcaggcgcagggccagtgggtgcaggtgggcagaaccgaggtggtccggagcagcctgcatcccgtgttctccaaggtcttcacggtggactactacttcgaggaggtgcagaggctgcgctttgaggtgtacgacacgcatgggcccagcggcttcagctgtcaggaggacgatttcctggggggcatggagtgcaccctggggcagattgtggcccagaagaaggtgacccgcccgctgctgctcaagtttggcaggaacgctggcaagtccaccatcacggtgatcgccgaggacatctcggggaacaacggctacgtggagctctccttccgggccaggaagctggacgacaaggacctcttcagcaagtccgaccccttcctggagctctacagggtcaacgacgaccagggcttgcagctggtgtacaggacggaggtggtgaagaacaacctgaacccggtgtgggaggccttcaaagtctctctgagttccctctgcagctgcgaggagacaaggcctctaaagtgcctggtctgggattacgactctcgaggaaagcacgacttcatcggagaattctctaccaccttcgaggagatgcagaaggcctttgaggaggggcaggcccagtgggactgtgtgaaccccaaatacaagcagaagagacgcagttataagaactcaggagtggtcgtcctggctgacctcaagttccacagggtgtactccttcctggactatatcatgggcggctgccagatccacttcaccacaaaacgtgaacgaggagaaactggagtgagcgtttgaaccagccacagtctctacgtgtcatccaaggagcccggcacagaccccgtgtcacccccatgtcacccgcanaccccgcgtcacccatagatacgcacaccccgtgtcacccccatgtcacccgcgtgtcaccc

SEQ ID NO: 24098 - DNA, 662 bp, Homo sapiens
  misc_feature (238)..(238): n is a, c, g, or t
ccccaaatacaagcagaagagacgcagttataagaactcaggagtggtcgtcctggctgacctcaagttccacagggtgtactccttcctggactatatcatgggcggctgccagatccacttcaccacaaaacgtgaacgaggagaaactggagtgagcgtttgaaccagccacagtctctacgtgtcatccaaggagcccggcacagaccccgtgtcacccccatgtcacccgcanaccccgcgtcacccatagatacgcacaccccgtgtcacccccatgtcacccgcgtgtcacccacagatacacggcccccgtgtcacccgcgtgtcacccacagatacacggcccccgtgtcacccgcgtgtcacccacagatacacggcccccgtgtcacccgcgtgtcacacccacagatacacggcccccgtgtcacccgcgtgtcacccacagatacacggcccccgtgtcacccgcgtgttatttgcagatgcgctggttcgtgttttgttgaacgagccccagaatggctttgggagaagccagcaagtgggaaacgtggggggacccagaccaggcttggtccacttaggccctgccggggagggtggtagaggggttgggcggccactaagaaggatgggcggggcccccacaaggc

SEQ ID NO: 24099 - DNA, 246 bp, Homo sapiens
aaagagagaatagatctcagaggatagtcagactcaaatatgttagaaacaagtttcagatgaatttcaaggattacagatggatgcattgaatgcatagtggatggaaaagtggctaacaagttcatggatgagtggatgttgagtaaatgagtagatatgtagacattgaacttgttatggaagacaagtataatatccaattatacttttcatttaaaagttaaagtaaaaattacaacattg

SEQ ID NO: 24100 - DNA, 462 bp, Homo sapiens
gtagaaatggggtctcactatgttgcttaggctggtctcaaactcctggactcaagctatcccctgctttggcctctggagtagctgggactataggcaagcgccaccatacccttcaggtttttaatttattttatgaaaatccctccaaagcaacaatcctcaattctcctgcttgaaagtaatcactaataatcaggtactgtgtgatctgatccttgatgttcatattattgcctttaactgagtagcaatgttaaaatttaatcatttaaattagaaaacatatattgaaaagtcttcatagaagtccggcattataagaactcatcagaccatctagttatcctagaagtattgtttgctacttaaaaagcctatgtggaaagattgtaccatattccttggtaatagtttccaatgtctttttttctctaatagggcctttaaaacactctactt

SEQ ID NO: 24101 - DNA, 482 bp, Homo sapiens
attcctgccccatattagatgagagaagactttaattctttgcaattgagacatttttttttttttgagacagagtcttgctctgtcgcccaggctggagttctccgctcactgtaacctccgccaaccaggttcgagtggttctcctgcctcagcctcccaagtaactgggactacaggcacacgccaccacaccagactaatttttgtatttttagtaatcttagcactttaggagtccaaggcaggaggatcactcgagcccaggcatttgagaccagcctggacaacaaagtcagaccctgtctctacaaaacataaaaaataaataaaaattattcaggcatggtggcatttgcctttagtcccagctacttgggaggctaaggcgggaggattgcttgagcccaggagctgaaggccgcagtgagccatgattatgccactgcactgtagcctgggtgacagtgaaacctcatctc

SEQ ID NO: 24102 - DNA, 447 bp, Homo sapiens
cctggccccaattataaggaactttgaaagtcactgtacttacagaattagccttggtttcagaaatcacaacttggataggcagtatgggtggcagttaacaatattcaactccagtcctgcagaatttagtttggtctatagaaaaatccaagagatggtgcttttttcctgtgaggcttttggtttgaggagctaagacttagtcgtagtcctctcttccagaactttacttaacgtagaaccagtttgaaaccacaagtacctctgtggctacaagttttttagttttgttttaaaatttttcctctgctggctgggtgcaatagcgtgacgcttataatcccagcattttgggaagctgagtgggaagatcacttgagcccaagagtttgagactagcctgggcaacactagggagaccctgtctctacaaaatgaaacaat

SEQ ID NO: 24103 - DNA, 483 bp, Homo sapiens
ttcgagctcggtaccctcgtcttttgataggacagcagactttgtaaatgtaaacctaatttaacttagtttccctcttttatttaaaaagttttggctcaggtcaattccaaatttaagatactaggctaataaagaatgctattgctagcattctacctctgctataaaataacagttgtattaaaggaaaaaagtgtatttaaataaggaacttaagaatgtccatgctttctctgtaaatgtttacatttcaagttaacatttaatttttttcttgtataatccaaatgtcctatgctatctgctataaataacataaatttgaaagataaagggcaaggattatatcacgcctatcaaaagacgaattttcaagtttctaccatacaatttatgggtgatttcctttatttcctctttctggggacaaaaattgagttgtcttgtgtgagacactttatttaattccatgaccccaaa

SEQ ID NO: 24104 - DNA, 401 bp, Homo sapiens
  misc_feature (364)..(364): n is a, c, g, or t
  misc_feature (372)..(372): n is a, c, g, or t
ttcgagctcggtaccctcgtcttttgataggacagcagactttgtaaatgtaaacctaatttaacttagtttccctcttttatttaaaaagttttggctcaggtcaattccaaatttaagatactaggctaataaagaatgctattgctagcattctacctctgctataaaataacagttgtattaaaggaaaaaagtgtatttaaataaggaacttaagaatgtccatgctttctctgtaaatgtttacatttcaagttaacatttaatttttttcttgtataatccaaatgtcctatgctatctgctataaataacataaatttgaaagataaagggcaaggattatatcacgcctctctanacgccgantttatcctctagagtcagctatgacgatg

SEQ ID NO: 24105 - DNA, 390 bp, Homo sapiens
aactttgcagtggtagcagtattctagggccctttgaaacaataaatagcatatttttcatgcaataaaatggaagagtttcattagttaagattttggttttttgtttttcaagagcacaaatggttattctgtatatggaggaaaaagacttattctgtttgttgagattatggaatttttatgcttgtaacccttctcttcaatccttatattcagaagcgattattggaagccatggagacatgtaaccactccctcaaaaaggaagagaggaaaagaaaccaacatagtgagtgcctaatgtgctggtatgatagagacacagagtttatctatccttctccatggccagaaaagttccgttgagccgtcgggtcctctgccagc

SEQ ID NO: 24106 - DNA, 5880 bp, Homo sapiens
ttgacttcaaatattaaaatagagaaaagaaagattctacctgtcatatgaaggtgatgagatttcaggacttgaggttttttggtttttttgtaggctgggatcactatggaagcaactatgcattgggggcaggtgagatccttaagatttctctatttgtgcccaagcttttctctcacaagggacaatttcatgacccttttattttttttataaatataattgcaaatattcctaaaacttgtatcagcatatgatattagtagtagtattcctccttttcaggcccagtataatgataaattccattccgtgtggatagtcccacacagtccctaggaaaggatcctgaggttgaatgttgtaaggaagagtaattataggtgaagtaagtgtaggccttttgccaaaggggaaaaaaaaagcccaaaaaggctagcagaaggaggtctcaaatttcagagctttgatgataccattttactaaaagaaaaattttccttggtttttaacagctaatataatgccttcgtcgtctcatctctttggctcaatgccatggggaccatcggtgccagttcctgggaagcccttccatcatactttatattctgggaccatgcccatggctgggggaataccagggggtgtgcacaatcagtttatacctctgcaggttactaaaaaaagggttgcaaacaaaaagaactttgagaataaggaagcccagagttctcaagccactccagttcagactagccagccagattcttccaacattgtcaaagtaagtccacgggagagctcatcagcttctttgaagtcctctccgattgctcaacctgcatcttcttttcaagttgaaactgcctctcaaggccatagtatatctcaccataagtcaacaccaatctcttcttcaagaagaaaatcaagaaaactggctgttaattttggtgtttctaaaccttctgagtaaatttggctcttagaattaagttaatttcttctctttccatctacctttttataaatacatatctatgtctcataaaaattagaatgtactattttaaaataatatgtgtaaattgaaatttttttcatttttaagttatcaggcacttttcatgctgtttaaaagactgtgtatcaaattgtgcactttaagtatgtgcagtttgttgtatgtcaattatacctcaataaatctgtaataaaaaactaaattaaaccttgcattaaaataatatcacagtatcagtggactaaacattaaaatgtaccactctaatcattggcctcatgattgaagcatcctgaactatgaattagacatcagttagcaataataagcattttttacactatcattgaggaataattacatggagcatgaaatttgggcctccagtataacttactgaatgtggattttatttctctttttaatgatgtaagaaaattgtcaggagaatggctcttatttatgtgtgttttaacttatgctttgttgcctctgagggtctttagacctgctgtgaaaggatcacatttgttgtggtgctgccagttttgctttattctaaattttgtaccaaagcaactttagaataatcagaatatttcatctaactgcttagaactataaatagcattctaaatttgagtaaatacaattttttaggttactcaagaaccagcattagtaatttctagtaaaattgtttcaaaatctacagggtacaatgattacaaattaatcttctaacaaaataaaatatgaaatattagtcatgttaattaataaactgtattattttgtatagctttttatttgcttacctgacattttatgagagcttcatagttggtcggtatgtagtgcttcttgggactgaagaaattctaattgttgtttaagttccaaggtgtgctacaatataggaggcacagtcatcagtttgtgacatacattatttactgcctatttcattctgattctatatttttagctttatgctgaactgttcaatgatgctgggattctctctttgcatgtcatatgtgaatgtgtggttcaagctgtaactgttgaaattattttagaatttatgacgatttctcagcagggcctatgtttatatatatatatatatttattctttagtttttgtgatatgcttatatttttaaggaagtaagttatagcatacttttttaaaagtaggaaccacaatctttatatggagcagcttgttatatctgattttcatgtaactcattggaaactctgccatgactcttaaagtagtcttacttgttttttaaaatgctggtattaaactaaatggactcctttcactaactgctgatttcagagtttaaatgttagcaggatatttgtgtattagcagtgccttcagtataagagagaaatattcattatctgtcatttatcatagtcgtataagtttccatgattttattttctgttattttcataagttcagatgtttatcagttcccaacattgtttctttatctgtagtgggatcttgagtaatgaggctcaagtaaatcctcaatgtgtataattattgcctcataaactctctctttgtttttaaaggaaacatctattatggtaatacaaagaaaagttaaattgtgacagtaatgttatattaacctcttcctactttaaagtgtgaaatgtttcacctcagctgtacaaactccagcattgagaatttgcctcactcattactcctgtgtgacagttatataaatagcatgcagctcacatctgttttagagcatagaagaagcggcacctgccatcttctgaaaactccaaagggaaatttcagtagacatagtgcactaaacccataaggatacttgaccaatatttgagcacagcaagctgacagttctatacagataggcagtgaaagagttttattttccagccaggcgcagtggctcaaatcccagcacttcgggaggctaaggcaggcggatcacttgaggtccggagttccagacaagcctggccaacatgatgaagccctgtctctactaaaaatacaaaaattagccgggcgtgatggcacatgcctttagtcccagctactcgggaggctgaggcatgagaatcatttgaacccgcgaggcagagtctgcagtgagccgagattgcaccactgcactccagcctggagagcagagcaagactctgtctcaaaaaaaagaaaaaagttttattatccttactttttttttaacattattattctaaaggtcaaaactgagaagagattaagataggagagagctccataatggctggatagtggtcaggcattctctattcttttccccctgtagacccattctaaatgtgggcctgaggtcaatgggagatgtgccctccctatggaggatgtaagaagcagaggccatttctgccccatgttgaggaaacaatctgttgatagacctggaatttagagtatatctgaaaagcagttggacttcaagaaatttaaaattctctctttgagatggggtggactaagaccacccccaaagtttaaaaatatgctcattcaacttgaatcttctgaggactttttgtgaaaatggtggactgtttagggcataggacagattccccaaattgctttatgcttccacataactagagcacttcaatctatttaagcctttgtctcctaactgaaacattatttctaaatatttctattcaataagttttttcttttttgagcaacttaagtgaattttgaagattgctccttccagtctcgttccttttcacattttcctgcattacctaataattacctcagcgttagaatttgaatgtattaattgatttaaacatcatgtagactaaagtcttaaacatctaagactcagttgtagttgcagaaaaaaattaaagtcacctctactgaaccttggtttcaatttaagatttttcttgcttttcaaaggggtaactaataaagattgaagggtttttttcccgattggtggaggaatgaagaactattgatgcaagtttttttattgtttctttctatgatcaggtacctgctttcattttagactgctacttccaaactaagctagattcttggttttaatgagaggaggcagagagagggaggcagatggaagaagaaaaacagttaaataagacatacccagtcactgcatttttggactataccgtatctttctagcacaaggaaatagataaactgtaaggtcttttttactcactttttatttatgtgttctatttgtgttagtcataactgtttatagtggttgtctaatttttacttttattatatgagatagagctgtgcagatcttcactcaagttagttctgtcacgcttcttcccattatttagagcacagttttttaaagcaactgtacaatttctcagccttatgagcttgctgtatttcttggtatcatgttgcttccaaattttgtttttactgtagaagacaattaatttattgtagagaagtggctgtgaaagtcgttctctgtctttaaaaatcaattgcagaagttcatttgtcatttttctagagataaattatagtactcaaactggcagtgctcagtatatacattttgtaagctttgtcagtgaaaccatcagttttgcaggagcttcctttcctagtcaagataaagcttaaaattccagaaattaatgtcgttcggactgactttattcatatttccatcaaacttctccaatacagtaagagatagtgttgaaccagcatcaagtctccagaaacatggcagagcagacaggccgttaagtttcacagacatcatagatccttttcttaaagaagaaaaacatgtataaaatagttttagtagtccaaaatgtcaactatctgtagctgcttttgtgtgtgtgtcagtgaacaaataataatgccttgctcaatcaatgcattcagccatctcaagtgcaatttgtgaaggagactatggtttccaaaagatacatttttttacaaagttaaacctgtaaaaagtctttttttttttccctccagccgtacaccaactgcacttggttgtttcagcagttggtatactattaaattgtccaggccaaataggtttctgtagctgttttagtaatttgaagccaaattctcatgctgtttctcattaaaaagaatgagaatttggtccatagttagctttaagttctctcttcctttctttcccttacagttaagggtttggtgggggatggggaggttgttttcgttttttggatttttttgtcttttggctttaagtatcatattttcttttgcctgtatccaactgcttctttgagtattttcatctagtttaatgtgagtaatagatgctgtgctgtcattgaagtgttcaacattttgttcatttaaacaaaagtgtaattcatacatatatagatacatatcttaattgatttctcaactattttataagtaactggaatttttcattagatcttatacagagaagtattttattaaaaattcaaaagggaagacttttatgtgctcattttgtaatttttgattttaaatatctttacattgtctgccaattaaagtgttttaaacttgcattggaatggactccgaatgtatttttgtggtgttacgttatccgtagatttctagcatgaagttagcctcacgatgctgtgcaaaggattttaaaatatgagagtcactgaaagagtttaaacatctgttcatgttaaatgctctatggattttaattaaagacttgagaatgatt

SEQ ID NO: 24107 - DNA, 5947 bp, Homo sapiens
ttcaaacacttccatcatggaggctgaagggaacacggatgcttaaagaaattctaaaaattgatggctctaacactgtggaccataagaatgaaatcaaacagattgctaatgaaatccctgtttcctctaacagaagagatgaatatggattaccctctcagcctaaacaaaataagaaattagcatcttatatgaacaagcctcacagtgctaatgagtaccataatgttcagtctatggacaatatgtgttggcctgcccccagccagatccctcctgtatccacaccagtaactgaactttctcgaatttgttcccttgttggaatgccacaacctgatttctcctttcttaggatgccacagacaatgaccgtttgccaagtaaaattatctaatggcttactggtacatgggccacagtgccactctgaaaatgaagccaaagagaaagctgcactttttgctttacaacagttgggctccttaggcatgaatttccctttgccttcacaagtatttgcaaattatccttcagctgtaccacctggaaccattcctccagcctttcccccacctactgctaatataatgccttcgtcgtctcatctctttggctcaatgccatggggaccatcggtgccagttcctgggaagcccttccatcatactttatattctgggaccatgcccatggctgggggaataccagggggtgtgcacaatcagtttatacctctgcaggttactaaaaaaagggttgcaaacaaaaagaactttgagaataaggaagcccagagttctcaagccactccagttcagactagccagccagattcttccaacattgtcaaagtaagtccacgggagagctcatcagcttctttgaagtcctctccgattgctcaacctgcatcttcttttcaagttgaaactgcctctcaaggccatagtatatctcaccataagtcaacaccaatctcttcttcaagaagaaaatcaagaaaactggctgttaattttggtgtttctaaaccttctgagtaaatttggctcttagaattaagttaatttcttctctttccatctacctttttataaatacatatctatgtctcataaaaattagaatgtactattttaaaataatatgtgtaaattgaaatttttttcatttttaagttatcaggcacttttcatgctgtttaaaagactgtgtatcaaattgtgcactttaagtatgtgcagtttgttgtatgtcaattatacctcaataaatctgtaataaaaaactaaattaaaccttgcattaaaataatatcacagtatcagtggactaaacattaaaatgtaccactctaatcattggcctcatgattgaagcatcctgaactatgaattagacatcagttagcaataataagcattttttacactatcattgaggaataattacatggagcatgaaatttgggcctccagtataacttactgaatgtggattttatttctctttttaatgatgtaagaaaattgtcaggagaatggctcttatttatgtgtgttttaacttatgctttgttgcctctgagggtctttagacctgctgtgaaaggatcacatttgttgtggtgctgccagttttgctttattctaaattttgtaccaaagcaactttagaataatcagaatatttcatctaactgcttagaactataaatagcattctaaatttgagtaaatacaattttttaggttactcaagaaccagcattagtaatttctagtaaaattgtttcaaaatctacagggtacaatgattacaaattaatcttctaacaaaataaaatatgaaatattagtcatgttaattaataaactgtattattttgtatagctttttatttgcttacctgacattttatgagagcttcatagttggtcggtatgtagtgcttcttgggactgaagaaattctaattgttgtttaagttccaaggtgtgctacaatataggaggcacagtcatcagtttgtgacatacattatttactgcctatttcattctgattctatatttttagctttatgctgaactgttcaatgatgctgggattctctctttgcatgtcatatgtgaatgtgtggttcaagctgtaactgttgaaattattttagaatttatgacgatttctcagcagggcctatgtttatatatatatatatatttattctttagtttttgtgatatgcttatatttttaaggaagtaagttatagcatacttttttaaaagtaggaaccacaatctttatatggagcagcttgttatatctgattttcatgtaactcattggaaactctgccatgactcttaaagtagtcttacttgttttttaaaatgctggtattaaactaaatggactcctttcactaactgctgatttcagagtttaaatgttagcaggatatttgtgtattagcagtgccttcagtataagagagaaatattcattatctgtcatttatcatagtcgtataagtttccatgattttattttctgttattttcataagttcagatgtttatcagttcccaacattgtttctttatctgtagtgggatcttgagtaatgaggctcaagtaaatcctcaatgtgtataattattgcctcataaactctctctttgtttttaaaggaaacatctattatggtaatacaaagaaaagttaaattgtgacagtaatgttatattaacctcttcctactttaaagtgtgaaatgtttcacctcagctgtacaaactccagcattgagaatttgcctcactcattactcctgtgtgacagttatataaatagcatgcagctcacatctgttttagagcatagaagaagcggcacctgccatcttctgaaaactccaaagggaaatttcagtagacatagtgcactaaacccataaggatacttgaccaatatttgagcacagcaagctgacagttctatacagataggcagtgaaagagttttattttccagccaggcgcagtggctcaaatcccagcacttcgggaggctaaggcaggcggatcacttgaggtccggagttccagacaagcctggccaacatgatgaagccctgtctctactaaaaatacaaaaattagccgggcgtgatggcacatgcctttagtcccagctactcgggaggctgaggcatgagaatcatttgaacccgcgaggcagagtctgcagtgagccgagattgcaccactgcactccagcctggagagcagagcaagactctgtctcaaaaaaaagaaaaaagttttattatccttactttttttttaacattattattctaaaggtcaaaactgagaagagattaagataggagagagctccataatggctggatagtggtcaggcattctctattcttttccccctgtagacccattctaaatgtgggcctgaggtcaatgggagatgtgccctccctatggaggatgtaagaagcagaggccatttctgccccatgttgaggaaacaatctgttgatagacctggaatttagagtatatctgaaaagcagttggacttcaagaaatttaaaattctctctttgagatggggtggactaagaccacccccaaagtttaaaaatatgctcattcaacttgaatcttctgaggactttttgtgaaaatggtggactgtttagggcataggacagattccccaaattgctttatgcttccacataactagagcacttcaatctatttaagcctttgtctcctaactgaaacattatttctaaatatttctattcaataagttttttcttttttgagcaacttaagtgaattttgaagattgctccttccagtctcgttccttttcacattttcctgcattacctaataattacctcagcgttagaatttgaatgtattaattgatttaaacatcatgtagactaaagtcttaaacatctaagactcagttgtagttgcagaaaaaaattaaagtcacctctactgaaccttggtttcaatttaagatttttcttgcttttcaaaggggtaactaataaagattgaagggtttttttcccgattggtggaggaatgaagaactattgatgcaagtttttttattgtttctttctatgatcaggtacctgctttcattttagactgctacttccaaactaagctagattcttggttttaatgagaggaggcagagagagggaggcagatggaagaagaaaaacagttaaataagacatacccagtcactgcatttttggactataccgtatctttctagcacaaggaaatagataaactgtaaggtcttttttactcactttttatttatgtgttctatttgtgttagtcataactgtttatagtggttgtctaatttttacttttattatatgagatagagctgtgcagatcttcactcaagttagttctgtcacgcttcttcccattatttagagcacagttttttaaagcaactgtacaatttctcagccttatgagcttgctgtatttcttggtatcatgttgcttccaaattttgtttttactgtagaagacaattaatttattgtagagaagtggctgtgaaagtcgttctctgtctttaaaaatcaattgcagaagttcatttgtcatttttctagagataaattatagtactcaaactggcagtgctcagtatatacattttgtaagctttgtcagtgaaaccatcagttttgcaggagcttcctttcctagtcaagataaagcttaaaattccagaaattaatgtcgttcggactgactttattcatatttccatcaaacttctccaatacagtaagagatagtgttgaaccagcatcaagtctccagaaacatggcagagcagacaggccgttaagtttcacagacatcatagatccttttcttaaagaagaaaaacatgtataaaatagttttagtagtccaaaatgtcaactatctgtagctgcttttgtgtgtgtgtcagtgaacaaataataatgccttgctcaatcaatgcattcagccatctcaagtgcaatttgtgaaggagactatggtttccaaaagatacatttttttacaaagttaaacctgtaaaaagtctttttttttttccctccagccgtacaccaactgcacttggttgtttcagcagttggtatactattaaattgtccaggccaaataggtttctgtagctgttttagtaatttgaagccaaattctcatgctgtttctcattaaaaagaatgagaatttggtccatagttagctttaagttctctcttcctttctttcccttacagttaagggtttggtgggggatggggaggttgttttcgttttttggatttttttgtcttttggctttaagtatcatattttcttttgcctgtatccaactgcttctttgagtattttcatctagtttaatgtgagtaatagatgctgtgctgtcattgaagtgttcaacattttgttcatttaaacaaaagtgtaattcatacatatatagatacatatcttaattgatttctcaactattttataagtaactggaatttttcattagatcttatacagagaagtattttattaaaaattcaaaagggaagacttttatgtgctcattttgtaatttttgattttaaatatctttacattgtctgccaattaaagtgttttaaacttgcattggaatggactccgaatgtatttttgtggtgttacgttatccgtagatttctagcatgaagttagcctcacgatgctgtgcaaaggattttaaaatatgagagtcactgaaagagtttaaacatctgttcatgttaaatgctctatggattttaattaaagacttgagaatgatt

SEQ ID NO: 24108 - DNA, 2021 bp, Homo sapiens
tcgttctagaggatccccgaacatgtcgagcttatcagatggagaaactaagttttacttggaagaacctccaggaacacagaagctttattcaggaagaactgccccaccatctaaagtggttcatcttggagataaagaacaatctaactgggcaaaagaagtacaaggaatttcagaacactacctgagaagaaaaggaataataataaatgaaacatctgcagttgtgtatgctcagttactcacaggtcgtaaatatcaaataaatcaaaatggtgaagttcgtctagagaaacagtggtcaaaacaagttgttccttttgtttatcaaactattgtcaaggacatccgagctttcgactcccgtttctccaatatcaaaacattggatgatttgtttcctctgagaagtatggtctttatgctgggaactccctattatggctgcactggagaagttcaggattcaggtgatgtgattacagaaggtaggattcgtgtgattttcagcattccatgtgaacccaatcttgatgctttaatacagaaccagcataaatattctataaagtacaacccaggatatgtgttggccagtcgccttggagtgagtggataccttgtttcaaggtttacaggaagtatttttattggaagaggatctaggagaaaccctcatggagaccataaagcaaatgtgggtttaaatctcaaattcaacaagaaaaatgaggaggtacctggatatactaagaaagttggaagtgaatggatgtattcatctgcagcagaacaacttctggcagagtacttagagagagctccagaactatttagttatatagccaaaaatagccaagaggatgtgttctatgaagatgacatttggcctggagaaaatgagaatggtgctgaaaaagttcaagaaattattacttggctaaaaggacatcctgtcagtactttatctcgttcttcttgtgatttacaaattctggatgcagctattgttgagaaaattgaggaagaagtcgaaaagtgcaagcaaagaaagaataataagaaggtgcgagtaacagtgaaaccccatttgctatacagacctttagaacagcaacatggagtcattcctgatcgggatgcagaattttgtctttttgaccgtgttgtaaatgtgagagaaaacttctcagttccagttggccttcgaggcaccatcataggaataaaaggagctaatagagaagccgatgtactatttgaagtattatttgatgaagaatttcctggagggttaacaataagatgctcacctggtagaggttatcgactgccaacaagtgccttggtgaacctttctcatgggagtcgctctgaaactggaaatcagaagttgacagccatcgtaaaaccacaaccagctgtacatcaacatagctcaagttcatcagtttcctctgggcatttgggagccctcaaccattcccctcaatcactttttgttcctactcaagtaagactctcagtctttaacttctcctctaccccttttacaaatcacaaatcacagcagactttgtaaatgtaaacctaatttaacttagtttccctcttttatttaaaaagttttggctcaggtcaattccaaatttaagatactaggctaataaagaatgctattgctagcattctacctctgctataaaataacagttgtattaaaggaaaaaagtgtatttaaataaggaacttaagaatgtccatgctttctctgtaaatgtttacatttcaagttaacatttaatttttttcttgtataatccaaatgtcctatgctatctgctataaataacataaatttgaaagataaagggcaaggattatatcacgcctatcaaaagacgaattttcaagtttctaccatacaatttatgggtgatttcctttatttcctctttctggggacaaaaattgagttgtcttgtgtgagacactttatttaattccatgaccccaaa

SEQ ID NO: 24109 - DNA, 1618 bp, Homo sapiens
tcgttctagaggatccccgaacatgtcgagcttatcagatggagaaactaagttttacttggaagaacctccaggaacacagaagctttattcaggaagaactgccccaccatctaaagtggttcatcttggagataaagaacaatctaactgggcaaaagaagtacaaggaatttcagaacactacctgagaagaaaaggaataataataaatgaaacatctgcagttgtgtatgctcagttactcacaggtcgtaaatatcaaataaatcaaaatggtgaagttcgtctagagaaacagtggtcaaaacaagttgttccttttgtttatcaaactattgtcaaggacatccgagctttcgactcccgtttctccaatatcaaaacattggatgatttgtttcctctgagaagtatggtctttatgctgggaactccctattatggctgcactggagaagttcaggattcaggtgatgtgattacagaaggtaggattcgtgtgattttcagcattccatgtgaacccaatcttgatgctttaatacagaaccagcataaatattctataaagtacaacccaggatatgtgttggccagtcgccttggagtgagtggataccttgtttcaaggtttacaggaagtatttttattggaagaggatctaggagaaaccctcatggagaccataaagcaaatgtgggtttaaatctcaaattcaacaagaaaaatgaggaggtacctggatatactaagaaagttggaagtgaatggatgtattcatctgcagcagaacaacttctggcagagtacttagagagagctccagaactatttagttatatagccaaaaatagccaagaggatgtgttctatgaagatgacatttggcctggagaaaatgagaatggtgctgaaaaagttcaagaaattattacttggctaaaaggacatcctgtcagtactttatctcgttcttcttgtgatttacaaattctggatgcagctattgttgagaaaattgaggaagaagtcgaaaagtgcaagcaaagaaagaataataagaaggtgcgagtaacagtgaaaccccatttgctatacagacctttagaacagcaacatggagtcattcctgatcgggatgcagaattttgtctttttgaccgtgttgtaaatgtgagagaaaacttctcagttccagttggccttcgaggcaccatcataggaataaaaggagctaatagagaagccgatgtactatttgaagtattatttgatgaagaatttcctggagggttaacaataagatgctcacctggtagaggttatcgactgccaacaagtgccttggtgaacctttctcatgggagtcgctctgaaactggaaatcagaagttgacagccatcgtaaaaccacaaccagctgtacatcaacatagctcaagtacctactaaagatgatgatgaattctgcaacatttggcagtccttacagggatctggaaagatgcaatactttcagccaactatacaagagaaggttagtattccttgttttgatggacaattaatttaaagaaaatatatttttatatttttcttttaagactacaatga

SEQ ID NO: 24110 - DNA, 1293 bp, Homo sapiens
catttcggcttcatgttgaaggcagtgcagtggattttgcactattactatcatggagttcagtcctggagctggtattatccttatcattatgcacctttcctgtctgatatacacaacatcagtacactcaaaatccattttgaactaggaaaaccttttaagccatttgaacagcttcttgctgtacttccagcagccagcaaaaatttacttcctgcatgctaccagcatttgatgaccaatgaagactcaccaattatagaatattacccacctgattttaaaactgacctaaatgggaaacaacaggaatgggaagctgtggtgttaatcccttttattgatgagagcgattattggaagccatggagacatgtaaccactccctcaaaaaggaagagaggaaaagaaaccaacatagtgagtgcctaatgtgctggtatgatagagacacagagtttatctatccttctccatggccagaaaagttccctgccatagaacgatgttgtacaaggtataaaataatatccttagatgcttggcgtgtagacataaacaaaaacaaaataaccagaattgaccagaaagcattatatttctgtggatttcctactctgaaacacatcagacacaaattttttttgaagaaaagtggtgttcaagtattccagcaaagcagtcgtggagaaaacatgatgttggaaatcttagtggatgcagaatcagatgaacttaccgtagaaaatgtagcttcatcagtgcttggaaaatctgtctttgttaattggcctcaccttgaggaagctagagtcgtggctgtatcagatggagaaactaagttttacttggaagaacctccaggaacacagaagctttattcaggaagaactgccccaccatctaaagtggttcatcttggagataaagaacaatctaactgggcaaaagaagtacaaggaatttcagaacactacctgagaagaaaaggaataataataaatgaaacatctgcagttgtgtatgctcagttactcacaggtcgtaaatatcaaataaatcaaaatggtgaagttcgtctagagaaacagtggtcaaaacaagttgttccttttgtttatcaaactattgtcaaggacatccgagctttcgactcccgtttctccaatatcaaaacattggatgatttgtttcctctgagaagtatggtctttatgctgggaactccctattatggctgcactggagaagttcaggattcaggtgatgtctctcgaggggatcctctga

SEQ ID NO: 24111 - DNA, 251 bp, Homo sapiens
gtaagcttccttaaaatcaaatttctagttaccaattttttaatgcaattggtggctctgtagcattggactgaatttctcaaccttttcaaccaaatttataaggtgtgtggccagagggtcactgaagttaagctgacagtcacttggatgggaggttgtacacctaaagtcctggatttggaactagaggcacctgaaatcctgattctctcatttaatagttgggtggccttgagcaattcacttta

SEQ ID NO: 24112 - DNA, 637 bp, Homo sapiens
ccagtttccagtttctaaaattttaacaggttatatatgccaccagataccgtgcttcatttttcatctgtctctctaggtctgtgctcttttttatactatattgtcattttaatggattggagagggatggaagataagcatatacgttcagtttgctatatgtatcgaaaagtcctgcactcttcagaaagaaatggagttttgaaaattatcagaagatgcttttaatctattttaatttgttgtattgtggagtgctctagttttgttgtgaaaattagaaaactaacctatagataccatttttgtctatcagctgtcattttaatgaaagagagtagagtcagtaattgaagtttattataagtttatgacttgaaccttagccagtgggagttttttgagggtctaggagtactctgacttaccagtcttacactttctatcacttttaataatatcccttattaatattatagtagtcctcaataagctttatatgtttctttaggatctgaaattattatgtaggaagtttatccgaaattaaccatatatattttaagacaatatttttgtttgtttgaccagagctccagaactatttagttatatagccaaaaatagccaagag

SEQ ID NO: 24113 - DNA, 280 bp, Homo sapiens
tctgaaacacatcagacacaaagtcagtggctatttagttcagaattttttcactttattaagtgtgaagtgattatggagaaagaattaaaattaaattatttgaattcttttaaagttttttttgaagaaaagtggtgttcaagtattccagcaaagcagtcgtggagaaaacatgatgttggaaatcttagtggatgcagaatcagatgaacttgtaagtattttatttatcattcatttattagatgcctataatgtattaaactgtagctgctgg

SEQ ID NO: 24114 - DNA, 8470 bp, Homo sapiens
catttcggcttcatgttgaaggcagtgcagtggattttgcactattactatcatggagttcagtcctggagctggtattatccttatcattatgcacctttcctgtctgatatacacaacatcagtacactcaaaatccattttgaactaggaaaaccttttaagccatttgaacagcttcttgctgtacttccagcagccagcaaaaatttacttcctgcatgctaccagcatttgatgaccaatgaagactcaccaattatagaatattacccacctgattttaaaactgacctaaatgggaaacaacaggaatgggaagctgtggtgttaatcccttttattgatgagagcgattattggaagccatggagacatgtaaccactccctcaaaaaggaagagaggaaaagaaaccaacatagtgagtgcctaatgtgctggtatgatagagacacagagtttatctatccttctccatggccagaaaagttccctgccatagaacgatgttgtacaaggtataaaataatatccttagatgcttggcgtgtagacataaacaaaaacaaaataaccagaattgaccagaaagcattatatttctgtggatttcctactctgaaacacatcagacacaaattttttttgaagaaaagtggtgttcaagtattccagcaaagcagtcgtggagaaaacatgatgttggaaatcttagtggatgcagaatcagatgaacttaccgtagaaaatgtagcttcatcagtgcttggaaaatctgtctttgttaattggcctcaccttgaggaagctagagtcgtggctgtatcagatggagaaactaagttttacttggaagaacctccaggaacacagaagctttattcaggaagaactgccccaccatctaaagtggttcatcttggagataaagaacaatctaactgggcaaaagaagtacaaggaatttcagaacactacctgagaagaaaaggaataataataaatgaaacatctgcagttgtgtatgctcagttactcacaggtcgtaaatatcaaataaatcaaaatggtgaagttcgtctagagaaacagtggtcaaaacaagttgttccttttgtttatcaaactattgtcaaggacatccgagctttcgactcccgtttctccaatatcaaaacattggatgatttgtttcctctgagaagtatggtctttatgctgggaactccctattatggctgcactggagaagttcaggattcaggtgatgtgattacagaaggtaggattcgtgtgattttcagcattccatgtgaacccaatcttgatgctttaatacagaaccagcataaatattctataaagtacaacccaggatatgtgttggccagtcgccttggagtgagtggataccttgtttcaaggtttacaggaagtatttttattggaagaggatctaggagaaaccctcatggagaccataaagcaaatgtgggtttaaatctcaaattcaacaagaaaaatgaggaggtacctggatatactaagaaagttggaagtgaatggatgtattcatctgcagcagaacaacttctggcagagtacttagagagagctccagaactatttagttatatagccaaaaatagccaagaggatgtgttctatgaagatgacatttggcctggagaaaatgagaatggtgctgaaaaagttcaagaaattattacttggctaaaaggacatcctgtcagtactttatctcgttcttcttgtgatttacaaattctggatgcagctattgttgagaaaattgaggaagaagtcgaaaagtgcaagcaaagaaagaataataagaaggtgcgagtaacagtgaaaccccatttgctatacagacctttagaacagcaacatggagtcattcctgatcgggatgcagaattttgtctttttgaccgtgttgtaaatgtgagagaaaacttctcagttccagttggccttcgaggcaccatcataggaataaaaggagctaatagagaagccgatgtactatttgaagtattatttgatgaagaatttcctggagggttaacaataagatgctcacctggtagaggttatcgactgccaacaagtgccttggtgaacctttctcatgggagtcgctctgaaactggaaatcagaagttgacagccatcgtaaaaccacaaccagctgtacatcaacatagctcaagttcatcagtttcctctgggcatttgggagccctcaaccattcccctcaatcactttttgttcctactcaagtacctactaaagatgatgatgaattctgcaacatttggcagtccttacagggatctggaaagatgcaatactttcagccaactatacaagagaagggtgcagttctacctcaagaaataagccaagtaaatcaacatcataaatctggctttaatgacaacagtgttaaatatcagcaaagaaaacatgaccctcacagaaaatttaaagaagagtgtaagagtcctaaagctgagtgttggtcccaaaaaatgtccaataagcagcctaactctggaattgagaactttttagcatctttgaatatctccaaagaaaatgaagtacagtcatctcatcatggggagcctccaagtgaagagcatttgtcaccacagtcatttgccatgaagggaacacggatgcttaaagaaattctaaaaattgatggctctaacactgtggaccataagaatgaaatcaaacagattgctaatgaaatccctgtttcctctaacagaagagatgaatatggattaccctctcagcctaaacaaaataagaaattagcatcttatatgaacaagcctcacagtgctaatgagtaccataatgttcagtctatggacaatatgtgttggcctgcccccagccagatccctcctgtatccacaccagtaactgaactttctcgaatttgttcccttgttggaatgccacaacctgatttctcctttcttaggatgccacagacaatgaccgtttgccaagtaaaattatctaatggcttactggtacatgggccacagtgccactctgaaaatgaagccaaagagaaagctgcactttttgctttacaacagttgggctccttaggcatgaatttccctttgccttcacaagtatttgcaaattatccttcagctgtaccacctggaaccattcctccagcctttcccccacctactgctaatataatgccttcgtcgtctcatctctttggctcaatgccatggggaccatcggtgccagttcctgggaagcccttccatcatactttatattctgggaccatgcccatggctgggggaataccagggggtgtgcacaatcagtttatacctctgcaggttactaaaaaaagggttgcaaacaaaaagaactttgagaataaggaagcccagagttctcaagccactccagttcagactagccagccagattcttccaacattgtcaaagtaagtccacgggagagctcatcagcttctttgaagtcctctccgattgctcaacctgcatcttcttttcaagttgaaactgcctctcaaggccatagtatatctcaccataagtcaacaccaatctcttcttcaagaagaaaatcaagaaaactggctgttaattttggtgtttctaaaccttctgagtaaatttggctcttagaattaagttaatttcttctctttccatctacctttttataaatacatatctatgtctcataaaaattagaatgtactattttaaaataatatgtgtaaattgaaatttttttcatttttaagttatcaggcacttttcatgctgtttaaaagactgtgtatcaaattgtgcactttaagtatgtgcagtttgttgtatgtcaattatacctcaataaatctgtaataaaaaactaaattaaaccttgcattaaaataatatcacagtatcagtggactaaacattaaaatgtaccactctaatcattggcctcatgattgaagcatcctgaactatgaattagacatcagttagcaataataagcattttttacactatcattgaggaataattacatggagcatgaaatttgggcctccagtataacttactgaatgtggattttatttctctttttaatgatgtaagaaaattgtcaggagaatggctcttatttatgtgtgttttaacttatgctttgttgcctctgagggtctttagacctgctgtgaaaggatcacatttgttgtggtgctgccagttttgctttattctaaattttgtaccaaagcaactttagaataatcagaatatttcatctaactgcttagaactataaatagcattctaaatttgagtaaatacaattttttaggttactcaagaaccagcattagtaatttctagtaaaattgtttcaaaatctacagggtacaatgattacaaattaatcttctaacaaaataaaatatgaaatattagtcatgttaattaataaactgtattattttgtatagctttttatttgcttacctgacattttatgagagcttcatagttggtcggtatgtagtgcttcttgggactgaagaaattctaattgttgtttaagttccaaggtgtgctacaatataggaggcacagtcatcagtttgtgacatacattatttactgcctatttcattctgattctatatttttagctttatgctgaactgttcaatgatgctgggattctctctttgcatgtcatatgtgaatgtgtggttcaagctgtaactgttgaaattattttagaatttatgacgatttctcagcagggcctatgtttatatatatatatatatttattctttagtttttgtgatatgcttatatttttaaggaagtaagttatagcatacttttttaaaagtaggaaccacaatctttatatggagcagcttgttatatctgattttcatgtaactcattggaaactctgccatgactcttaaagtagtcttacttgttttttaaaatgctggtattaaactaaatggactcctttcactaactgctgatttcagagtttaaatgttagcaggatatttgtgtattagcagtgccttcagtataagagagaaatattcattatctgtcatttatcatagtcgtataagtttccatgattttattttctgttattttcataagttcagatgtttatcagttcccaacattgtttctttatctgtagtgggatcttgagtaatgaggctcaagtaaatcctcaatgtgtataattattgcctcataaactctctctttgtttttaaaggaaacatctattatggtaatacaaagaaaagttaaattgtgacagtaatgttatattaacctcttcctactttaaagtgtgaaatgtttcacctcagctgtacaaactccagcattgagaatttgcctcactcattactcctgtgtgacagttatataaatagcatgcagctcacatctgttttagagcatagaagaagcggcacctgccatcttctgaaaactccaaagggaaatttcagtagacatagtgcactaaacccataaggatacttgaccaatatttgagcacagcaagctgacagttctatacagataggcagtgaaagagttttattttccagccaggcgcagtggctcaaatcccagcacttcgggaggctaaggcaggcggatcacttgaggtccggagttccagacaagcctggccaacatgatgaagccctgtctctactaaaaatacaaaaaaaaaaaagaaaaaagttttattatccttactttttttttaacattattattctaaaggtcaaaactgagaagagattaagataggagagagctccataatggctggatagtggtcaggcattctctattcttttccccctgtagacccattctaaatgtgggcctgaggtcaatgggagatgtgccctccctatggaggatgtaagaagcagaggccatttctgccccatgttgaggaaacaatctgttgatagacctggaatttagagtatatctgaaaagcagttggacttcaagaaatttaaaattctctctttgagatggggtggactaagaccacccccaaagtttaaaaatatgctcattcaacttgaatcttctgaggactttttgtgaaaatggtggactgtttagggcataggacagattccccaaattgctttatgcttccacataactagagcacttcaatctatttaagcctttgtctcctaactgaaacattatttctaaatatttctattcaataagttttttcttttttgagcaacttaagtgaattttgaagattgctccttccagtctcgttccttttcacattttcctgcattacctaataattacctcagcgttagaatttgaatgtattaattgatttaaacatcatgtagactaaagtcttaaacatctaagactcagttgtagttgcagaaaaaaattaaagtcacctctactgaaccttggtttcaatttaagatttttcttgcttttcaaaggggtaactaataaagattgaagggtttttttcccgattggtggaggaatgaagaactattgatgcaagtttttttattgtttctttctatgatcaggtacctgctttcattttagactgctacttccaaactaagctagattcttggttttaatgagaggaggcagagagagggaggcagatggaagaagaaaaacagttaaataagacatacccagtcactgcatttttggactataccgtatctttctagcacaaggaaatagataaactgtaaggtcttttttactcactttttatttatgtgttctatttgtgttagtcataactgtttatagtggttgtctaatttttacttttattatatgagatagagctgtgcagatcttcactcaagttagttctgtcacgcttcttcccattatttagagcacagttttttaaagcaactgtacaatttctcagccttatgagcttgctgtatttcttggtatcatgttgcttccaaattttgtttttactgtagaagacaattaatttattgtagagaagtggctgtgaaagtcgttctctgtctttaaaaatcaattgcagaagttcatttgtcatttttctagagataaattatagtactcaaactggcagtgctcagtatatacattttgtaagctttgtcagtgaaaccatcagttttgcaggagcttcctttcctagtcaagataaagcttaaaattccagaaattaatgtcgttcggactgactttattcatatttccatcaaacttctccaatacagtaagagatagtgttgaaccagcatcaagtctccagaaacatggcagagcagacaggccgttaagtttcacagacatcatagatccttttcttaaagaagaaaaacatgtataaaatagttttagtagtccaaaatgtcaactatctgtagctgcttttgtgtgtgtgtcagtgaacaaataataatgccttgctcaatcaatgcattcagccatctcaagtgcaatttgtgaaggagactatggtttccaaaagatacatttttttacaaagttaaacctgtaaaaagtctttttttttttccctccagccgtacaccaactgcacttggttgtttcagcagttggtatactattaaattgtccaggccaaataggtttctgtagctgttttagtaatttgaagccaaattctcatgctgtttctcattaaaaagaatgagaatttggtccatagttagctttaagttctctcttcctttctttcccttacagttaagggtttggtgggggatggggaggttgttttcgttttttggatttttttgtcttttggctttaagtatcatattttcttttgcctgtatccaactgcttctttgagtattttcatctagtttaatgtgagtaatagatgctgtgctgtcattgaagtgttcaacattttgttcatttaaacaaaagtgtaattcatacatatatagatacatatcttaattgatttctcaactattttataagtaactggaatttttcattagatcttatacagagaagtattttattaaaaattcaaaagggaagacttttatgtgctcattttgtaatttttgattttaaatatctttacattgtctgccaattaaagtgttttaaacttgcattggaatggactccgaatgtatttttgtggtgttacgttatccgtagatttctagcatgaagttagcctcacgatgctgtgcaaaggattttaaaatatgagagtcactgaaagagtttaaacatctgttcatgttaaatgctctatggattttaattaaagacttgagaatgatt

SEQ ID NO: 24115 - DNA, 7535 bp, Homo sapiens
tcgttctagaggatccccgaacatgtcgagcttatcagatggagaaactaagttttacttggaagaacctccaggaacacagaagctttattcaggaagaactgccccaccatctaaagtggttcatcttggagataaagaacaatctaactgggcaaaagaagtacaaggaatttcagaacactacctgagaagaaaaggaataataataaatgaaacatctgcagttgtgtatgctcagttactcacaggtcgtaaatatcaaataaatcaaaatggtgaagttcgtctagagaaacagtggtcaaaacaagttgttccttttgtttatcaaactattgtcaaggacatccgagctttcgactcccgtttctccaatatcaaaacattggatgatttgtttcctctgagaagtatggtctttatgctgggaactccctattatggctgcactggagaagttcaggattcaggtgatgtgattacagaaggtaggattcgtgtgattttcagcattccatgtgaacccaatcttgatgctttaatacagaaccagcataaatattctataaagtacaacccaggatatgtgttggccagtcgccttggagtgagtggataccttgtttcaaggtttacaggaagtatttttattggaagaggatctaggagaaaccctcatggagaccataaagcaaatgtgggtttaaatctcaaattcaacaagaaaaatgaggaggtacctggatatactaagaaagttggaagtgaatggatgtattcatctgcagcagaacaacttctggcagagtacttagagagagctccagaactatttagttatatagccaaaaatagccaagaggatgtgttctatgaagatgacatttggcctggagaaaatgagaatggtgctgaaaaagttcaagaaattattacttggctaaaaggacatcctgtcagtactttatctcgttcttcttgtgatttacaaattctggatgcagctattgttgagaaaattgaggaagaagtcgaaaagtgcaagcaaagaaagaataataagaaggtgcgagtaacagtgaaaccccatttgctatacagacctttagaacagcaacatggagtcattcctgatcgggatgcagaattttgtctttttgaccgtgttgtaaatgtgagagaaaacttctcagttccagttggccttcgaggcaccatcataggaataaaaggagctaatagagaagccgatgtactatttgaagtattatttgatgaagaatttcctggagggttaacaataagatgctcacctggtagaggttatcgactgccaacaagtgccttggtgaacctttctcatgggagtcgctctgaaactggaaatcagaagttgacagccatcgtaaaaccacaaccagctgtacatcaacatagctcaagttcatcagtttcctctgggcatttgggagccctcaaccattcccctcaatcactttttgttcctactcaagtacctactaaagatgatgatgaattctgcaacatttggcagtccttacagggatctggaaagatgcaatactttcagccaactatacaagagaagggtgcagttctacctcaagaaataagccaagtaaatcaacatcataaatctggctttaatgacaacagtgttaaatatcagcaaagaaaacatgaccctcacagaaaatttaaagaagagtgtaagagtcctaaagctgagtgttggtcccaaaaaatgtccaataagcagcctaactctggaattgagaactttttagcatctttgaatatctccaaagaaaatgaagtacagtcatctcatcatggggagcctccaagtgaagagcatttgtcaccacagtcatttgccatgaagagatgaatatggattaccctctcagcctaaacaaaataagaaattagacaatgaccgtttgccaagtaaaattatctaatggcttactggtacatgggccacagtgccactctgaaaatgaagccaaagagaaagctgcactttttgctttacaacagttgggctccttaggcatgaatttccctttgccttcacaagtatttgcaaattatccttcagctgtaccacctggaaccattcctccagcctttcccccacctactgctaatataatgccttcgtcgtctcatctctttggctcaatgccatggggaccatcggtgccagttcctgggaagcccttccatcatactttatattctgggaccatgcccatggctgggggaataccagggggtgtgcacaatcagtttatacctctgcaggttactaaaaaaagggttgcaaacaaaaagaactttgagaataaggaagcccagagttctcaagccactccagttcagactagccagccagattcttccaacattgtcaaagtaagtccacgggagagctcatcagcttctttgaagtcctctccgattgctcaacctgcatcttcttttcaagttgaaactgcctctcaaggccatagtatatctcaccataagtcaacaccaatctcttcttcaagaagaaaatcaagaaaactggctgttaattttggtgtttctaaaccttctgagtaaatttggctcttagaattaagttaatttcttctctttccatctacctttttataaatacatatctatgtctcataaaaattagaatgtactattttaaaataatatgtgtaaattgaaatttttttcatttttaagttatcaggcacttttcatgctgtttaaaagactgtgtatcaaattgtgcactttaagtatgtgcagtttgttgtatgtcaattatacctcaataaatctgtaataaaaaactaaattaaaccttgcattaaaataatatcacagtatcagtggactaaacattaaaatgtaccactctaatcattggcctcatgattgaagcatcctgaactatgaattagacatcagttagcaataataagcattttttacactatcattgaggaataattacatggagcatgaaatttgggcctccagtataacttactgaatgtggattttatttctctttttaatgatgtaagaaaattgtcaggagaatggctcttatttatgtgtgttttaacttatgctttgttgcctctgagggtctttagacctgctgtgaaaggatcacatttgttgtggtgctgccagttttgctttattctaaattttgtaccaaagcaactttagaataatcagaatatttcatctaactgcttagaactataaatagcattctaaatttgagtaaatacaattttttaggttactcaagaaccagcattagtaatttctagtaaaattgtttcaaaatctacagggtacaatgattacaaattaatcttctaacaaaataaaatatgaaatattagtcatgttaattaataaactgtattattttgtatagctttttatttgcttacctgacattttatgagagcttcatagttggtcggtatgtagtgcttcttgggactgaagaaattctaattgttgtttaagttccaaggtgtgctacaatataggaggcacagtcatcagtttgtgacatacattatttactgcctatttcattctgattctatatttttagctttatgctgaactgttcaatgatgctgggattctctctttgcatgtcatatgtgaatgtgtggttcaagctgtaactgttgaaattattttagaatttatgacgatttctcagcagggcctatgtttatatatatatatatatttattctttagtttttgtgatatgcttatatttttaaggaagtaagttatagcatacttttttaaaagtaggaaccacaatctttatatggagcagcttgttatatctgattttcatgtaactcattggaaactctgccatgactcttaaagtagtcttacttgttttttaaaatgctggtattaaactaaatggactcctttcactaactgctgatttcagagtttaaatgttagcaggatatttgtgtattagcagtgccttcagtataagagagaaatattcattatctgtcatttatcatagtcgtataagtttccatgattttattttctgttattttcataagttcagatgtttatcagttcccaacattgtttctttatctgtagtgggatcttgagtaatgaggctcaagtaaatcctcaatgtgtataattattgcctcataaactctctctttgtttttaaaggaaacatctattatggtaatacaaagaaaagttaaattgtgacagtaatgttatattaacctcttcctactttaaagtgtgaaatgtttcacctcagctgtacaaactccagcattgagaatttgcctcactcattactcctgtgtgacagttatataaatagcatgcagctcacatctgttttagagcatagaagaagcggcacctgccatcttctgaaaactccaaagggaaatttcagtagacatagtgcactaaacccataaggatacttgaccaatatttgagcacagcaagctgacagttctatacagataggcagtgaaagagttttattttccagccaggcgcagtggctcaaatcccagcacttcgggaggctaaggcaggcggatcacttgaggtccggagttccagacaagcctggccaacatgatgaagccctgtctctactaaaaatacaaaaattagccgggcgtgatggcacatgcctttagtcccagctactcgggaggctgaggcatgagaatcatttgaacccgcgaggcagagtctgcagtgagccgagattgcaccactgcactccagcctggagagcagagcaagactctgtctcaaaaaaaagaaaaaagttttattatccttactttttttttaacattattattctaaaggtcaaaactgagaagagattaagataggagagagctccataatggctggatagtggtcaggcattctctattcttttccccctgtagacccattctaaatgtgggcctgaggtcaatgggagatgtgccctccctatggaggatgtaagaagcagaggccatttctgccccatgttgaggaaacaatctgttgatagacctggaatttagagtatatctgaaaagcagttggacttcaagaaatttaaaattctctctttgagatggggtggactaagaccacccccaaagtttaaaaatatgctcattcaacttgaatcttctgaggactttttgtgaaaatggtggactgtttagggcataggacagattccccaaattgctttatgcttccacataactagagcacttcaatctatttaagcctttgtctcctaactgaaacattatttctaaatatttctattcaataagttttttcttttttgagcaacttaagtgaattttgaagattgctccttccagtctcgttccttttcacattttcctgcattacctaataattacctcagcgttagaatttgaatgtattaattgatttaaacatcatgtagactaaagtcttaaacatctaagactcagttgtagttgcagaaaaaaattaaagtcacctctactgaaccttggtttcaatttaagatttttcttgcttttcaaaggggtaactaataaagattgaagggtttttttcccgattggtggaggaatgaagaactattgatgcaagtttttttattgtttctttctatgatcaggtacctgctttcattttagactgctacttccaaactaagctagattcttggttttaatgagaggaggcagagagagggaggcagatggaagaagaaaaacagttaaataagacatacccagtcactgcatttttggactataccgtatctttctagcacaaggaaatagataaactgtaaggtcttttttactcactttttatttatgtgttctatttgtgttagtcataactgtttatagtggttgtctaatttttacttttattatatgagatagagctgtgcagatcttcactcaagttagttctgtcacgcttcttcccattatttagagcacagttttttaaagcaactgtacaatttctcagccttatgagcttgctgtatttcttggtatcatgttgcttccaaattttgtttttactgtagaagacaattaatttattgtagagaagtggctgtgaaagtcgttctctgtctttaaaaatcaattgcagaagttcatttgtcatttttctagagataaattatagtactcaaactggcagtgctcagtatatacattttgtaagctttgtcagtgaaaccatcagttttgcaggagcttcctttcctagtcaagataaagcttaaaattccagaaattaatgtcgttcggactgactttattcatatttccatcaaacttctccaatacagtaagagatagtgttgaaccagcatcaagtctccagaaacatggcagagcagacaggccgttaagtttcacagacatcatagatccttttcttaaagaagaaaaacatgtataaaatagttttagtagtccaaaatgtcaactatctgtagctgcttttgtgtgtgtgtcagtgaacaaataataatgccttgctcaatcaatgcattcagccatctcaagtgcaatttgtgaaggagactatggtttccaaaagatacatttttttacaaagttaaacctgtaaaaagtctttttttttttccctccagccgtacaccaactgcacttggttgtttcagcagttggtatactattaaattgtccaggccaaataggtttctgtagctgttttagtaatttgaagccaaattctcatgctgtttctcattaaaaagaatgagaatttggtccatagttagctttaagttctctcttcctttctttcccttacagttaagggtttggtgggggatggggaggttgttttcgttttttggatttttttgtcttttggctttaagtatcatattttcttttgcctgtatccaactgcttctttgagtattttcatctagtttaatgtgagtaatagatgctgtgctgtcattgaagtgttcaacattttgttcatttaaacaaaagtgtaattcatacatatatagatacatatcttaattgatttctcaactattttataagtaactggaatttttcattagatcttatacagagaagtattttattaaaaattcaaaagggaagacttttatgtgctcattttgtaatttttgattttaaatatctttacattgtctgccaattaaagtgttttaaacttgcattggaatggactccgaatgtatttttgtggtgttacgttatccgtagatttctagcatgaagttagcctcacgatgctgtgcaaaggattttaaaatatgagagtcactgaaagagtttaaacatctgttcatgttaaatgctctatggattttaattaaagacttgagaatgatt

SEQ ID NO: 24116 - DNA, 2901 bp, Homo sapiens
tcgttctagaggatccccgaacatgtcgagcttatcagatggagaaactaagttttacttggaagaacctccaggaacacagaagctttattcaggaagaactgccccaccatctaaagtggttcatcttggagataaagaacaatctaactgggcaaaagaagtacaaggaatttcagaacactacctgagaagaaaaggaataataataaatgaaacatctgcagttgtgtatgctcagttactcacaggtcgtaaatatcaaataaatcaaaatggtgaagttcgtctagagaaacagtggtcaaaacaagttgttccttttgtttatcaaactattgtcaaggacatccgagctttcgactcccgtttctccaatatcaaaacattggatgatttgtttcctctgagaagtatggtctttatgctgggaactccctattatggctgcactggagaagttcaggattcaggtgatgtgattacagaaggtaggattcgtgtgattttcagcattccatgtgaacccaatcttgatgctttaatacagaaccagcataaatattctataaagtacaacccaggatatgtgttggccagtcgccttggagtgagtggataccttgtttcaaggtttacaggaagtatttttattggaagaggatctaggagaaaccctcatggagaccataaagcaaatgtgggtttaaatctcaaattcaacaagaaaaatgaggaggtacctggatatactaagaaagttggaagtgaatggatgtattcatctgcagcagaacaacttctggcagagtacttagagagagctccagaactatttagttatatagccaaaaatagccaagaggatgtgttctatgaagatgacatttggcctggagaaaatgagaatggtgctgaaaaagttcaagaaattattacttggctaaaaggacatcctgtcagtactttatctcgttcttcttgtgatttacaaattctggatgcagctattgttgagaaaattgaggaagaagtcgaaaagtgcaagcaaagaaagaataataagaaggtgcgagtaacagtgaaaccccatttgctatacagacctttagaacagcaacatggagtcattcctgatcgggatgcagaattttgtctttttgaccgtgttgtaaatgtgagagaaaacttctcagttccagttggccttcgaggcaccatcataggaataaaaggagctaatagagaagccgatgtactatttgaagtattatttgatgaagaatttcctggagggttaacaataagatgctcacctggtagaggttatcgactgccaacaagtgccttggtgaacctttctcatgggagtcgctctgaaactggaaatcagaagttgacagccatcgtaaaaccacaaccagctgtacatcaacatagctcaagttcatcagtttcctctgggcatttgggagccctcaaccattcccctcaatcactttttgttcctactcaagtacctactaaagatgatgatgaattctgcaacatttggcagtccttacagggatctggaaagatgcaatactttcagccaactatacaagagaagggtgcagttctacctcaagaaataagccaagtaaatcaacatcataaatctggctttaatgacaacagtgttaaatatcagcaaagaaaacatgaccctcacagaaaatttaaagaagagtgtaagagtcctaaagctgagtgttggtcccaaaaaatgtccaataagcagcctaactctggaattgagaactttttagcatctttgaatatctccaaagaaaatgaagtacagtcatctcatcatggggagcctccaagtgaagagcatttgtcaccacagtcatttgccatgaagagatgaatatggattaccctctcagcctaaacaaaataagaaattagacaatgaccgtttgccaagtaaaattatctaatggcttactggtacatgggccacagtgccactctgaaaatgaagccaaagagaaagctgcactttttgctttacaacagttgggctccttaggcatgaatttccctttgccttcacaagtatttgcaaattatccttcagctgtaccacctggaaccattcctccagcctttcccccacctactgctaatataatgccttcgtcgtctcatctctttggctcaatgccatggggaccatcggtgccagttcctgggaagcccttccatcatactttatattctgggaccatgcccatggctgggggaataccagggggtgtgcacaatcagtttatacctctgcaggttactaaaaaaagggttgcaaacaaaaagaactttgagaataaggaagcccagagttctcaagccactccagttcagactagccagccagattcttccaacattgtcaaagtaagtccacgggagagctcatcagcttctttgaagtcctctccgattgctcaacctgcatcttcttttcaagttgaaactgcctctcaaggccatagtatatctcaccataagtcaacaccaatctcttcttcaagaagaaaatcaagaaaactggctgttaattttggtgtttctaaaccttctgagtaaatttggctcttagaattaagttaatttcttctctttccatctacctttttataaatacatatctatgtctcataaaaattagaatgtactattttaaaataatatgtgtaaattgaaatttttttcatttttaagttatcaggcacttttcatgctgtttaaaagactgtgtatcaaattgtgcactttaagtatgtgcagtttgttgtatgtcaattatacctcaataaatctgtaataaaaaactaaattaaaccttgcatt

SEQ ID NO: 24117 - DNA, 2609 bp, Homo sapiens
tcgttctagaggatccccgaacatgtcgagcttatcagatggagaaactaagttttacttggaagaacctccaggaacacagaagctttattcaggaagaactgccccaccatctaaagtggttcatcttggagataaagaacaatctaactgggcaaaagaagtacaaggaatttcagaacactacctgagaagaaaaggaataataataaatgaaacatctgcagttgtgtatgctcagttactcacaggtcgtaaatatcaaataaatcaaaatggtgaagttcgtctagagaaacagtggtcaaaacaagttgttccttttgtttatcaaactattgtcaaggacatccgagctttcgactcccgtttctccaatatcaaaacattggatgatttgtttcctctgagaagtatggtctttatgctgggaactccctattatggctgcactggagaagttcaggattcaggtgatgtgattacagaaggtaggattcgtgtgattttcagcattccatgtgaacccaatcttgatgctttaatacagaaccagcataaatattctataaagtacaacccaggatatgtgttggccagtcgccttggagtgagtggataccttgtttcaaggtttacaggaagtatttttattggaagaggatctaggagaaaccctcatggagaccataaagcaaatgtgggtttaaatctcaaattcaacaagaaaaatgaggaggtacctggatatactaagaaagttggaagtgaatggatgtattcatctgcagcagaacaacttctggcagagtacttagagagagctccagaactatttagttatatagccaaaaatagccaagaggatgtgttctatgaagatgacatttggcctggagaaaatgagaatggtgctgaaaaagttcaagaaattattacttggctaaaaggacatcctgtcagtactttatctcgttcttcttgtgatttacaaattctggatgcagctattgttgagaaaattgaggaagaagtcgaaaagtgcaagcaaagaaagaataataagaaggtgcgagtaacagtgaaaccccatttgctatacagacctttagaacagcaacatggagtcattcctgatcgggatgcagaattttgtctttttgaccgtgttgtaaatgtgagagaaaacttctcagttccagttggccttcgaggcaccatcataggaataaaaggagctaatagagaagccgatgtactatttgaagtattatttgatgaagaatttcctggagggttaacaataagatgctcacctggtagaggttatcgactgccaacaagtgccttggtgaacctttctcatgggagtcgctctgaaactggaaatcagaagttgacagccatcgtaaaaccacaaccagctgtacatcaacatagctcaagttcatcagtttcctctgggcatttgggagccctcaaccattcccctcaatcactttttgttcctactcaagtacctactaaagatgatgatgaattctgcaacatttggcagtccttacagggatctggaaagatgcaatactttcagccaactatacaagagaagggtgcagttctacctcaagaaataagccaagtaaatcaacatcataaatctggctttaatgacaacagtgttaaatatcagcaaagaaaacatgaccctcacagaaaatttaaagaagagtgtaagagtcctaaagctgagtgttggtcccaaaaaatgtccaataagcagcctaactctggaattgagaactttttagcatctttgaatatctccaaagaaaatgaagtacagtcatctcatcatggggagcctccaagtgaagagcatttgtcaccacagtcatttgccatgaagggaacacggatgcttaaagaaattctaaaaattgatggctctaacactgtggaccataagaatgaaatcaaacagattgctaatgaaatccctgtttcctctaacagaagagatgaatatggattaccctctcagcctaaacaaaataagaaattagcatcttatatgaacaagcctcacagtgctaatgagtaccataatgttcagtctatggacaatatgtgttggcctgcccccagccagatccctcctgtatccacaccagtaactgaactttctcgaatttgttcccttgttggaatgccacaacctgatttctcctttcttaggatgccacaggtatagtatactactgttctatttatataaattatttaacattaagcttaaataaattggttgaaaatgtttagctagaaaaaataaaatggggcctatttttcttaactttatgagcagcatagatttatgcttcttaccctagctctaatatttatacataaccaaagccctaagagaagctgacagggaggaactgggcagcaggtatcctggcaagattcctcaaactaatagagccagggatcttggcctacagtagcaattttcaaactttttggtctcagaaacttcacactttttttggaggaccccaaagagattttgtttacttatatccatatttactgtgtttgaaatt

SEQ ID NO: 24118 - DNA, 906 bp, Homo sapiens
tcgttctagaggatccccgaacatgtcgagcttatcagatggagaaactaagttttacttggaagaacctccaggaacacagaagctttattcaggaagaactgccccaccatctaaagtggttcatcttggagataaagaacaatctaactgggcaaaagaagtacaaggaatttcagaacactacctgagaagaaaaggaataataataaatgaaacatctgcagttgtgtatgctcagttactcacaggtcgtaaatatcaaataaatcaaaatggtgaagttcgtctagagaaacagtggtcaaaacaagttgttccttttgtttatcaaactattgtcaaggacatccgagctttcgactcccgtttctccaatatcaaaacattggatgatttgtttcctctgagaagtatggtctttatgctgggaactccctattatggctgcactggagaagttcaggattcaggtgatgtgattacagaaggtaggattcgtgtgattttcagcattccatgtgaacccaatcttgatgctttaatacagaaccagcataaatattctataaagtacaacccaggatatgtgttggccagtcgccttggagtgagtggataccttgtttcaaggtttacaggaagtatttttattggaagaggatctaggagaaaccctcatggagaccataaagcaaatgtgggtttaaatctcaaattcaacaagaaaaatgaggaggtacctggatatactaagaaagttggaagtgaatggatgtattcatctgcagcagaacaacttctggcagagtacttagagagagctccagaactatttagttatatagccaaaaatagccaagagcgactgacaggccaagagcgactgacaggaagagcgacagg

SEQ ID NO: 24119 - DNA, 930 bp, Homo sapiens
tctgccccctgagacagcctccagaagggatacgttcctccctcctttcggcgagctcggttgatcctcgcgggatttcagttaggctcttagtgcgggccctgtgggtgtggcaagaggaagaatgactgctcgctttgtgattcttgatccggaactttgtcacccaggaaccccggaagaggtagctcacgcgatagaaacgtgttcgctgcccagaagaagggaaggcgcgagtgaggaaaggaggtactgtagatgccctccaaatccttggttatggaatatttggctcatcccagtacactcggcttggctgttggagttgcttgtggcatgtgcctgggctggagccttcgagtatgctttgggatgctccccaaaagcaagacgagcaagacacacacagatactgaaagtgaagcaagcatcttgggagacagcggggagtacaagatgattcttgtggttcgaaatgacttaaagatgggaaaagggaaagtggctgcccagtgctctcatgctgctgtttcagcctacaagcagattcaaagaagaaatcctgaaatgctcaaacaatgggaatactgtggccagcccaaggtggtggtcaaagctcctgatgaagaaaccctgattgcattattggcccatgcaaaaatgctgggactgactgtaagtttaattcaagatgctggacgtactcagattgcaccaggctctcaaactgtcctagggattgggccaggaccagcagacctaattgacaaagtcactggtcacctaaaactttactaggtggactttgatatgacaacaacccctccatcacaagtgtttgaagcctgtcagattctaacaacaaaagctgaatttcttcacccaacttaaatgttcttgagatgaaaataaaacctattcccatgttct

SEQ ID NO: 24120 - DNA, 1029 bp, Homo sapiens
tctgccccctgagacagcctccagaagggatacgttcctccctcctttcggcgagctcggttgatcctcgcgggatttcagttaggctcttagtgcgggccctgtgggtgtggcaagaggaagaatgactgctcgctttgtgattcttgatccggaactttgtcacccaggaaccccggaagaggtagctcacgcgatagaaacgtgttcgctgcccagaagaagggaaggcgcgagtgaggaaaggaggtactgtagatgccctccaaatccttggttatggaatatttggctcatcccagtacactcggcttggctgttggagttgcttgtggcatgtgcctgggctggagccttcgagtatgctttgggatgctccccaaaagcaagacgagcaagacacacacagatactgaaagtgaagcaagcatcttgggagacagcggggagtacaagatgattcttgtggttcgaaatgacttaaagatgggaaaagggaaagtggctgcccagtgctctcatgctgctgtttcagcctacaagcagattcaaagaagaaatcctgaaatgctcaaacaatgggaatactgtggccagcccaaggtggtggtcaaagctcctgatgaagaaaccctgattgcattattggcccatgcaaaaatgctgggactgactgtaagtttaattcaagatgctggacgtactcagattgcaccaggctctcaaactgtcctagggattgggccaggaccagcagacctaattgacaaagtcactggtcacctaaaactttactaggtggactttgatatgacaacaacccctccatcacaagtgtttgaagcctgtcagattctaacaacaaaagctgaatttcttcacccaacttaaatgttcttgagatgaaaataaaacctattcccatgttctatggttggcagttgtcatcttgggcttaaaaacagtactgttggttaaatggtcttggtggttcaagtgagaggctgaaacagatatttaagatgagag

SEQ ID NO: 24121 - DNA, 685 bp, Homo sapiens
ggacgaatagtcatagcgttcgtgcaccggggttttactttcgtgcacgatgggctcggctcgtagttgcaggtaggaggttgcttgtggcatgtgcctgggctggagccttcgagtatgctttgggatgctccccaaaagcaagacgagcaagacacacacagatactgaaagtgaagcaagcatcttgggagacagcggggagtacaagatgattcttgtggttcgaaatgacttaaagatgggaaaagggaaagtggctgcccagtgctctcatgctgctgtttcagcctacaagcagattcaaagaagaaatcctgaaatgctcaaacaatgggaatactgtggccagcccaaggtggtggtcaaagctcctgatgaagaaaccctgattgcattattggcccatgcaaaaatgctgggactgactgtaagtttaattcaagatgctggacgtactcagattgcaccaggctctcaaactgtcctagggattgggccaggaccagcagacctaattgacaaagtcactggtcacctaaaactttactaggtggactttgatatgacaacaacccctccatcacaagtgtttgaagcctgtcagattctaacaacaaaagctgaatttcttcacccaacttaaatgttcttgagatgaaaataaaacctattcccatgttct

SEQ ID NO: 24122 - DNA, 1105 bp, Homo sapiens
  misc_feature (931)..(931): n is a, c, g, or t
  misc_feature (933)..(934): n is a, c, g, or t
  misc_feature (942)..(942): n is a, c, g, or t
  misc_feature (953)..(953): n is a, c, g, or t
tctgccccctgagacagcctccagaagggatacgttcctccctcctttcggcgagctcggttgatcctcgcgggatttcagttaggctcttagtgcgggccctgtgggtgtggcaagaggaagaatgactgctcgctttgtgattcttgatccggaactttgtcacccaggaaccccggaagaggtagctcacgcgatagaaacgtgttcgctgcccagaagaagggaaggcgcgagtgaggaaaggaggtactgtagatgccctccaaatccttggttatggaatatttggctcatcccagtacactcggcttggctgttggagttgcttgtggcatgtgcctgggctggagccttcgagtatgctttgggatgctccccaaaagcaagacgagcaagacacacacagatactgaaagtgaagcaagcatcttgggagacagcggggagtacaagatgattcttgtggttcgaaatgacttaaagatgggaaaagggaaagtggctgcccagtgctctcatgctgctgtttcagcctacaagcagattcaaagaagaaatcctgaaatgctcaaacaatgggaatactgtggccagcccaaggtggtggtcaaagctcctgatgaagaaaccctgattgcattattggcccatgcaaaaatgctgggactgactgtaagtttaattcaagatgctggacgtactcagattgcaccaggctctcaaactgtcctagggattgggccaggaccagcagacctaattgacaaagtcactggtcacctaaaactttactaggtggactttgatatgacaacaacccctccatcacaagtgtttgaagcctgtcagattctaacaacaaaagctgaatttcttcacccaacttaaatgttcttgagatgaaaataaaacctattcccatgttctnannaaaaaaanaaaaaaaaaanaaaaaacattggtgggccgcttgggccaattgaattttagattggacaaggtttatgcttcgggcccgaattcggggttatctggcccatttcgccatatagggagtcggataacaatacattggcggcggtttaacaaggtggtgacttgg

SEQ ID NO: 24123 - DNA, 262 bp, Homo sapiens
tccgactgcttcaccgacgtggcttctccgacgtactcagattgcaccaggctctcaaactgtcctagggattgggccaggaccagcagacctaattgacaaagtcactggtcacctaaaactttactaggtggactttgatatgacaacaacccctccatcacaagtgtttgaagcctgtcagattctaacaacaaaagctgaatttcttcacccaacttaaatgttcttgagatgaaaataaaacctattcccatgttct

SEQ ID NO: 24124 - DNA, 2245 bp, Homo sapiens
tctgccccctgagacagcctccagaagggatacgttcctccctcctttcggcgagctcggttgatcctcgcgggatttcagttaggctcttagtgcgggccctgtgggtgtggcaagaggaagaatgactgctcgctttgtgattcttgatccggaactttgtcacccaggaaccccggaagaggtagctcacgcgatagaaacgtgttcgctgcccagaagaagggaaggcgcgagtgaggaaaggaggtactgtagctacacttctggaaaattcagtatggacagtctccgacttaggatttttcaactttaggatggtgtgaaagagacacccattcagtagaaactgtacttcgagttttgcattttgatcttttcctggcctagtgataatgtggtacagtacactcttgtgatgctgggcagcggcagcgagccacagctcccagtcacccatgtgatcacgggaatcaacaacccatcctctaccgtgtactgtgttgtcagcttttttggatattgtgttttgtgttttcacattccatcatgtctacaaaatgtccatcagtgtctcctgtttctggtgagatgaagaagaggaaggcaattactcttgaaatgaaactcaagataattgcccagcatgaaggtggcaagccagtaatggccattgcacgtgagttaggactttggcaatccacgatttcaaccatcttttaagggataagaagcaaatcagtgatgcagcgaaatcgtcagcatcagttaaatccactgtcatcacaaagaaaagggctggaccaattgatgatatggaaaaattacttgttatgtggatggaagaccagatacagaagcgtataccacttagcctactgatgatccaggctaaggcaagaagtctttttaatatgctaaaagaccgtgccagtgatcctacatatacacaaatgtttaaagcaagtcatggatggttccagcgcttcaaaaggcgtcataattttcacaatgtaaagatcactggtgaggcagcacgtgctggtaatgaaggtgccatagcttttaaggaacagctgcataggataattatggctaaagatctttgcaataaggagctgattgcactggaggaagaaagaggtaaaggcgttgaggcagtggaagaagttacacccacggcacctagaaagttcacagcaaagaaactggcagaggcatttgctgctatcagcagtggcctacacgttagaagaaatggacgtcaattacgagagattcgccacagttgacaggcagatacaggatgctcttgcttgctacagagaaatatatagtgaaaagaagaaacaagctgtacggtcaaaacttggtatcttcctgaagaacaacactatgcttgctaaaccatcaactagtgttgatgtcccaatgccttctaccacctattctcgatgttcatcagaagagagagaaattgaggaccctgttgcatccccatcatccagcaattaattctatttcagtgcttcaaacatttttcaggaccactgtgctttcagctgtgtaaattatgccctccaaatccttggttatggaatatttggctcatcccagtacactcggcttggctgttggagttgcttgtggcatgtgcctgggctggagccttcgagtatgctttgggatgctccccaaaagcaagacgagcaagacacacacagatactgaaagtgaagcaagcatcttgggagacagcggggagtacaagatgattcttgtggttcgaaatgacttaaagatgggaaaagggaaagtggctgcccagtgctctcatgctgctgtttcagcctacaagcagattcaaagaagaaatcctgaaatgctcaaacaatgggaatactgtggccagcccaaggtggtggtcaaagctcctgatgaagaaaccctgattgcattattggcccatgcaaaaatgctgggactgactgtaagtttaattcaagatgctggacgtactcagattgcaccaggctctcaaactgtcctagggattgggccaggaccagcagacctaattgacaaagtcactggtcacctaaaactttactaggtggactttgatatgacaacaacccctccatcacaagtgtttgaagcctgtcagattctaacaacaaaagctgaatttcttcacccaacttaaatgttcttgagatgaaaataaaacctattcccatgttct

SEQ ID NO: 24125 - DNA, 1161 bp, Homo sapiens
  misc_feature (958)..(958): n is a, c, g, or t
  misc_feature (974)..(975): n is a, c, g, or t
  misc_feature (987)..(987): n is a, c, g, or t
  misc_feature (989)..(990): n is a, c, g, or t
  misc_feature (998)..(998): n is a, c, g, or t
  misc_feature (1009)..(1009): n is a, c, g, or t
tctgccccctgagacagcctccagaagggatacgttcctccctcctttcggcgagctcggttgatcctcgcgggatttcagttaggctcttagtgcgggccctgtgggtgtggcaagaggaagaatgactgctcgctttgtgattcttgatccggaactttgtcacccaggaaccccggaagaggtagctcacgcgatagaaacgtgttcgctgcccagaagaagggaaggcgcgagtgaggaaaggaggtactgtagatgccctccaaatccttggttatggaatatttggctcatcccagtacactcggcttggctgttggagttgcttgtggcatgtgcctgggctggagccttcgagtatgctttgggatgctccccaaaagcaagacgagcaagacacacacagatactgaaagtgaagcaagcatcttgggagacagcggggagtacaagatgattcttgtggttcgaaatgacttaaagatgggaaaagggaaagtggctgcccagtgctctcatgctgctgtttcagcctacaagcagattcaaagaagaaatcctgaaatgctcaaacaatgggaatactgtggccagcccaaggtggtggtcaaagctcctgatgaagaaaccctgattgcattattggcccatgcaaaaatgctgggactgactgtaagtttaattcaagatgctggacgtactcagattgcaccaggctctcaaactgtcctagggattgggccaggaccagcagacctaattgacaaagtcactggtcacctaaaactttactaggtggactttgatatgacaacaacccctccatcacaagtgtttgaagcctgtcagattctaacaacaaaagctgaatttcttcacccaacttaaatgttcttgagatgaaaataaaacctattcccatgttctaaaaaaaaaaaaaaaaaaaaaaaaaaanaaaaaaaaaaaaaaannaaaaaaaaaaanannaaaaaaanaaaaaaaaaanaaaaaacattggtgggccgcttgggccaattgaattttagattggacaaggtttatgcttcgggcccgaattcggggttatctggcccatttcgccatatagggagtcggataacaatacattggcggcggtttaacaaggtggtgacttgg

SEQ ID NO: 24126 - DNA, 389 bp, Homo sapiens
ctgaaaccagaggttcgcttgaggccgggagtccaagaccagcatcggcaaactagtaagaccccatctctacaaaaataaataaataaataaataaataaataaataaataataaatgaaaataaatgttagcttccagaggtaactactccctatacatttagacatatataaaatatgagaagttaagaaatttttcacaaataatagctaatgttagtggagtgttcacatttgttatttttttgtgcattaattcaatctttacaatagcccacttaagtaggtaatattgtccccattttacaaactgaggcttaacaaggttaagaaattttccttaaagttgggggcagtggctcacacctgtaatcctagcactttggga

SEQ ID NO: 24127 - DNA, 457 bp, Homo sapiens
ggtcacattccaagtttcagtactctttgataaattgtattggattctagtttcccaacatacgactctgctccttctgcttacttttcccaaattattttgccttctgtgcccaggcacacttagttccctgtctaggcaagagtggtcattattagacttcattttctttctactgtgcatatgtattgattagccatgggcacattgtgaacttgaaaagtcgatttagtcacattttaagtttcactatttgttggtattattctggcaagattttggaaggtttttattatttattcatttgtgtattttttgagacagagtctcattctgtctcctccgctgaagtgcagtggcgtgatcgtagcccaccgcaaccttgattgaactcctgggctcaagtgatcgtcctgcctcagcttctggagtggctgggactataggcgtgcaccac

SEQ ID NO: 24128 - DNA, 151 bp, Homo sapiens
tgcactgtaaagggagcacactcttatccatgaagtcatactgccctcactggctgtgaaatactgtgttcttcatttactcttgccggaatttgcaaattgtctgcaacctgctactttgtaagggctcctcccttgatgtgcagtaagt

SEQ ID NO: 24129 - DNA, 478 bp, Homo sapiens
aggtgggtgcttccttctttgtaactaatttcgtcagtgtagtagatttattttctcagccttttatcagtgggatgtgagctgtcctctgaaaactaacatagctcagactgttccccaggcaactgtgttccctgcggcagtgttgttgcacttgtacctccagtgcctatcagaccaacagttctagtctaaaagtggattgagaagacagtttgtgtagaactcgctctgggagagctgaagcaacgcctgccgaggcgggagctgctctggttctaagtgctgtctcctttgatcaggaattctttgagctgcttctccagcaagtactcctctgctttgacatgagccttctgtgagccgttgtgaaaagaaatgcatttcaccaaaactcggaagctgatctaggcctactgaccatgagagtctttgtagaacattaattgggaaatttgtaaattttgaaaatctcttt

SEQ ID NO: 24130 - DNA, 1443 bp, Homo sapiens
  misc_feature (16)..(16): n is a, c, g, or t
  misc_feature (21)..(21): n is a, c, g, or t
tgttgtcatggagacngcgtngtttacctctctgttctgcaagagctggaagctccagttggggtaaggaggctcccatcccgagcttgcgtagtggttctgtgtggcgctgaggaatttggaaacctcaaatggctaaactattacaacctccacccaagttcctgccctcagagtggcacattgctaacaagaaccagtaccacagagcagacgctcaaaggtcccgatcagaacgcctggtcgcagaaagccagaggcttgtggatgaaattgaaaagaccacaagaaaatctcaaagcgatgtgaacaagaaactagaacagagactcgaggaagtccagttctggaagaaggagttagatgacaaacttgagcagcttgtgaatgtaactgatgatctactcatatataagatcagattggaaaaagccctggagaccttgaaagagcccttgcacatcactgagacatgcctggcatacagggagaagcgcattggcattgacctggtgcacgacacagtggagcatgagctgataaaggaggctgagatcatccagggcattatggctctgctgacccgtaccttggaggaggcttccgagcagattcggatgaaccgctctgccaagtacaatcttgagaaggatttgaaggacaagtttgtggccctgaccatagatgatatctgcttctcgctcaacaacaactcaccaaacatcagatattctgagaacgccgtgaggattgagccaaactccgtgagtctggaagactggttggacttctccagcaccaatgtggagaaggctgacaagcagcggaacaactccctgatgctgaaagccctggtggatcgaatcctgtcccagacagccaatgatctgcgcaagcagtgtgatgtggtggacacggcattcaagaatgggctgaaggatacaaaggatgccagggacaagctggctgatcatctggccaaggtcatggaagagattgcttcccaggagaaaaatattacagctcttgaaaaggccatccttgaccaagaagggccagccaaggtggctcatacgcgcttggagaccaggacacaccggccgaacgtggagctgtgtcgtgatgtcgcacaatataggctaatgaaggaggttcaagagatcacccacaatgtcgcaagattgaaggaaactttagcccaagctcaggcagagctgaaagggctgcatcgcagacagcttgccctgcaggaggagatccaggtcaaagagaacaccatttatatcgacgaagtgctgtgtatgcagatgaggaaatccatcccacttcgggatggggaagaccatggggtctgggctgggggcctccgccctgatgctgtctgctaatagtagggctagttccaattctcattaaaccacattgtaaacagtaaaaaaagta

SEQ ID NO: 24131 - DNA, 825 bp, Homo sapiens
  misc_feature (16)..(16): n is a, c, g, or t
  misc_feature (21)..(21): n is a, c, g, or t
tgttgtcatggagacngcgtngtttacctctctgttctgcaagagctggaagctccagttggggtaaggaggctcccatcccgagcttgcgtagtggttctgtgtggcgctgaggaatttggaaacctcaaatggctaaactattacaacctccacccaagttcctgccctcagagtggcacattgctaacaagaaccagtaccacagagcagacgctcaaaggtcccgatcagaacgcctggtcgcagaaagccagaggcttgtggatgaaattgaaaagaccacaagaaaatctcaaagcgatgtgaacaagaaactagggagaagcgcattggcattgacctggtgcacgacacagtggagcatgagctgataaaggaggctgagatcatccagggcattatggctctgctgacccgtaccttggaggaggcttccgagcagattcggatgaaccgctctgccaagtacaatcttgagaaggatttgaaggacaagtttgtggccctgaccatagatgatatctgcttctcgctcaacaacaactcaccaaacatcagatattctgagaacgccgtgaggattgagccaaagtgagtgggccttgccgtcttcctcctcgcgggtgacccagtgcttctcagataggcaagacctagcggctcgtccttgcagctggctgagagcttggaagtggtgggcttggggcaaaggcagcattgaatggtgaccttgacattgggcccagaggctcctgattctccaggttaggctcactaactaagaaagtctgacataaaacctttaaacctttaaagaataaa

SEQ ID NO: 24132 - DNA, 1168 bp, Homo sapiens
  misc_feature (16)..(16): n is a, c, g, or t
  misc_feature (21)..(21): n is a, c, g, or t
tgttgtcatggagacngcgtngtttacctctctgttctgcaagagctggaagctccagttggggtaaggaggctcccatcccgagcttgcgtagtggttctgtgtggcgctgaggaatttggaaacctcaaatggctaaactattacaacctccacccaagttcctgccctcagagtggcacattgctaacaagaaccagtaccacagagcagacgctcaaaggtcccgatcagaacgcctggtcgcagaaagccagaggcttgtggatgaaattgaaaagaccacaagaaaatctcaaagcgatgtgaacaagaaactagaacagagactcgaggaagtccagttctggaagaaggagttagatgacaaacttgagcagcttgtgaatgtaactgatgatctactcatatataagatcagattggaaaaagccctggagaccttgaaagagcccttgcacatcactgagacatgcctggcatacagggagaagcgcattggcattgacctggtgcacgacacagtggagcatgagctgataaaggaggctgagatcatccagggcattatggctctgctgacccgtaccttggaggaggcttccgagcagattcggatgaaccgctctgccaagtacaatcttgagaaggatttgaaggacaagtttgtggccctgaccatagatgatatctgcttctcgctcaacaacaactcaccaaacatcagatattctgagaacgccgtgaggattgagccaaactccgtgagtctggaagactggttggacttctccagcaccaatgtggagaaggctgacaagcagcggaacaactccctgatgctgaaagccctggtggatcgaatcctgtcccagacagccaatgatctgcgcaagcagtgtgatattgaaggaaactttagcccaagctcaggcagagctgaaagggctgcatcgcagacagcttgccctgcaggaggagatccaggtcaaagagaacaccatttatatcgacgaagtgctgtgtatgcagatgaggaaatccatcccacttcgggatggggaagaccatggggtctgggctgggggcctccgccctgatgctgtctgctaatagtagggctagttccaattctcattaaaccacattgtaaacagtaaaaaaagta

SEQ ID NO: 24133 - DNA, 678 bp, Homo sapiens
  misc_feature (16)..(16): n is a, c, g, or t
  misc_feature (21)..(21): n is a, c, g, or t
tgttgtcatggagacngcgtngtttacctctctgttctgcaagagctggaagctccagttggggtaaggaggctcccatcccgagcttgcgtagtggttctgtgtggcgctgaggaatttggaaacctcaaatggctaaactattacaacctccacccaagttcctgccctcagagtggcacattgctaacaagaaccagtaccacagagcagacgctcaaaggtcccgatcagaacgcctggtcgcagaaagccagaggcttgtggatgaaattgaaaagaccacaagaaaatctcaaagcgatgtgaacaagaaactaggtaagacaacatgcttggcatattcgtgaacatgctaggatgaggctgttgagtttagctatagtgtcatgttcagatgtggcaacatattatttttgaatattagagaaaatcatgtgtattctccaggttctatgtttaagttcactgccctaagatagacacaaggtaacccagcctgattttcagccacccatcattcatttatttgttgatttgatgcacagttattgagcatctatgggcatctatgtactacacactaggcatatcacagggaatgatcagaatctctgctttttaggggcttctaacttgaagaggataaagatacaaaaattaatcatcagaatacag

SEQ ID NO: 24134 - DNA, 1221 bp, Homo sapiens
aaaagaaaaagagagagagaaaaaaaagtccatttggcatgtttcagaccaagtgaccagtcatcaatcaatttttcttcattgtgtttggatattttgaagtcacatagacaccaactaatatctgtcacccactgtgtcatcggatggatcgggtgacactcaaatcagtcgtgcagatagttctgagtgtgcagccattagccaatgttgagtcacctcatgttgcacgtgttggctgactggctgcctttccccctgccagggagaagcgcattggcattgacctggtgcacgacacagtggagcatgagctgataaaggaggctgagatcatccagggcattatggctctgctgacccgtaccttggaggaggcttccgagcagattcggatgaaccgctctgccaagtacaatcttgagaaggatttgaaggacaagtttgtggccctgaccatagatgatatctgcttctcgctcaacaacaactcaccaaacatcagatattctgagaacgccgtgaggattgagccaaactccgtgagtctggaagactggttggacttctccagcaccaatgtggagaaggctgacaagcagcggaacaactccctgatgctgaaagccctggtggatcgaatcctgtcccagacagccaatgatctgcgcaagcagtgtgatgtggtggacacggcattcaagaatgggctgaaggatacaaaggatgccagggacaagctggctgatcatctggccaaggtcatggaagagattgcttcccaggagaaaaatattacagctcttgaaaaggccatccttgaccaagaagggccagccaaggtggctcatacgcgcttggagaccaggacacaccggccgaacgtggagctgtgtcgtgatgtcgcacaatataggctaatgaaggaggttcaagagatcacccacaatgtcgcaagattgaaggaaactttagcccaagctcaggcagagctgaaagggctgcatcgcagacagcttgccctgcaggaggagatccaggtcaaagagaacaccatttatatcgacgaagtgctgtgtatgcagatgaggaaatccatcccacttcgggatggggaagaccatggggtctgggctgggggcctccgccctgatgctgtctgctaatagtagggctagttccaattctcattaaaccacattgtaaacagtaaaaaaagta

SEQ ID NO: 24135 - DNA, 561 bp, Homo sapiens
tctgaaactttttgagtacccatatgatgccacaagtggaaaacttcacacctcacctcgtgatgagttggagtcaaaacactggtgtacaacatagtttattcagtgttcctaagagaagaaagcttccccccgccctctagctgtaagatgatcttttccaggcatacccagattctctcatgcgagcatgcccacaaagcgtaatacagtggcacatgtgcaggccagatggcgccaagggcaggttccccatgatgctccacgtggggccaagactcatgtgctttacttgctgtgttttttttccttcttttctgctctgttatatgaagatttgttgaaaatgttaaaaagtcctgcagaggcccagcgtgttggctcacacctgtaataccgactcacctctattttgtcagttcatagttgaagattttgttttatttcaaaaacaaagtacatttttgaaataatgtttcagaataaaataatctcacttttaaattaagtgatccattttaaaatttgtaattcaataaagttttttttgttgttaaacat

SEQ ID NO: 24136 - DNA, 661 bp, Homo sapiens
tctgaaactttttgagtacccatatgatgccacaagtggaaaacttcacacctcacctcgtgatgagttggagtcaaaacactggtgtacaacatagtttattcagtgttcctaagagaagaaagcttccccccgccctctagctgtaagatgatcttttccaggcatacccagattctctcatgcgagcatgcccacaaagcgtaatacagtggcacatgtgcaggccagatggcgccaagggcaggttccccatgatgctccacgtggggccaagactcatgtgctttacttgctgtgttttttttccttcttttctgctctgttatatgaagatttgttgaaaatgttaaaaagtcctgcagaggcccagcgtgttggctcacacctgtaatactggcactttcggaggctgaggtcggcagatcacctgaggtcaggagttcgagaccagccgggccaacgtggtgaaatctcctctctaccgaaaatataaaaattagtctggtgtggtggcacatgcctgtattcccagctacttggaaggctgaggcacgggaatcacttgaacccgggagttggaggttgcagtgagctgagatcacgccactgcactgcagcctgggcaacagagaaagactattgtctcaaaaaaaaaaaa

SEQ ID NO: 24137 - DNA, 353 bp, Homo sapiens
aaaagcctaggactcattattgataccactctttctctcatattagaaaaccttttaaaatacagcaagaatcggccgggcctggtggctcacacctgtaatcccagcactttgggaggccaagtgggtggatcatgaggtcaggagatcgagaccatcctgtctaacacggtgaaaccccatctctactgaaaatacaaaaaattagccaggcgcagtggcaggcacctgtagtcccagctacttgggaggctgaggtaggagaatggtgtgaacctgggaggtggaggttgcagtgagccgagattgtgccactgcattccagcctgggcaacagagcgagactccatctc

SEQ ID NO: 24138 - DNA, 430 bp, Homo sapiens
ctggtttcgaactcctgacctcaaatgatccacccacctcggcctccccgagtgttgggattacaggtgtgagccacctcacctggcccatattcttgaagggtggaggaatacaatcattttaaagctgtgtgacaaattctctttttgtactgtcttgctcagtctcttaatctggctcctctttcctcctcttctcccagccctcttacatgttaacagtattccctagtgttctgatttgggtctaccccttccaagttctgttcttggttcctaaaatgttcttgatttcagcaccttctccttttattttttacctttgattgaggactgaatctcttgccaacattagcctttactggtctctttgccttcagttttttttgttgttgttttgtttttcctgtctttcatttattctgtatat

SEQ ID NO: 24139 - DNA, 551 bp, Homo sapiens
aaaaatttctgttgagcttctccaaaaaagggcttccagaattaggaagtcatatttgcccatagactaagaagaaaataaaacatgaatattcttttaatgcatttcaggtgtgcactttttttttttggagacagagtctcactcctgttgcccaggctggagttcagtggtgtaatcatggctcactgcagtcttgacttcccgggctcaggtgattctcccacctcagcctcccaagtagctgggactacaggcacgtgccaccacgcccggcatttgtacttttagtagagaaggggtttcaccatattgtccaggctggtctcgaatccctgggctcaagtgatcgcctacgctggcctcccaaagtgctgggattacagacatgaactaccgcgcctggcctaggtttgcccttttaataactatattataatattcgcattaaaagtttattaataaagctatccaaatttttggacaaaaacaaaaatcagactattttaaaagaccaaaaaaaataccccaaagtgagcccatttcaactg

SEQ ID NO: 24140 - DNA, 418 bp, Homo sapiens
actctgccttggcccagttttgtcttaatgggctgcttcccacttctgccatttccacttcctctgcttgaattctccttttcctttgccctgtgatttccatattcaaaatttaatggttcctacatttgagttagtttttatgactttctttggagtgtggggagagccagcaagccatagtttctcaggcagaaaaaggcacaagaggcttggggggttatattatggactacaaataatgtgagttgcaaaaagatctttaaatacagattcaaaaaattggcaaaattaaaaatgttcttcctagcatgcttaaaattgtttttttaaattgttgaaatatttcccctatatccttatatttacctaggtgaattactatacattttattatggttataatcataacaaagac

SEQ ID NO: 24141 - DNA, 497 bp, Homo sapiens
gagagacttacataatacacatgtgagacagtcacaagtgcgagaagccatgtctgctcatttgtgcttgtcaagataatttcacacagtccctgaatctgtgaggccatgcagctctttgggaagatgctttgaagacaaaacaggatggaccacatggctcccacaccacttgcctgagtcactatgctccttaaaagatgaatgaccctagccttgacttttcctacacagaagataacgtttgacagggttagtgactatgcctctgtaattcattactaaatgcattttagtcatctataaccagatatactctggcacccagactttgacgtgattttgcacgtactgaaccttcaccacccgtccataaactgtgagctgaaacaccacattggagcctctgatggaactgctcccgggctgtagacctccatctacagtcttcggtaaggcttctgaataaaactaactttaattctttaaaaaattga

SEQ ID NO: 24142 - DNA, 3419 bp, Homo sapiens
cagatatttaacagatcctacatttattagctatataacagactctacattttcctaagtgcctaagaccaatcctggtagtcacttaagtacaaaagactcactttaactggcttggtctgaaggggtcaatcctttactgcctgtacaagatctgggcagttttgctctgtgtcttgtgatgacccagctgaatgtgaaaagcctatgagttattgagcaaccagaggtccctgcattccaagttgcagtttagctctggggaaactctggctttctctttcctcaagtgtccaccactgcccatcatttgcagaaagacttggccctgcctttagcaacttccctatctccttagagtagacaagaaagaaacagatttgtgcacattttacaaagtgccttcctctatttttttttaaagttttcattttgcaaggaaaaatgtattgattagaaagtaacatttgccttatagggattatatatatatatagatatagatatagatatgtatgaatggagagatgagaagaagccagaaagggcacaacaaaatggtctaagggccaaccagcaatgttcagtgaatgtttacgtattgtttaattgaatcaacacagagctgttgtgaatagtgtgacttactttgcctgataagaaattgaggctggctgtgatttggggataaacctgccaccctgtgatttgagactctccataccaaaacttattgatacatttttgaatgtcattggcttacatgcctaaacctgaagagaacaatgcatgcacattggaactttgtacacaaacagaaaaatataaatgactttgaattaccatcccaagcattgctaacgtagatgtgccattgacgaaagtctcatgtgttcttgagtgaacaaatttccttttcttcctttttggctcaagcacaataatgctgtcactgagacagtgactgagcactcaatgtccaagactaaatcacatcaccacgactaagtaggcactatgtcctgggatgagtcttttaaactctggccatcaggttccttacttgttaaataagtaggttggcctaaaaggtttctaagacctctcatgatctaggtaaaatccagggtttcaggtcagtgtccctggtgcagtgcaagaaagccttgctgacacacccttggcctgaagcagtgagcacatgagattgtgtgacaacgcttcagagaaaaacagagatctgttcctccaactcagattgatttaacatccttgcttctccttttccttcctggctttacatatttgtagggtttttactccttctccagagcctactattttcctaagagttagtagcaaccataggatccacaagaaatgaaattattcatcaacaataactttggcactgcaaaagactgagtcaaaggttaaatcagtcacacagatatccaaggccaagttgaagatcacaagtatatcccatttagagatttgcatacttagagattaagcccatgttcattaattatttagttaattcaaaagccattaataaatccatgcccagcctacgcaacatagtaagacccagtctctacaaaaattttaaaaattagccagccatggtgacacgtacctgtagtcctacacacttgggaagctgaagccagaggattgcttgagcccaggaggtcgaggctgcagtgaaccgtgattgtgtcactgcactccagcctgggtgagagagcaagaccttgtctcaataaataaacccaagttacttcgatgactagatactggaggtctgaaggagaagctttaaaaatacagattgattgcttcagagaaatcctatttataattatgatctgaacttattctatgattagcaaatatatcatctgaaaataaaacaggagttctctccccagacttttgtttttcaggatggtgagttttggtctgggaccctcatggcacccattttgataaaaggaaaaagatagtaaaacaggaaataggaagtttccagagatttgggcatctcaggattccatgaaatgctgagactaacccactaaatccaaattttattggctatggtaaatctaaatctgttcagtgttctgaacagattttatgagtttatgtctaagagtttatgtctaagagaggtacataattcacaaacactatcatgctggcagctgttttgtccacatcaattcccttgatttaatgctctgatttcaatttagaaagtactgagacatgtaaagtctcaaaataggaaaaacctatcctgtttataaggtgtggtcaataaatagaccacagataatcttagtctattaattaactctcagatcatcttagactattaattaacattctgcttgctgctgattaaaaagaaaaaaaccctaaaaccttcagcaactgaagtagtaatataaaaaataacctttaatagttatggtcaaattacgcttcacttggataaacctcaaaatgtagtctgagtttttttgtgcacacttcacaaatcctgggggaaaaatcttttttccacgttatctgaaaaactatatggcgaagataccgctgaaaaataatttgttttatgaaattcctgaaaagctaattttgaattttttaaagtaactacctcccttttgtgtcctaatgtccttccttcaaagctgcttatagtttagaaatgaaagatgtcatgtctcatgctttgactggttttcggtggcatatttgatgtatttgccaagtggcattactgactttacagtaactgttacattattttgtactatattgctttatgtggttcaaaaatagtatatgccatattgaaatatgtaatcctcatgttgtgaaactcatcatgtaatacaaatgaaaatcattacttaataacttacaatttatccatatgtagtttcaatatgattgtgtctatgactgtaaaacaaaactgaaaaaatatgtaatgtatttctgttgaaagcgtgaatgtactaattttttcctaatctttgtctagaagaaagattctatgtcattcattgtacagctgctctggggtgttacacatttaaagtacaatccaacagttgtttgaaagtcagcctctcggctttgtttcatgtgactgctgacacttctcaagtgttctttgcataatgaggctggattttgtgcttcatcgttcattttaaacaattgaaaagtctcatgtggaaaccaaagcaatctagaaccagcctgttgggtgactgtgtcttctgtaaagccatattgaagtgaagttatacataatagcataaggttccacattttcaaagctaccactacctctgcttttcctctttccctagaaaatgccaagcaaaattccc

SEQ ID NO: 24143 - DNA, 573 bp, Homo sapiens
gcggccgcctactactactactactgctcgaattcaagcttctaacgatgtacggggacatgtaatacaaatgaaaatcattacttaataacttacaatttatccatatgtagtttcaatatgattgtgtctatgactgtaaaacaaaactgaaaaaatatgtaatgtatttctgttgaaagcgtgaatgtactaattttttcctaatctttgtctagaagaaagattctatgtcattcattgtacagctgctctggggtgttacacatttaaagtacaatccaacagttgtttgaaagtcagcctctcggctttgtttcatgtgactgctgacacttctcaagtgttctttgcataatgaggctggattttgtgcttcatcgttcattttaaacaattgaaaagtctcatgtggaaaccaaagcaatctagaaccagcctgttgggtgactgtgtcttctgtaaagccatattgaagtgaagttatacataatagcataaggttccacattttcaaagctaccactacctctgcttttcctctttccctagaaaatgccaagcaaaattccc

SEQ ID NO: 24144 - DNA, 673 bp, Homo sapiens
taaaatcaggcagaagctgtctgcagagatgttgcaggtgctctaaaaggtgctctaaacaaccaccaaatgcatacggcaaccaggcaaatgcctgatagaggaaagccatcttcaagcccgcaggaaagttttgtggcacatggtggcaacccagttcccagttcccagttcccttcctcaagctgcagggagcagaccagacatgatttgttctagtctagctgattcatacctgaaggattgatcctcatctccatctcacataacatgcaaggtgggcaagaaaaagaggtgggcacagctcatgaaagccacagagaggcaattaaggtaaaaatagataaattgcactatatacaaattaaagacttcagtgcatcaaaggatacagtcaacagagtgaaaagcaatctatggagtaggagaaattatttgcaaataacgggttaatcttcacaatatataaagaactcctgcaactcaacaacaaaaaaaaaaccccagtttcaaactgagcaaagaacttgaataaacatttcttcaaaaaagatgatataaatgtccaataggcaaatgaaaagatgcttaacattactaatcattaggaagatgcaaatcaaaaccacaatgagatagcacctcagcacctcacacccattatgattgctac

SEQ ID NO: 24145 - DNA, 429 bp, Homo sapiens
actaatgctttcatattagtagattttgttcagaggccatagaatgctaagaaactgaagttagagactgaaacacagtttatactggggatatactataaatcaaaagaaagcattagctgaaaagcagtaaagatttcagattgaacagataaagttatcttcttttttaatcagaatctcataggaaaggcagaaagtgtctaagatagggaatagattcataacaacttgaaaaatatttttaaaaatcatcagtagcggccgggcgtggtggctcatgcctgtaatcccaacactttgggaagctgagcgggggtggatcacgaggtcaggagttcgagaacagcctggccaacatagtgaaaccccatctctactaaaaatacaaaaattagctgggcatggtggcatgtgcttggagtccca

SEQ ID NO: 24146 - DNA, 594 bp, Homo sapiens
caggtgtctcgggggcagatggtggagcccaggtgaaccccctaggttgtctctgtcccatcatccttgatcctctttgttttttgagacggggtctcacaatgttgctcaggctggagtgcagtggtgcagtcatggcccattgcaccctcaaccttgtgggctcaagggatcctctcacctcagctcctggagtagctgggactacaggcatgcaccaccatgtctggcttatttcttaattttcttgtggagacggggtcttgctatattgcccaggctagcctcaagcttgagggctcaaagtgatcttcctgcctccacctcctaggtgttgagactataggtatgagccactgggcctggccccttgattccctttgcatgatagaacttcaacccttggagccccagaggatccaggcagtatcaagtcaccatccatgttatagatgagaccatgtataacatcaccatctttaacaccaccatccagccttcagatgagatcacagccctgactgcaacctctctgaccacagctcagagagggcatgtggcatgctcacaaacagtctgttaggggcttcccct

SEQ ID NO: 24147 - DNA, 487 bp, Homo sapiens
caaggcctggcccagtagacttgaggcaggataggtggttgaatgaggtggcatgctgtgtagaacttcactcacatgggcagtggagaatttgccctggccttgatcttggcgcccctcccccttggtgttgcttcttgacaccgctgtcaacaactagagccctggaaaagagcactttattccttcagctgttatctgccaggtgcttattatgtgccaggtagtatttttggtgcttagaattcattcagcagtaaagaagagaagagccctacttgtaaggaggagggttagataataaacaagtaaactaaaaaattgataattttagataatgatggagcctataaaaaatataaaataagggaagtgacagaaaatgactggggtggtagaataggggtggaggggctacttcatatagagtgtcagggaaggcctctctgcggagatagtatttcagcaaagactaaaatgattttta

SEQ ID NO: 24148 - DNA, 520 bp, Homo sapiens
ctcaatatgacaacagtcaggatcttgatggcagatctcatgagagaacttcaaaaaagtttgcatcccaaacttctgaattatgtctttgggccctctaattttgatgctggagacatagctctgtgaccccctgtggtccctctccaaccctcaagtgctgcaactatgcaggcagaaccaagacgaagcctatctcttggaaagccaccctcttttctccatccctgccaccttctccttggttttgccccttcctatttcttgtcaaaatatacacaactgagattcatgctactattcttgcctctccacctcatcggatcacttttccatatcactcttaactctggcttttgcattatactgagacaacattttaaacatatttcctgccacaattgagggtggtagaatgatttcaggggactgcatcagagcaaatttctgtggcaaattatagtattttagatgacacaggggaataaactgagaagtttctgtgtcatctaccaaaaaa

SEQ ID NO: 24149 - DNA, 523 bp, Homo sapiens
ttgtggagattagctagatttgctaaagtgcttgtaggttagaaagtgctgtcattcctgagaactggcattaacagaagagagctgtgtgcagcacggaggaagtggagtctaaggaatacaacagcaacaactcaccaagcagagaatacaatggttcttcatcactatataaaactaacacttttccttcaaaggtctatgtataattttcttcaatgattagctttttaatgagacaactcctttcatccagacattcagatgctttatataagttggcaattttcctgttaaccaaactgaattttattaaatgtttattaaaatgcacccagaaaacttgtctcctcctgatgcctgaggggtttgcatgcctgatcccaagctgcattttttcagaatgcgtgcatgatgccccagttctgtactcatgatcaccaggtggcgttctgaaatccactactggggaaagatttttaacagatattagtgagattagagttggtgtcatttccattga

SEQ ID NO: 24150 - DNA, 123 bp, Homo sapiens
gtttcattttttatcattttgatttacagttctcagttgacattaatagactcgaaggcaagaatagcaaacatacttctaagccctagctaggggcccacttgtaacatgctatattttaca

SEQ ID NO: 24151 - DNA, 480 bp, Homo sapiens
tacttttcacagggcagggctaacaaaatggatggggtgaaaaatgggaacagttagaaggattcagtgtttcccaataagatttaccagatgcatgaggttataactgaacaaaaaggaatacaaagagaacaagctggaggaaaagaaaaacttattttttgacagattgagtctgatgttgcctaaagcacatcagcatcagggtagttatatcccctgggctggtaaaaatcgggcccaaagtttaggaaaatgaggtcagggttggaaccctgggaggtgacgttatcatacaaggaaagcaaacagtgaaagggctgagaaggtaccaccaacatttaagagaaagaaagaagaaataaaatgaaaatggaagaggagctctgcaacatcacatactgagaaacaggtacagtgatggagctggaactagaaaaaagtaatagccttagcaaaagtcacccctaaggaaaacca

SEQ ID NO: 24152 - DNA, 4343 bp, Homo sapiens
cactttcccgctggaggcgcagaggatgccccttgagccagacctggagaaatagccccagggcccggcaggaggagccttggtggcgagaaaggaaatccaggctcccctttccttaaagccactgcagcagctgggaaggcgcccacagagcgggcgcgccaagcgggacgcgggagtcgcagagagggaccccgggcgcctgctgagctcagctggcagagtttgcaagtggcggagacccttcaggtggcatccctgagtcctgatgcctgactggatggaggcccaccagcttctgttcccatgaggtagaaaggccaagcttggtcttcagctggggaagaggccagaaacaaggcccccagtgaaataacccagatccattggcctgaggagcagagaaagggcaagaagtgaactgcagctgctggtaaccctcagaaaccttctccaagtgctattctcacagttctttaggaacactctgaagtgaagaacaatatgtaggaaaatgggaccaacttatgtgtgttctgagcctcaaaacccccttgttggcccaaagaagctcaccttcagtttgggagggctggtaagctccatcctttctcatggcctcagccaagcattgaacttgccctccccttctggccttggtgatcactttttcaggaagagtgagactgaggacccccaagtgttccatccctaaggaaagcttgggaaaccaagccccttccatcctctcccaagcaccccagccaagccccagagagccagtccggaatgatcccactatggccaagctctggttcaaattccagcggtacttccgccggaaacctgtgcgcttctttaccttcctggcactctacctgactgctgggagccttgtcttccttcactctggctttgtgggccagcccgctgtctcggggaaccaggcgaaccccgctgctgcaggaggcccagctgagggtgctgagctgtccttcttgggtgacatgcatctgggcagaggtttccgggacacaggtgaagcctcaagcattgctcgcaggtacggaccctggttcaagggcaaggatgggaatgagagagccaagcttggcgactacggtggagcctggagccgagccctcaaggggagggttgtccgggagaaggaggaagagcgagccaagtacatcggctgctacctggatgacacccagagtcgggcccttcgaggagtgtccttttttgactacaaaaagatgaccatcttccgttgccaggacaactgtgctgaacggggttacctgtatggcgggctggagttcggcgccgagtgctactgcggccacaagatccaggcgacgaacgtgagcgaggcagagtgcgacatggagtgcaagggcgagcgaggcagcgtgtgcggcggcgccaaccgcctctctgtctaccggctgcagctggcccaggagtcggcccgcaggtatggaagtgcagtgttccggggctgcttccgcaggcccgacaacctttccctggccttacccgtgacagctgccatgctgaacatgtctgtggacaaatgcgtggacttctgcactgagaaggagtacccgctggcagctcttgcaggcaccgcctgccactgtgggtttcccaccacccgattcccgctccatgacagagaggatgagcagctctgtgcccagaagtgcagcgcggaggagtttgagagctgcgggactcctagttacttcattgtgtaccagacacaagtccaagacaaccgttgcatggacagaaggttcctgccaggcaagtccaagcagctcattgctttggccagcttcccaggtgctggcaacacgtgggctcgccacctcattgaattggccacaggcttctacactggcagctactacttcgatggctccctctacaacaaagggtttaaaggtgagcgggaccactggcgcagcggacggaccatctgcatcaagacgcacgaaagcggccagaaagagatcgaggccttcgacgccgccatcctgctcatccgcaacccctacaaagccctcatggctgagttcaaccgcaagtacggcggccacataggctttgctgcgcatgcccactggaagggcaaaggagccgtaccaggatctttgcaaatcttatttcgctcgatttgcacagcatctgtaggagagtggccagagttcgtgaggaactatgccccgtggtgggccactcacacactggactggctcaagtttggcaagaaggtgctggtggtgcactttgaggacctgaagcaggacctctttgtccagctgggccggatggtcagcctgctgggcgtggctgtcagggaggaccggctgctctgtgtggagagccagaaggatggcaacttcaagcgctcagggctccggaagctcgagtatgacccctatactgcggacatgcagaagaccatctctgcctacatcaagatggtggatgcagccctcaaagggcggaacctaacgggtgtccccgatgactactacccaagatgatgcgtccacacagggggagggtagactgggagtcctgaccacgcaggccctggggactcaagacccctggttacccccactcatctgtcctctctttggtctggggacaatccccttggctgctctttgccttcaatgagtttcctgcatgacagaggaggctcaagggaagagattgcccaggcactaccactctgctcacatgttccccccttggcaatgtggggcatcttgtttagggggttctagttacatggactcttttctgtctcctgggtctctgcccccaccactctgggttccatttgtgggagggagggctcatccacatcatggagacttgctggatgccccatggcaattgtcaaggctcttgatgcaagagcccagggggctattgtaaaaacttggccccagatgcttgtcccttctgggctgagatttcgcagcccccttctcatctccacccaagaagtgctggcaccgatgtttaactcaggccaccttctgttctaaagaaagattgctgggaagtttctccgtggccttaggtttctgacatcctggatagtgtggggaggtaatggtgctcacagtaggttaattggagacaccatgtggggccattggtgttatgagccccccaggccacactgcttctcagaaatgagctgcttgcctttccacctccagggcatgaaccctgcccctttctatccatgctgtgtccaggaggtgaccttgagatcctgataccaccttcaaggaacctcaggcaccaacagtgagcccacgaggatggtcacatgccatgtgcagaatttgacttaagagagagccccagtgacacatctctccatggtgggctccagtcagtcttacactgcccttctgacccctacaaatgggtcctttgctatccaggtgagacagcaaaagtgttcttaatcagatggaaccacacccaaaatggacccccactaccttcccagaccatatatctccccttgatcatagtccaacagggccagcttcccttgggggccctttaaggaatggggtgaatgaaattgtgtcatttctatacaaacactgctctcttgatgctgaaatgccaaaccgaaggatttctgaggacctaaatcacggagcatcaatcttacaaagtgttggtccagagtcccatctcttccccaaccctggataccagtagcttcccacccagtccaaacctgcaccatccatcattatgtagatgaaaaagccataggtcatagcctctttgctattctattggagtagcctccctaggcagtccctctgaagccttggagtgcaggtaaatgctcattcccaagtagcaaagagaccatggagaaggtgcgtgtaaagagatatatttttgtaagaggaatatgattaatacattccgccccttggaacctggccatgcaaagcaagggcacagggattagacctgtggcacacttccccaattccctcatctgtaggatttgggctgccccaggcccacccagggggctctgaatgtattttgtaccgtgtttctttcccccaggagaatttttagtcttctttcatgaagcagtggaggggttggcctcccttctactgggaggttgactctctctgggagactcttggtccaagacctgggtcagttctttgctggtggtcccctctgaccacaagcttctgcctgaagattcctcaggtcaacaccatcattaaatgcgagttttgttgatgattctaaatgtggta

SEQ ID NO: 24153 - DNA, 4283 bp, Homo sapiens
cactttcccgctggaggcgcagaggatgccccttgagccagacctggagaaatagccccagggcccggcaggaggagccttggtggcgagaaaggaaatccaggctcccctttccttaaagccactgcagcagctgggaaggcgcccacagagcgggcgcgccaagcgggacgcgggagtcgcagagagggaccccgggcgcctgctgagctcagctggcagagtttgcaagtggcggagacccttcaggtggcatccctgagtcctgatgcctgactggatggaggcccaccagcttctgttcccatgaggtagaaaggccaagcttggtcttcagctggggaagaggccagaaacaaggcccccagtgaaataacccagatccattggcctgaggagcagagaaagggcaagaagtgaactgcagctgctggtaaccctcagaaaccttctccaagtgctattctcacagttctttaggaacactctgaagtgaagaacaatatgtaggaaaatgggaccaacttatgtgtgttctgagcctcaaaacccccttgttggcccaaagaagctcaccttcagtttgggagggctggtaagctccatcctttctcatggcctcagccaagcattgaacttgccctccccttctggccttggtgatcactttttcaggaagagtgagactgaggacccccaagtgttccatccctaaggaaagcttgggaaaccaagccccttccatcctctcccaagcaccccagccaagccccagagagccagtccggaatgatcccactatggccaagctctggttcaaattccagcggtacttccgccggaaacctgtgcgcttctttaccttcctggcactctacctgactgctgggagccttgtcttccttcactctggctttgtgggccagcccgctgtctcggggaaccaggcgaaccccgctgctgcaggaggcccagctgagggtgctgagctgtccttcttgggtgacatgcatctgggcagaggtttccgggacacaggtgaagcctcaagcattgctcgcaggtacggaccctggttcaagggcaaggatgggaatgagagagccaagcttggcgactacggtggagcctggagccgagccctcaaggggagggttgtccgggagaaggaggaagagcgagccaagtacatcggctgctacctggatgacacccagagtcgggcccttcgaggagtgtccttttttgactacaaaaagatgaccatcttccgttgccaggacaactgtgctgaacggggttacctgtatggcgggctggagttcggcgccgagtgctactgcggccacaagatccaggcgacgaacgtgagcgaggcagagtgcgacatggagtgcaagggcgagcgaggcagcgtgtgcggcggcgccaaccgcctctctgtctaccggctgcagctggcccaggagtcggcccgcaggtatggaagtgcagtgttccggggctgcttccgcaggcccgacaacctttccctggccttacccgtgacagctgccatgctgaacatgtctgtggacaaatgcgtggacttctgcactgagaaggagtacccgctggcagctcttgcaggcaccgcctgccactgtgggtttcccaccacccgattcccgctccatgacagagaggatgagcagctctgtgcccagaagtgcagcgcggaggagtttgagagctgcgggactcctagttacttcattgtgtaccagacacaagtccaagacaaccgttgcatggacagaaggttcctgccaggcaagtccaagcagctcattgctttggccagcttcccaggtgctggcaacacgtgggctcgccacctcattgaattggccacaggcttctacactggcagctactacttcgatggctccctctacaacaaagggtttaaaggtgagcgggaccactggcgcagcggacggaccatctgcatcaagacgcacgaaagcggccagaaagagatcgaggccttcgacgccgccatcctgctcatccgcaacccctacaaagccctcatggctgagttcaaccgcaagtacggcggccacataggctttgctgcgcatgcccactggaagggcaaagagtggccagagttcgtgaggaactatgccccgtggtgggccactcacacactggactggctcaagtttggcaagaaggtgctggtggtgcactttgaggacctgaagcaggacctctttgtccagctgggccggatggtcagcctgctgggcgtggctgtcagggaggaccggctgctctgtgtggagagccagaaggatggcaacttcaagcgctcagggctccggaagctcgagtatgacccctatactgcggacatgcagaagaccatctctgcctacatcaagatggtggatgcagccctcaaagggcggaacctaacgggtgtccccgatgactactacccaagatgatgcgtccacacagggggagggtagactgggagtcctgaccacgcaggccctggggactcaagacccctggttacccccactcatctgtcctctctttggtctggggacaatccccttggctgctctttgccttcaatgagtttcctgcatgacagaggaggctcaagggaagagattgcccaggcactaccactctgctcacatgttccccccttggcaatgtggggcatcttgtttagggggttctagttacatggactcttttctgtctcctgggtctctgcccccaccactctgggttccatttgtgggagggagggctcatccacatcatggagacttgctggatgccccatggcaattgtcaaggctcttgatgcaagagcccagggggctattgtaaaaacttggccccagatgcttgtcccttctgggctgagatttcgcagcccccttctcatctccacccaagaagtgctggcaccgatgtttaactcaggccaccttctgttctaaagaaagattgctgggaagtttctccgtggccttaggtttctgacatcctggatagtgtggggaggtaatggtgctcacagtaggttaattggagacaccatgtggggccattggtgttatgagccccccaggccacactgcttctcagaaatgagctgcttgcctttccacctccagggcatgaaccctgcccctttctatccatgctgtgtccaggaggtgaccttgagatcctgataccaccttcaaggaacctcaggcaccaacagtgagcccacgaggatggtcacatgccatgtgcagaatttgacttaagagagagccccagtgacacatctctccatggtgggctccagtcagtcttacactgcccttctgacccctacaaatgggtcctttgctatccaggtgagacagcaaaagtgttcttaatcagatggaaccacacccaaaatggacccccactaccttcccagaccatatatctccccttgatcatagtccaacagggccagcttcccttgggggccctttaaggaatggggtgaatgaaattgtgtcatttctatacaaacactgctctcttgatgctgaaatgccaaaccgaaggatttctgaggacctaaatcacggagcatcaatcttacaaagtgttggtccagagtcccatctcttccccaaccctggataccagtagcttcccacccagtccaaacctgcaccatccatcattatgtagatgaaaaagccataggtcatagcctctttgctattctattggagtagcctccctaggcagtccctctgaagccttggagtgcaggtaaatgctcattcccaagtagcaaagagaccatggagaaggtgcgtgtaaagagatatatttttgtaagaggaatatgattaatacattccgccccttggaacctggccatgcaaagcaagggcacagggattagacctgtggcacacttccccaattccctcatctgtaggatttgggctgccccaggcccacccagggggctctgaatgtattttgtaccgtgtttctttcccccaggagaatttttagtcttctttcatgaagcagtggaggggttggcctcccttctactgggaggttgactctctctgggagactcttggtccaagacctgggtcagttctttgctggtggtcccctctgaccacaagcttctgcctgaagattcctcaggtcaacaccatcattaaatgcgagttttgttgatgattctaaatgtggta

SEQ ID NO: 24154 - DNA, 4480 bp, Homo sapiens
cactttcccgctggaggcgcagaggatgccccttgagccagacctggagaaatagccccagggcccggcaggaggagccttggtggcgagaaaggaaatccaggctcccctttccttaaagccactgcagcagctgggaaggcgcccacagagcgggcgcgccaagcgggacgcgggagtcgcagagagggaccccgggcgcctgctgagctcagctggcagagtttgcaagtggcggagacccttcaggtggcatccctgagtcctgatgcctgactggatggaggcccaccagcttctgttcccatgaggtagaaaggccaagcttggtcttcagctggggaagaggccagaaacaaggcccccagtgaaataacccagatccattggcctgaggagcagagaaagggcaagaagtgaactgcagctgctggtaaccctcagaaaccttctccaagtgctattctcacagttctttaggaacactctgaagtgaagaacaatatgtaggaaaatgggaccaacttatgtgtgttctgagcctcaaaacccccttgttggcccaaagaagctcaccttcagtttgggagggctggtaagctccatcctttctcatggcctcagccaagcattgaacttgccctccccttctggccttggtgatcactttttcaggaagagtgagactgaggacccccaagtgttccatccctaaggaaagcttgggaaaccaagccccttccatcctctcccaagcaccccagccaagccccagagagccagtccggaatgatcccactatggccaagctctggttcaaattccagcggtacttccgccggaaacctgtgcgcttctttaccttcctggcactctacctgactgctgggagccttgtcttccttcactctggctttgtgggccagcccgctgtctcggggaaccaggcgaaccccgctgctgcaggaggcccagctgagggtgctgagctgtccttcttgggtgacatgcatctgggcagaggtttccgggacacaggtgaagcctcaagcattgctcgcaggtacggaccctggttcaagggcaaggatgggaatgagagagccaagcttggcgactacggtggagcctggagccgagccctcaaggggagggttgtccgggagaaggaggaagagcgagccaagtacatcggctgctacctggatgacacccagagtcgggcccttcgaggagtgtccttttttgactacaaaaagatgaccatcttccgttgccaggacaactgtgctgaacggggttacctgtatggcgggctggagttcggcgccgagtgctactgcggccacaagatccaggcgacgaacgtgagcgaggcagagtgcgacatggagtgcaagggcgagcgaggcagcgtgtgcggcggcgccaaccgcctctctgtctaccggctgcagctggcccaggagtcggcccgcaggtatggaagtgcagtgttccggggctgcttccgcaggcccgacaacctttccctggccttacccgtgacagctgccatgctgaacatgtctgtggacaaatgcgtggacttctgcactgagaaggagtacccgctggcagctcttgcaggcaccgcctgccactgtgggtttcccaccacccgattcccgctccatgacagagaggatgagcagctctgtgcccagaagtgcagcgcggaggagtttgagagctgcgggactcctagttacttcattgtgtaccagacacaagtccaaggtgagctaggcccttccccagtggaccccagatgcactcccagtggcttccctcccagacgtgttcctgccagtccatcccacacagcctgcagcaaggagaaaaccatgcaagccagagggcagggctgatgaactccaccaggcttagagttcctggatgggcaacagaaggaattcccagggtgggaagcgttctgatgacccatctctatccctcatcactgaggacccttggtggctcctgtagtgagactgaatgagaagagagactgagtctcccactggctgcaacacagattcactgtgttatcccggacaagtcatttcccctttctgggcctcagtttttccatctgtaaaatgaagctgtagactgttggcctccagtgttccttccaattctaagattttgtcattttatctataagttcttccttcttctctctccctgtctcactcatcctttccacttctagtcttcttcctttgctagcggaatccacacttactgttatctcctcttctgtctcctggggctaccagacatgatgataatgatggtgatgatgatgatgatgatgatgatggtgatgattatgatgatggtgatgatcataatgatggtgatgattatgacgatggtgatgatgataatggtgatgatagtgataagagtgacgctgatagtgctgatgatagtgatgatgaaagtgatgatgacgatgatggtgatgagaaggaggaagaggaggaggcagcaacacttggagtttcttgaggtcttactctgtgccagactcagtgttgcatccttcatatacatgttttcattaaatcccctcaactctctatgagttgggaacagtcattatgccctctttactgtggggcgggggaggggattgagactcagaacagttgaggaacttaccttaagtcatactgtttataaactttcccaataaaacccgtttctcctgaccgaggtatcatgaagggtgggtggcacttggatggggattggggggcatcccttgctaggacactcagcccaaaggaagcccctgaaggatcacctcaatatctgaatatattgaccatctactatgtaccagtccttatgccgagcctcatctcattcagtgatgtgaagtccacagtaaacctatgatcagggcagtatcatccccactttacagatgacagaactaaaattcagagagattgggaactggccacagttatacatctacaaaagcaatttgttttcaggtgtctgactccaaagcccctgctagaaacctttgcccatgctccagtgacactccccacagtctggagagccaagaaaacaccacttggctagacctcctccttctcatttcccagtcaccaagctgccatatgtggtagagcaggttgagcattgcactggcacagccaacagaaaaagtggtgcctaaaagccagccacatgttgtgtgccctggatggcagaacatctgtccagaggaaggagtgggcacctttttctgatttgcacaaaagtgctgtatgagctagtggcagccccaccaatagcctgtccctgtttgactgatggggtaccagtggtgatcaactgtggctgtttctatggtagctaaagtccttctgagagcctagtgagcatgtggctcttggacctatttacagtccgatggggaaggatgggtttttgttagctttcggggaagtgctggttagtctgtgcagagctgtgctgccttagcctgcaggggaaagtcatacacagattaattaccctgtgatcatgaatggctttgaggtggccagaacagacactggagccttttcaacgcagataacaattccctaattgatgaatttgctcattcccagtgccctacccccaggccattactagggcttccattttgccacgtcactcttgcagtttctacacactggggaggtttgacagttatgtggctcatcagcctgccaagagcctggcccaccaggactgacatttattgagcacctactgtgtgctaagccctgatgccccttatgggataattattgaacacttgctctgtgccaggctctgtcaaatcttttacctgccttaaatcatctaatcatccaaacagtccagttgcataagcactgttattaccattttacaaatgaggtaacttggcacagggaggttgagtaacttggccaaagtcaaacagctctgacatggcagtgtagggatgcaaacccaggcaatctaggtcccaagactgcactgtcaaccctagcttctcaaaatacattgtgaaaaattcacactcattatcccacataattgtgtaaggtttattagccctgttttataggtgaggaaactgaggcttagtgaggggaaagccttgttccatgtcacacaggtaggccatgacagttctggatggaaacccaggtcggtctgattccaaaactgcatataatactgcctgcaacagttgcttaatgtatggggcttaggaaccaaatcaactttctttatagcattgaaaaccacaacttttaccttcgggttggccttggcctcccaggaaatatttgaatagagaattctgttttggggggacattaaggagcctggtctgccccacccgacctatcaacccaacattttgctctgg

SEQ ID NO: 24155 - DNA, 465 bp, Homo sapiens
tgcaaatggagctgtattaggtcccacaaacttggtggcctaaaatgcatcagaagcttactctctcacagttctggaggccagaagtttcaaatcaaggtgttggcagagctgagtttcctctggaggctctagaggagaatccatccttgcctcttccagctcctggttgccccaggcgttccgtggcttgtggtaacaaaattccaaactctttctctgtcttcccatgggccttcctctctgtatgtctctgtgtccaaatttccccctcctttctcttacaaagatgtgagtattaggatttcgagcccaccctaaatccaggggagaactcatcttgagctcttaggatctctgcaaatctgcgaagactctttttcgaaatcaggtcacattcacaggttccagagggtaggacttagatatatctatcttttgggggggccactattcaacccacca

SEQ ID NO: 24156 - DNA, 365 bp, Homo sapiens
gaatcagatagcatagttctaattctggtgctactaatgactagatttgagactttcgttaagtcattctaaacctcagtttttgtgtgtgtgtgaaattggaataatgcttacctattcgccaaggttgttatgaggccccaaagggttttgtaaatgtttaaacagagttagattgtttcaaaagtctcttaaagtggtttctctgcttgtttttttgtcctcagacatcgtttctcctcatggtagctagagtaattttttcaaaatgcaaaatcatattgtgctgttggttacaaccttacaatggttttccattattgtatttgagtaatatcctcattatgctataggtaccactcttg

SEQ ID NO: 24157 - DNA, 420 bp, Homo sapiens
accccatggtaaaacatattagcatagctaccttcaaatgacatgggttccctgactggcatttgtgtagtagagatgttcaatgattgaaacaattttagggccttgaatatcatgatagccttactactttaaaaaacaagaatttgacattgccagactaatattcctgtatggaattcactaaaagaacattctcctttagaatgaaaaatgactctgcaaagtagtcttttaatatggttagttcttctgtgtcttactagggtaagaatttcagtcatcaaaagggaaagaaattttctaaataatggattatttcaacacaggaaaaggccagatattttatctggcaaacagttttttttttttcccctgcaatttcatctgtaaaaaacaggtaaagttttattattagat

SEQ ID NO: 24158 - DNA, 331 bp, Homo sapiens
tactcaatattataaataacttatcactgtatgtctttttatataaattgcatctgtgacaatttcctgaaattgctggttgaaaggaaaggctcatttttaaagctatgttttgccatgttggcttctagaaggattgacccagtttgtactttagcctgtagcggatacaaatgtctatttcacataactgcatttcatatttttttaaatatccttggcattttgagaatcaaaaattagtatctaggctgaggcggatggatcatgaggtcaggagatcaagaccatcctggctaacatggtgaaaccccatctctaccaaaaaaaa

SEQ ID NO: 24159 - DNA, 1095 bp, Homo sapiens
aggatacttatttccataaaagtattcgagaccttaaaatcagttaccaaaaaatgtcatttccatccattccttgagctaattctgcatctctaaagaaaaactcaagcgcaagactttctattcttgatgttgagggcatgtctctgtttaaatgaaactagtgcttcagatgcttttattacattatctcacagtgactcaaataatgtgtatatgttggggatggccttatgatcatagacgatcagccattgaactcaataaggtgagaatttttaagtgggggatcaattaaatgttgaaaactgttaataataagccagtttgcaaagtagtagtcaaatgccacaggtcactttctttttctaattttctcccggttacatttttgtctctggaaaattagaatggaaatatctgcagatccctaaagaatcctatatagtacaggcttggattccttaattagtgccttggaagccagctcagcccttcttcaacttaactctttaaaaaaagaagtctttttaattcgtactacactcagaatggagggcagtccacttttcaacaagaaataggtatcattgaattctaacagatacataagcacagataatatcacattcttcatttcatctcctttataaatttctaagctagcagtctttcttggatactctccagcatcttttaaacataggccatttatcatatttcatagttggaatgctttctgttgtctgttctaggtagattccccttaatcttagattctaaaatggtgatgtttccaattaaacaatacccagaataataggtacatagtgactggcaatagtcagtgatgctgtgtgtgattgtgtgttccccttctatcatttttttaatgtttgtttaatgccatttattttttaagatgggatatatattttaattagctgggcgtcgtggcgggtgcctgtggtcccagctactcaggaggctgaggcaggggaatgccgtgaacccggagggcagagcttgcagtgaaccgagatcacaccactgcactccagcctgggcgaccgagtgagactccatctcaaaaaa

SEQ ID NO: 24160 - DNA, 790 bp, Homo sapiens
aggatacttatttccataaaagtattcgagaccttaaaatcagttaccaaaaaatgtcatttccatccattccttgagctaattctgcatctctaaagaaaaactcaagcgcaagactttctattcttgatgttgagggcatgtctctgtttaaatgaaactagtgcttcagatgcttttattacattatctcacagtgactcaaataatgtgtatatgttggggatggccttatgatcatagacgatcagccattgaactcaataaggtgagaatttttaagtgggggatcaattaaatgttgaaaactgttaataataagccagtttgcaaagtagtagtcaaatgccacaggtcactttctttttctaattttctcccggttacatttttgtctctggaaaattagaatggaaatatctgcagatccctaaagaatcctatatagtacaggcttggattccttaattagtgccttggaagccagctcagcctcctgagtagctggggttacaggcatgcaccaccacgcctggctaattttgttttttgttttttgtttttgtgtagacagggtttctctgtgttggtcaggctggtctcgaactcctgacctcaggtgatctgcccgcctcaggctcccaaagtgctgggattacaggcgtgagccaccttgccctgcctaagatgggattttttttaaagctgttcatttgtggaatgtggatgttctagaagttgtagaacagtgatgttcatgtatacaatcctgtcaaacaatggcagtttg

SEQ ID NO: 24161 - DNA, 453 bp, Homo sapiens
tgagatggagtctcacactgtcgccaggctggagtgcagtggcacgatctcagctcactgcaacctccacctcctgggttcaagtgattctcctgcctcagcctcccgagtagctgggattacaggtgcccgccaccacacccagctgatttttgtatctttagtagagatggggtttcaccatgttggcaggctggtctcaaactcctgacctcaagtgatccgcccacgtcagcctcccaaagtgctgggattacagatgtgagccaccgcaccacgctgagtcataatttttaagattttatcagaaaaacttaaacacaatgaattctcctgtgtcctaaaagcttaatatgttgattattacatactggattatagggttataatttgataggatttggcactagctgtctgatttggactgtttttaagatgttccttatatgtgta

SEQ ID NO: 24162 - DNA, 294 bp, Homo sapiens
gaactcctgacctcagttgatccacccacctcagccttccagagtgctgggattacaggtgtgagccaccgcacccggctgtgtgttttttttaatcctaattcttcctttctctccttagaacaaaccccatcatgaaatttgtggatgcccttcaggtctgtgctttttatgcttgtattacattttacatccatgaaaacaatagatagtattatttttgcgtattttttaataaaaaaagtattgcatatattctgcaacttctcttttttttaaactgaagattatatt

SEQ ID NO: 24163 - DNA, 661 bp, Homo sapiens
gaagaaactgagtcagaccaagtggtttacccaaggtcacacagctagtaaatggcacagttggaatttgaaccagccagtgtttcatctgctatattatgccatattatgcttgcgttctctctgaaaggacaaaactctcacatgaaacaatgaagacactcaatgtggtgttcactattaggttgaaccacatgcaggtgccatttttgtaggtcagtgtggtcaattatcagcagtgtcccatgggtcagcctaatacagcagcagccggggttcggacagggaaacctctctgcgcaggaatggtcagtagaggtttcatggcggagctgggaatggagcagggccttgaaggctctgtagactctggatggatagaaatgaggtgggagaggctgggtgcggtggctcagcgtctgttaatcccagcacattgagagtgcgaggcgggcagatcacttgaggtcaggaattcaagactagcctcaccaacatggtgaaaccccgtctctactaaaaatacaaaaatttgccaggtgtggttgcgcatgcctgtaatcccagctactcaggaggctgaggcacaagaatcacttgaacacgggaggtggagtttgcagtgagctgagattgtgccagtgcacttcagcttgggcga

SEQ ID NO: 24164 - DNA, 351 bp, Homo sapiens
gacaaagaattagctgggcgtggtggtggatgcctctaattctttgtatttttaatagagacggggtttcaccatgttggccaggctggtcttgaactcctgatctcgggtgatccacccgcctcgttctcccaaagtgctgggattacaggcataagccaccgcaccgggctggcagtttcttaaaaagttaaacagccattctacttctagatgtatacccaagagaaagaacatatatattcacacagacttgtgtgtgaatgttcatagcagctttatttgtaacagcaaaaaaactgcagatgatccaaaaatccatcaacattttaaaggtagaaagctgagaaa

SEQ ID NO: 24165 - DNA, 608 bp, Homo sapiens
tagaacatatttagaaatactgttcctctgtttacagttcaaaattaaaacttaagaaaaatttttccatgtttattaccgaatataaattaaaaactataattatatttgtatagcacttagaggttggaaggtgattttgctgttacatttaatcactatattatgggaaatgagcattaaatgtgaattttaaataaggcaagacatgaaaaatgtatgagtgattgaaatcaaagtagctaagtaaagttgcagagttatccaaaatgttaacccacagttctggttggagtgaatttacattattctaattcaatttgtcataccatctgttaggaatttgataaggagaataaacccattaaactctgagctttggatttatcgttttaacaaggggacagtgtctgctgtttataaataattttcaattaatgtatcttatttctggtagctctttgctgttactgtctgagttgtacaacagtaaggcaaaataatgatttgtgtgtacccataaatctgaatctcaaaatgaaagcgctgtggttgatttcaccataattttaaacatattccttcaataaatactaactgagcaacta

SEQ ID NO: 24166 - DNA, 330 bp, Homo sapiens
cttctccgtatgtctctctatgtgtgctgtttgggcttcctaacaatatggtgactgggttttaaaagtaagtatcctaaaagcgcaagaaaaaaacgcacggctatttgtgattctgcttcagaaatcattaaaaaaaaaaatagggtctcattgtgttgctcagggtagtctcaaactcgtgtgttcaaacaatcatccccctcacctctacccccacctgggcctcccggaaaaaccaggattccaggtatgggccaccatgcctgggggcatcactttaaccatactctattggtcaaggctgtcacacagatctgcctagattca

SEQ ID NO: 24167 - DNA, 304 bp, Homo sapiens
agtttcactgctgaaaacattctgactcttgttagaacagaattttcctcctccaagagagatggttatttagacatgacattgtttgaaattagggcaaaatcatgtagtgttttaaaaaagtactcaaatatacagtgaaaagaaagccaagctgtaacgcattaatcagaacttattcatgctggctgggcagggtggctcaggcctgtaatcccagcactttgggaggtccaagtaggcggattgcctgaggtcaggagtttgagaccagcctggccaacatggtgaaaccccaactcta

SEQ ID NO: 24168 - DNA, 394 bp, Homo sapiens
gtgcttgacaacaaaactcatgctatatttcttccctaatcttagtttaaatacatataatcattgtattgttatctttcctacaagtacttgtttcaagtaaggtaacatattttttttgctgcctgagatataatgtcaaatacagagtaccaggagcctggggactttctatctactctaaaagaacatattctactcttcactatggatttggtaacatttcctttattaaagagttgcctcctttatcttgactttaattcactttcaattcatccatccctacaaaatattcaagaaagaaccatttctgtatagaaattaaacacaaattattatcaatactggaacggctattttctaccttcataaatgtctaaggttgtgattt

SEQ ID NO: 24169 - DNA, 226 bp, Homo sapiens
ccaagataaaggcagacagagagaatgagagagatgagacagagacacgcagaaactaacaagggggtcagagaatgaaagagagacagaaggacacaggagctcccaaaggccaaatccaggaagatcagagcatcaaaatacatgatgataggaatggcttaaatgcgtctttgctgacgatcagaaatgcagtcatcgccacataatgacagtggtcccataa

SEQ ID NO: 24170 - DNA, 1491 bp, Homo sapiens
ccatttttgttagaactttctgatggctttactaagatgtcaggttttgtttgaggactgaatttgacatatatgcaagatatttatttactgctgctgccttgggtctccaggttctacctaggaggtatttgctgttccattgcagcatagggaaactgttcaagcacacaatgtgaatgttgagatcatgtgcagagaggccagtaccaaaacttcagtatctggcccaatggcaagaggctactgttaggtttgcatttgggcagttagaacctcacagataccagctcccaagttgctagtccatcagtgtaaactgaacacaattctctcttgctttctctctctctactccctcacacatttggaccttgtcacttggtgtttaagcaccttgcctatcaacaaaatctgatgagcagccccatggactctcctgtaataaggaacttgctctactattttattcttttaatgttttagtatttgatattggactcaaatgaaagggatctcattctgtggctgaaaaatcagacttcatatgttgaagagagcaaacttggggactcaactcagaagacatgtgttgcctgaaacctgcatataataatttttgatttgatttagtaagtgtggatttttcttaatctacagatttggggtttggggtttagatcatgagaacaccgtttataccttcacagccaatgatttatttttagtcttgaaatatttctccatatctgtttttgtgtcacctgtgggttttatcctaggggttgggatcctgattttaacattttgtacttgtccaaaaaagagttcaaatgctgggtttgttcccccagcctcggccaaggggttctcagaagattctaaccaaagctggagataggtctgctcattttccttctgcccagaagtggatgttggccaggaaaattacaccttgtgtcttctctgatgctccaaccagggacctctccagattactatctagcacagactagtgctacatctgcctaggtatgggctttctctggcagcaggggtctctctagggaggctgagagacccatgggtctcccttcaggggaagtgttcaggggagttcaaactgaacacttctctccagctctattcctatcttcctaatctaatggctctacaagatagtcatttccagtgctacagatgcaccagggcaccacctctttttttttctaggtagaccttgttctgtagctgctgtgaagaagctgcagccctgaactcaggtcatactcaggaacagcagcaggggtgtgggtggggtttgagggaaggtactctgaattcaccttcatgtttaacctgttccatctgacttgggtttcttcattatattgttccctcccactcaccttcacttctgtattacaacaatatagactttactctaaagccaatttcatggaagttattaaatgctacttgaatgtgtgt

SEQ ID NO: 24171 - DNA, 337 bp, Homo sapiens
taggcagagctgcccactcctgccactggcaccgcttgccccaggggacctaagctgcagatgtgcatggtgattgaatcatttctgcacaccactgctcacacagctccccggggacccccacttgcctgtgcaagctgtcatgagatgtgtgtgctcaagtgcatctgtgttggcatccagcatgtgcacatacctgctgtgaagtatgcaaggggtcacatgtgtatgtgcctatgcacacgtgtgctgtgcagacgcctctctctgggtgcgtgtgcattatgtggactgatgaactagtgaggcctcaaaggtgggaaataaaacacttgtg

SEQ ID NO: 24172 - DNA, 526 bp, Homo sapiens
agggtgatcagcccttcacccatcaggcctttgcctcagggaagcttgaccccacctttagaccccatgttgggcctgagtagtccaaaggcatatcccattcccctggccagggattagtttagggatagacatgtgaccaaattcagctcaataaaatgtgagtctgcaggggcaatctagaaaaagtgtcctcttccctaagagaaagccacaggagggtaaaaaaatgtctcagaacattgtcctgcctaaacatgatgcctcggacattctgcttctgtcttgctacctgcagcacaaggaaatccaacactgaggggtcacagcagagggacggaaagcacctggatcttacaacattgttgagctcttttgtctcttgacttctagttatgagatgtaattttcttactgttaaagtcatttctgttccttgcaaccaaaagcattcattgatacactgaatatagtacaatatttattcaatcaataaatgcctggcaaattacccaagtatgagtaa

SEQ ID NO: 24173 - DNA, 554 bp, Homo sapiens
acacaccatacaatttacttacttaaagttcaaaattcagtggtttttagtatatccacagagccgtgctaacagcaccacaattacaaacatcaccacaattcattttaaacattttcattaccccaaaaagaaatcctgcagccatttgccgtcagggcccattttccctcagtcacccgtatccctagggcaaccactgatctgctttctgtcaccgtagatttgcatgtcctggacattccatataaatagaaccatataatatgtagtcttttgtgactggctatatgggtttttgcacttaggataatgtttcaaggtttgcccatattataacatttatctcatttcttattatggccaaataatattccattataggataacaccacattttatttatccattcatcagttgatgaatggataaatatggatgatatttaggttactttcactttaaactcttattatcaataatactgaacatttgtgtacaagtttttgtgtagacatactgttttcatttctcttgggtactggcagtggaat

SEQ ID NO: 24174 - DNA, 151 bp, Homo sapiens
gctacttcaagatatatacacttatgaatgttcatagcactgctattcataatagcccaaaggtggaaactgtccaaatacccatcaatagaagaatattaataaatagtgggatagtcacgtagtagaatattacacaatgaaaatgaat

SEQ ID NO: 24175 - DNA, 146 bp, Homo sapiens
cttttggtttcttatttatttgaaagtgctctttggtatcaattaaccttttctctgtgataacacctacaattatttccccccggtttgttacttgccttttgatttgcttctagtatttatttttactatgaaagagacttttt

SEQ ID NO: 24176 - DNA, 390 bp, Homo sapiens
gagaagaccaaaatacatcctcatgatgtattactatgatgcaatgatatttatcaataatatgggaaaattcttacagatattataaagtatataaaattgtacatgtgtgtattgtacatatatatacacaaattacaattattatataaaacaaagcaaaaacctgtgaatacaaagaagagactggcataaaatataccaaaatattatagatagtggattttttgtgtatttcctctttaaaatcttcttaaggatcatatattttagatagaacaaaataaattaatcaaactattcagaatatgaacaatgtccctaatttacctagtaggctttcccttcagaatgtttccatgtatttttattcaaaatttattttaaaaa

SEQ ID NO: 24177 - DNA, 328 bp, Homo sapiens
ccctgtgaaaaaaacttatatttttttttcctgaaaaacaatggaattcaatgaaaagttatacgggataagaggagaaatctagatccctaaacaacattcagaaatggcttccagctgttgtaaatatcacctataagttgtttacaaagctagatgtaatattttgctcccttgtaatgacagtgatttttttttttgcccagtctttctcagaatgaacatggtgttgatttgttattactcttttactacttaatttttgaggtatatgatacaaaaaagcaatcaatgtagcaataaactagctttatcaaatattaataga

SEQ ID NO: 24178 - DNA, 451 bp, Homo sapiens
aactagtaaaaaacagaataacctgaaagttggttaatttcttatagacccacaatgtggccattatgtttttaaagaatttttaatagcataggaaggaagaaatacaaaaagtatgagaaagagcaatacagagtatcatgaatgctacagtttcactggttgtaaaactgcttttcaaatgcatagaatatgctatgcatatatcctaccagacatacatgaattgtctttaagaaataaataaaaattaggtatgtagcatagaggaagaagacctaaaaactaggaggatagcaaatcattagaatatttactaagtgaaagcagaagaaaaatagtatttgtgctttagttcataggtgaaatttgttgaggaacaaaaccattgcccaatatttttctttgtatggagaatcttcctggtacattttttggatgaagtatagtt

SEQ ID NO: 24179 - DNA, 577 bp, Homo sapiens
ctctcatgtttactgcgggactactcacaatcgccaaaatacggaatcagcctctgagttcatcagcggatgatggataaacagaacgtggtgtgtatacacagtggaatattattcagccatacagaggaacgacagcctgttatttgtacaagatggaactagggatcattatgttaagtgaaataagccaagcacagaaagacaaacattgaatgttctctcccacctactaaaaaagtagctctcgtgaagacagagggtagacgcgtggttaccagaggtggggaaatgtagcggggagagggggagaaagagaagttgattgaagggtacaaatacgtggtttgatagaaggaataagacctagtgttacatagatcatagttggcaattgcctactgtatatttcaaaatggctagaagagaagaatcggaacggttctagcataaagcaaaaacaaatatttaaggcgatagatattccaagtaggctgatttgattttcacaattatatgaatgcattaaactatcacatgtaccctgaaactatgtacatctattatgcatcagtga

SEQ ID NO: 24180 - DNA, 435 bp, Homo sapiens
ctctcatgtttactgcgggactactcacaatcgccaaaatacggaatcagcctctgagttcatcagcggatgatggataaacagaacgtggtgtgtatacacagtggaatattattcagccatacagaggaacgacagcctgttatttgtacaagatggaactagggatcattatgttaagtgaaataagccaagcacagaaagacaaacattgaatgttctctcccacctactaaaaaagtagctctcgtgaagacagagggtagacgcgtggttaccagaggtggggaaatgtagcggggagagggggagaaagagaagttgattgaagggtacaaatacgtggtttgatagaaggaataagacgggccgggcgcggtggctcacgcctggaatcccagcactttgggaggccgaggtgggtcagaacataag

SEQ ID NO: 24181 - DNA, 2308 bp, Homo sapiens
gctggatgaggggctgattcatgtcctgggcatgacagagcgggaggcacaaggtttcatcacactattcacaatggcgagcaagttaaaacggatttcccatttaatttaattttcagacttcagttgaccatgagtaaccgaaaccacagaaagtgaagctggggatatttcagaaattcttttctaatcagaaattctaatcaaacataagtttccaactatgtgttctcttggtcctcagaagtgtttgaatagaaaagtaacaactaacttcccatctttctggtggaagagttaattctgcctggagggttctgcctgggagacatgacagcatgtgtgtgactcctgtgtctgtttctgtggggtcatccctttcgtttcattttgccagggcctggctcaggattttttatggcagtgcctgtgaagacaagcctggccctccatccagtcacacaggaaatccacagagagcatgctgagagcagccagcggctgggctgccatcaggcctggtttatgatgccacaagtgaatggcacgtttgttcctctttatctctgagcattgaaggacttttggttaaaaaaaaaaattaagttcagagtaatccttttcatggaagaatcttcaggtcaccaaagaattgaaattttaagccccagattgtactgagctgtacctgtgggaaaaggaatggccagggtattgatgatggaaaagattcaaatgaggagttagaaggcaagccctctgtgggcagccgtcttccagaaacctcgaacttatgtctgtctccacctgagaaaggagaagaaaagctggtggtgacccctgctcctgctgggccatgccatggctctgaagatgccccgtgttcttaggaggtgctcacccctggcacctaaagacatttccttctggttgttgctctttaaaaacaaaataagcccctgaacgtgcttgcaggccagtttgtgtgcctgcacttgacgaattaccttgaccaacgggccaaaggcacagagctccaaggcatcatctttccttaaaatcctgagtgtttattaaaaagggacatggtctctaggtatcttattacatttgtatttcttacatttgaaatatcctaaccgctcccttcggtttcttcttaagaacatttacatctaattatttttcgtgcaagtcttgtaggacccacatgttttcctagctttggaaatcgatttttttcattcctcttatgaggatttccctatgtcagtaaacattaactttctatttcttccatttttgctcatttgaaacccctgctgcttctagatctatttctttgcacttgtataactttgaaataaattcctcatcccttagactaagagagtgggtgtctgtgaaaattgttttctccttcataatacctaaattctagtttgtcagtaaaatatttgtgtttggttaacaagctcttatttaagccattgagttagtataatctttattacctttgaaaaaccagagagctgaattttttgtcattctaagttgtaagtaacactgcagtcaagtcttctgatgaaatttccatatatcaaattgaaaataaagcaaaatatatttattactcataactaatatactttcacatttctctgattatttgtaagacatttcagcatgtggatgtggggaagggtgagcctgccccagaaacatctccctgctgccaccatggccacggctcggcagtctcccttcactgactcctgaaactccacgtaaatctaccatcacccaccccttctttgaccgttccctgcaccttcttgctcacagaaagctggtgtttcccccattcctcggtgcatagagccgacacccctcacattcttggcctgtttccaggctgttgtagttgcttcagcacgtggtggtgcacaacacccattcgatcgtgctcatagattctgggcgttgagtccaggcaaggcatggcaggcaccacctgtcccggctcccacgtctgggcttggctggaagacctggagtcagacgagtcttcgttctcgcctgtatctggctcatgctggctcttagatggggcttgtgtctctccatgtgagcctctcattggtcctgaagactagttaactgataactggatggtaactggattctgaacacaagctttctaaaggctaaagagccaggtagaagccatgttactctttatagcccagcctccgaagtcacagcatccagcatctcttctgccatatcctgttcatcaaggcaaaca

SEQ ID NO: 24182 - DNA, 2254 bp, Homo sapiens
gctggatgaggggctgattcatgtcctgggcatgacagagcgggaggcacaaggtttcatcacactattcacaatggcgagcaagttaaaacggatttcccatttaatttaattttcagacttcagttgaccatgagtaaccgaaaccacagaaagtgaagctggggatatttcagaaattcttttctaatcagaaattctaatcaaacataagtttccaactatgtgttctcttggtcctcagaagtgtttgaatagaaaagtaacaactaacttcccatctttctggtggaagagttaattctgcctggagggttctgcctgggagacatgacagcatgtgtgtgactcctgtgtctgtttctgtggggtcatccctttcgtttcattttgccagggcctggctcaggattttttatggcagtgcctgtgaagacaagcctggccctccatccagtcacacaggaaatccacagagagcatgctgagagcagccagcggctgggctgccatcaggcctggtttatgatgccacaagtgaatggcacgtttgttcctctttatctctgagcattgaaggacttttggttaaaaaaaaaaattaagttcagagtaatccttttcatggaagaatcttcaggtcaccaaagaattgaaattttaagccccagattgtactgagctgtacctgtgggaaaaggaatggccagggtattgatgatggaaaaacctcgaacttatgtctgtctccacctgagaaaggagaagaaaagctggtggtgacccctgctcctgctgggccatgccatggctctgaagatgccccgtgttcttaggaggtgctcacccctggcacctaaagacatttccttctggttgttgctctttaaaaacaaaataagcccctgaacgtgcttgcaggccagtttgtgtgcctgcacttgacgaattaccttgaccaacgggccaaaggcacagagctccaaggcatcatctttccttaaaatcctgagtgtttattaaaaagggacatggtctctaggtatcttattacatttgtatttcttacatttgaaatatcctaaccgctcccttcggtttcttcttaagaacatttacatctaattatttttcgtgcaagtcttgtaggacccacatgttttcctagctttggaaatcgatttttttcattcctcttatgaggatttccctatgtcagtaaacattaactttctatttcttccatttttgctcatttgaaacccctgctgcttctagatctatttctttgcacttgtataactttgaaataaattcctcatcccttagactaagagagtgggtgtctgtgaaaattgttttctccttcataatacctaaattctagtttgtcagtaaaatatttgtgtttggttaacaagctcttatttaagccattgagttagtataatctttattacctttgaaaaaccagagagctgaattttttgtcattctaagttgtaagtaacactgcagtcaagtcttctgatgaaatttccatatatcaaattgaaaataaagcaaaatatatttattactcataactaatatactttcacatttctctgattatttgtaagacatttcagcatgtggatgtggggaagggtgagcctgccccagaaacatctccctgctgccaccatggccacggctcggcagtctcccttcactgactcctgaaactccacgtaaatctaccatcacccaccccttctttgaccgttccctgcaccttcttgctcacagaaagctggtgtttcccccattcctcggtgcatagagccgacacccctcacattcttggcctgtttccaggctgttgtagttgcttcagcacgtggtggtgcacaacacccattcgatcgtgctcatagattctgggcgttgagtccaggcaaggcatggcaggcaccacctgtcccggctcccacgtctgggcttggctggaagacctggagtcagacgagtcttcgttctcgcctgtatctggctcatgctggctcttagatggggcttgtgtctctccatgtgagcctctcattggtcctgaagactagttaactgataactggatggtaactggattctgaacacaagctttctaaaggctaaagagccaggtagaagccatgttactctttatagcccagcctccgaagtcacagcatccagcatctcttctgccatatcctgttcatcaaggcaaaca

SEQ ID NO: 24183 - DNA, 456 bp, Homo sapiens
agccactggattcatcctagtggagttaatatagagaattggataactcagaaattacctactgtgtagactggcctgttgttttaagacatattttttcaaatgtgggcaatttgatctttaagtagttatggaaatatatttgggcttcttaaaatctaaaatacccaacattatggaattcatgaacttcccccttttctcattctgatcagtgttgttttattgtactttgatgagcttgctaataatgtgataaaccaacttgaaaatgcattggaaaagaaatgatatataactagcatgcatccaggttggtgtaaaggtggcaaatactttccccagaaaaaagctcaaatggttattttaaaatatgggattgatgtgccactgaagtgattttcgtgtgattaaaaaccatattaagcatggtgtctatagagattgaaaaaaaaa

SEQ ID NO: 24184 - DNA, 344 bp, Homo sapiens
tggtcacccaggctggagtgttatggcatgatcttagctcactgcagcttcgacctccctggctcaagcattcctcccacctcagtcccccaagcagctggtactaccagcgtgcaccacaatgcctaattttttgtagagacagtgtctcaccacgttgcccaggctggtctcgaactcctgagcttaagcaatctgccgacctcagcctcccaaagtgctgggattacaggcgtgagccattactctcagctgggaatcttttttttttttccccgagatagagtctcactctgtcgcgcaggctggagtgcagtggctggcatgattagggctcactgcag

SEQ ID NO: 24185 - DNA, 407 bp, Homo sapiens
ctctacttcagtttttaaatttatgtcttctaaattttagcaatgttaaatcaagtttagcctaaagctgcctccttacatactttaagttcagcctccaggtttctctgtacatggtgaactataacctaaagggagttagactctagcctactcttgagccagttactgagttgtggtcaaaggtggccaactgttcaaactgtgttaaaataaggcagatgccaagctgtaaccaattcggctatttctgtacctcactttcgttttctgtatgtcactttcctttttcagtccataaatcttcctgcacgtggctgtgctggagtctctgggcctactctggctcagaaggctgccgaattcttgaatggttctttgctcaattaaactctgttaaatttaat

SEQ ID NO: 24186 - DNA, 506 bp, Homo sapiens
gccctagccacctgccttttgcttgctcttaggggtgcctgggaagggatgcataggtatatgccatggttagggttttggtaggcttctcgtggtttggtattgatggatgtcttgggcctctgtcagaggctgtttatgtaggacagtctttgcagtctggtcggtcattgctcgagatttcttatgagaaagttgtgtcctctgtaagtctgaggttggggtaaaggcttatcagactcttgttccatggtgtgaaaggccatttgcccaatgaaaagagcttctaagaaacttaagaggtttattgaaaaggatggttggatatactttatgtagattcagtagtttggcaagcatctgagtgttgaattaggctctgttggtccctgtgtctaaggagttcaagaattagctgataagtcagaatgtatgtgaaatggctagagaagaggcctaagacaatatataagcgtatttgtttggaatttattctatttactgag

SEQ ID NO: 24187 - DNA, 446 bp, Homo sapiens
agaagggtccagccagcagacccccaccccccaacccccggatccagggccgcttctggaatcacattagggagaggctggcctggttcagagctcgcccatcctaaacaagataaataaataattccccgctggcctcagtgtgggaggaatcaaagaaccagaacaaatacctcccacagcctccctgcccaccctccaccccatccccggacaggtggggaaagggctgctatgaccagctttgtggccttggtcaagtcacttcctccatccctttttgcctttataaacggagagccttgggctggaagccatggaagtcgctccagtggaaagacaggtcagagctgggaatgaatgggacgtaggagtcactccaaatgagaccaacccagatttggtgggtcagttaagctcatcccagaacattttggacctcgtag

SEQ ID NO: 24188 - DNA, 510 bp, Homo sapiens
tgaaatgacattgaaatctggggacctaaagtgctatgacctactcttgttagaatggggaggggtgtatgagactcagataattataataaatagagttctggcccagatttaactcacagtgtgtctctgttatcagagtcctttctctggttcctagttttgtaattggaatcaacatacatggtagttggcagaattctcaacttggctccttgaccagtttggttaagtgctttcctagtgggggaagatcaagtggaagcctctaaaactgtaccttccctcaccttggaagggacagcatttcttctagtttgggattaacacatattctggggtccacatgtttgctttttctgcccataagtccacagccagcaccactatctgagggacttacagagtgtttgatccactaatacgggatcttgagtaatattgtctcttaccaagagtcgcactttacaggaaagatgtgtagcagtgggccaaagttcatgaatccac

SEQ ID NO: 24189 - DNA, 256 bp, Homo sapiens
actgcaacctccacctcccaggttcaagcaattctcctgcttcagcctcccaagtagctgggattacaggcatgcaccaccgcgcccggctaatttttgtattttcagtagagacaggttttcgccatgttggccggactggtcttgaactcctgacctcaagtgacccatacaccttggcctcccaaaatgctgggattataagggtgttgtcttttaaataaattaagggaaacagctactcttcagtgtgttt

SEQ ID NO: 24190 - DNA, 7929 bp, Homo sapiens
tcactgcctatgacggcttcgttcagtacattccctttgatgatccacggttacgacattttaaactagctcagccccagggtttctgtgaagacataaagcttgacgataaatcatataactccagtcctgtcactgctcaagagccggctcatggaggaatgcagcctgatggtgccatttggaatccacagagcttaatacccccgtcgggggatgagagaggcctggtcttggccgattccagcccccggtggctgtggggccagccccccggggatggggaaaacagtggcctccccaaccagagagaccgctgtgtggcaaggggacagtggcctgatgtgagaggcagccagcacgggcacactggaagacaagtttcctccccttactcacagggcgagagcacctgcgaaactcaaaccaagctcaaaaagttccaaactgggactcggaccaagaaaagttcaaagaaaaaaatgaacgagactatattttgcttggtttctatcccagtgaaatcagaatcacatctgccagatagagatatggacaacaatgacttaaagcccagtgctgatcaaaagaatgggtctgataagagcccggctctgcaagaacagagtctgctgagcatgtcttccaccgacctggagctgcaggccctcacaggaagcatgggtgggagaacggagttccaaaaacaagatctaggggaaccagaagaagacagacaaacaaatgacctcagtttcatccaccttacaaagcacagagaactcaagcattctggctcttggccagggcaccggtacagagatcagcaaacacaaaccagtttctccgaggagccccaaagttcgcagctgctccctggtgcaaagctgggagggccgagtcgtgcagcattgagtccaaaatgttcagaccctgctgcctccgaagctcagacgcacacagcattccctaccggtgatcacaaacagaggccaagtgcccgtaacctgaaaggtcacaggtccctcagcccatccagcaacagtgcgttctcaaggacttccttgtccgtggaccaggcaccgacgccaaaagcaggccgaagtcagccctgcgtggatgtccacgggcttggagcccaccctgggcctaagcgggaggtggtgaagggggagcccacgggcccttgcaacagtaaacaactctttgggcagtttctcctgaaaccggtcagccgtcgtccctgggatttgatcagtcagttagaaagttttaacaaggagctccaggaagaggaagaaagcagcagtagcagcagcagcagcagcagcagcagtgaggagagtgaggcggagccgcagcaggagaaccgtgctcactgcagacaggaggatgtgggcttccgcggaaacagcccggaaatgagggttgagccacagccgaggatgtgggtgccggagagccctgtgtgtaggtcgggaagaggtgagagtaagtctgagagctggagtgaggagctgcagcctggccacccacgtgcctggcctccatccccgggccgctttcgcgtggaagaaggtggcggtgcacctttctgctcagcagatggaagcacgagtgcagagaagggacacctggaggttagcaacggaatggacgagctggcaggtagcccatttcctgtgacgagaatgtcttcaagatcaagtgacgcaaaaccactgcccgcgtcctatccagctgaacctagggagccccaggaaagtccgaaaatcaccagtgctttcagctctgtgaaaccaagtgaagcggtccctcggaagtttgacagtggtggagagaggggggcagggctcccactgtccctgtctaacaagaaccgagggctctcagctccagacttacggtctgtggggctcacccctgggcaagaacagggtgccagtgagctagaggggtctttgggtgaagcaagcacaatagaaatccccccaggtgagtccttgcaagccagggctgcaaggatcctgggcattgaggtggcggtggagtccctcctgccgggcatccggagagcgggacagaaccagcctgctgagcccgatgcaagtgcctgcaccccagagtccccccaggaagagttgctatctcgcccagcaccggcagatgtccccagggtgtccactgatgccttttatggcaggaggaagtgcggctggaccaagagccctctctttgtaggggacagggacagtgccaggcgggctcctcaggcttttgagcactcagatgtggacggggttgtcaccagcacagaccctgtccctgagcctgagcccagccccttggagtccaagttcttcgaacaaaaggatgtggaaacaaaaccacccttcaggtccactttattccattttgtagaaagaaccccaagtgtggcaggctctgaaaagagacttagaagcccttccaaagtgattgaaagtttacaagagaaactggcctccccgcctaggagagcagaccctgaccgcctgatgagaatgaaagaggtgagctcagtgtcacggatgagagtcctgagcttcaggaatgccgactcccaggaggacgccgaggaattgaaggccaccacaaggggccaggccgggctcccgggaggccttgtgtctcctggcagtggggaccgtgcccagagattgggccactcactctctgtgtccaaggacagcatctccagggaagagaaggagcatccggcagcacaaaaggagaagagcatggatcaagacttctggtgcccagattcctatgaccctagcagagtggagagggtgtgatgaaatgccggtggagcttgcattccgttgcgaattgagtattctcaagtagctggtagatttagtctatcagccccacttccccatgtagaagctggaagctgctgagtttttagcatcctgataacattctttaccactgccactaggaaacttgccatcctctcagaattgctttgtggcgataaagcaatcgtccgttgaaaccatctgtttttatagcatgaagatttaatgcctataattaggaaggagttttcacagaaaccctccctcatgacagatttgactaagctggtaaatagtttggtgttgctctcattctgggtgaagatttcaatgtggaagatctagcaaatgctttggaaaggcctgtgaatggtgtgctcccctctgtgtctccatggcctgcagtccatgctcttgtgaaggagtttgggacactggctgttgcccggtgtttcagcactttcagtttaggggaaatgtgaatcaataggtatgatccatttctaatcaatttggccttctgctgctggaagtaactttacttataagtaacttgccatcagagaataaaagcaatatcttttaagttcctgaaaaattaaaacttgtactgtaatatactaagagtattatttatctggcagtgaaatattttgatcatttgcaaacacgccattgtctgctttgcactcagtattatctatttttattttctgtatgggtatttagaaattctttatatgaaaaataattgctggtttaaaatagaccattttaacaaagtgactatatttctttttacgaaaatgctatttttctatgatgtaaacaattgttaggcggcagatttttaaggaagtattattttatttaagagtctgtatccctttgtgtgagaggaacccaaagagggttcacttttgctttaaagctctgtcccttacccactgacaactctgctacttttattttatcttagaaaatgtcaatatagacatatcacagggttaataaaagaaacttttcacaaagatttttgtacaagtgtagctatcaggttatatttgaaaataaccctctgaaaaccagccaacattgtcatgacaatttttgctgccgtatcaactagaattaccaaaaaacatagttttatctttgtatgtgtgtggggatctaccctgagaccatgcttttcttcccaccctgccaccccacccctttaaagaaatacgtatttttatctagaatgatcttgaattagtctctgcatatttttagaaagtgcttggggacattatatatatgccattacaaaagcattatgaggcctatgtattctactgtgtttaatactgcattaacctgcacaaagtttatgcattttttcatgcatttttttccttctttctaagtaaggtattcctgacaactaacattccctaaatcatttcccctccctccctccctcccttcctttcttccttccttctgtcctccctcccttgctacctcttgccctccttccttcaccctgtcctccttttcccttttattttttccccttctctttcattttcttttcttttagagaaaccaccttatctatttttagacatttcgaattcctaaaatgtgaaccgttgggtgatctgtcctttggccctaaaacggctggccgggctgtcccggcctgttctcatctgtaccgtatgattttatttcataataactttatgtatttggactgtaacaaacaaaacagaacctaagtcgccccgaaaaatctttccaagccttttcaaaacacttatctgcagtccagaattcagctcttatgaaaagtgagagtgcactccagttttcacagcagcaataagtgcgggaaacaaaaagatcctcttcccaggaaaagttgagtggggaagagttcagacactgttgtagctggtgaatcattgaagtcacctggtagtaccaaataagggctgaggcgcctggaggtctttgtggggtcttccctctttaaatgcaaacgtaagaaggtatatgtgtatatacatttatatacgtgcacatgtatactcgtacatgtatgcacacatacccatacatgtatatgaactccgttctgatttcctctgaaattttgttgataccatctaaatacctctttgaatcaaaataacttaattttagctcattcctcaagagaaagagaaggatccccaaggaagaaaaactgttgtaccttctgtgattctcaaaccaaaatgtgatgcgcttctgttttgttatcttaaattgttgtatcatatctttctgaaaccattctgaattaagttgaaattttcaacatttatactttaactgttctaaatttaagcctacatgtaaatcttttttggggggaaggtaacttgaaaagtttaacttgaaaatttgacctttaaactttcatattctaaggtaaataatagcctataaccaacaacagctttcccagaggtcttgaatttaacactaattgtttagttattgtttctatttctcatacatacataacttcgttttttgtggctggaagaaaaagtttctatattttgtatttgtctttgttcttctcatgcacacaatttactgttggtgtttaataatttggagctcataaaattaaaagttgtaattttgaccatttgggctaaaaattatatgagggattacatatgcaatggattagtatttcttgatttgcaaaagaagggaaaatgatggtaatttagctcaaattgcctttctttgaagaaaatttctgaatgactgaaaaccaaatatctatattatcactttcaacctcatgtttctgcaaagtacagaaaaactcctcactgacagtgcacccagcccctgactgggttttcaggattatgtccatgtgcataactgcttggatttcttcttttaaagtccctaaaacatgaatctgttctttgagatcctggtttccttagcagagttgtaggttgcgggtttcattcacgtggaaattctaagtagaacttttgctgccccattttactgttggtgaagggccgttgttaatggaagtttacgttttaaaactcagatgactcagaaaccagactgtgatcattttttgcagcagcaaaatgacttattctgacagcatctcggtttggggcttctgaagaaaaaggatgaagctgatctgttgaaacaactactttcccaactcggaggcaaaaggggctgatagaagataacattcacctaccatttcatcttgtgacccccagagatcacgtttgcgtgttctggctgagttttttattattgtttgttttaaatgattaaataatacacaattaaatgtcaggatagcatctcttgcaaagtgaccagtgcagcagaattgtctttctatccatatttgagcttagagaaacatttcccatgtcctaagttcttagaagcaattactttagcgttggggagcattgttctaccagacccatttatgcaggggagatgaagcttaaaagacgggatgtggggtgggagtgtgtttcttaagccgaagctgttgcaggctgggggatttttgcattttctttttgttttgtttttgactgcagattctgtacatctgtctgtgggaggagagttgctactcaggacaggatttaagagacacattccagtgacctttaagaatctgcatggcgggaggtccttctccaggagtgtgggttggtccactctgggacccaccacactaagaagggggagatgataaaataacattaaaggaagaatggcctccagcctgcaggttttgttggaaagaaataaaaagggagtcattaagaccataaattcagattgaggcctcttgaaaaggttgatgtgggctagcaacctgcctgtcgaaacagtccttggttcatcagcagtgtgggaaggcagccaaggctcctgcagattcctggcatcgaccttggaaagcctctgcgatacttgtgtgtacgaatacagcagaggacagggaggtccttgttctgtggtctctgtttagtgactgaaacttaaacccaaaggcaagcccagattgtctggccgttcatccccatgctttgataggggttaggaggaaccctttccgtatgaaagacaggccctactagggcttacaaccaagccaaaggaccatctcttctttcttccacctcccttcacccctgccccgcagcagagccgagatgtgagacattcattgtcacggagcaaggagacaaaggcaagttcaagttgagaagcatatggcagcaaacagaaatgaaaaccatatgtcccagcaaggggaaaagcagtcatttccagattataaaaatcaatgaagtactctccacctaggtcagctgaaattcgagccctcacagtcaggcctgtcagagaagttaagcagaaacatctcggggggacttctaaaatttagtgaagacaaggccttgcaactccaaagaaactttttttcccccccttgaaacagggtcttgctctgttgcccagcctggagtgcagtggtgcagtcacggctcactgcagcctcaagctcctgggctcaagcactatccccacctcaacctccttagtagctgggactacaggtgcacaccaccatgcccagctaaccacagaaactttcatctcttcattttttctttgggcaccattaatacctaagacaggtagaaagggtcccagaaagacaccattggtaatggccgattgccggctgcagtcatcgcccccagatcaggctggtacaggatgccttaaggtgatgagaggtgagggtgcatgaagaataatgagcacagggaagagagaagcaggacaaagtagcagataaaatgccggcaaagcacagatgaatgtcttcaagaagctcttgtatttctctgcacagtgtaaatatccttgctatttcaggatggcggctggcctgctcagtaacatacatgttccaaataaagattttgcatgaaagtaaaaaaaaacg

SEQ ID NO: 24191 - DNA, 7143 bp, Homo sapiens
tcactgcctatgacggcttcgttcagtacattccctttgatgatccacggttacgacattttaaactagctcagccccagggtttctgtgaagacataaagcttgacgataaatcatataactccagtcctgtcactgctcaagagccggctcatggaggaatgcagcctgatggtgccatttggaatccacagagcttaatacccccgtcgggggatgagagaggcctggtcttggccgattccagcccccggtggctgtggggccagccccccggggatggggaaaacagtggcctccccaaccagagagaccgctgtgtggcaaggggacagtggcctgatgtgagaggcagccagcacgggcacactggaagacaagtttcctccccttactcacagggcgagagcacctgcgaaactcaaaccaagctcaaaaagttccaaactgggactcggaccaagaaaagttcaaagaaaaaaatgaacgagactatattttgcttggtttctatcccagtgaaatcagaatcacatctgccagatagagatatggacaacaatgacttaaagcccagtgctgatcaaaagaatgggtctgataagagcccggctctgcaagaacagagtctgctgagcatgtcttccaccgacctggagctgcaggccctcacaggaagcatgggtgggagaacggagttccaaaaacaagatctaggggaaccagaagaagacagacaaacaaatgacctcagtttcatccaccttacaaagcacagagaactcaagcattctggctcttggccagggcaccggtacagagatcagcaaacacaaaccagtttctccgaggagccccaaagttcgcagctgctccctggtgcaaagctgggagggccgagtcgtgcagcattgagtccaaaatgttcagaccctgctgcctccgaagctcagacgcacacagcattccctaccggtgatcacaaacagaggccaagtgcccgtaacctgaaaggtcacaggtccctcagcccatccagcaacagtgcgttctcaaggacttccttgtccgtggaccaggcaccgacgccaaaagcaggccgaagtcagccctgcgtggatgtccacgggcttggagcccaccctgggcctaagcgggaggtggtgaagggggagcccacgggcccttgcaacagtaaacaactctttgggcagtttctcctgaaaccggtcagccgtcgtccctgggatttgatcagtcagttagaaagttttaacaaggagctccaggaagaggaagaaagcagcagtagcagcagcagcagcagcagcagcagtgaggagagtgaggcggagccgcagcaggagaaccgtgctcactgcagacaggaggatgtgggcttccgcggaaacagcccggaaatgagggttgagccacagccgaggatgtgggtgccggagagccctgtgtgtaggcgggctcctcaggcttttgagcactcagatgtggacggggttgtcaccagcacagaccctgtccctgagcctgagcccagccccttggagtccaagttcttcgaacaaaaggatgtggaaacaaaaccacccttcaggtccactttattccattttgtagaaagaaccccaagtgtggcaggctctgaaaagagacttagaagcccttccaaagtgattgaaagtttacaagagaaactggcctccccgcctaggagagcagaccctgaccgcctgatgagaatgaaagaggtgagctcagtgtcacggatgagagtcctgagcttcaggaatgccgactcccaggaggacgccgaggaattgaaggccaccacaaggggccaggccgggctcccgggaggccttgtgtctcctggcagtggggaccgtgcccagagattgggccactcactctctgtgtccaaggacagcatctccagggaagagaaggagcatccggcagcacaaaaggagaagagcatggatcaagacttctggtgcccagattcctatgaccctagcagagtggagagggtgtgatgaaatgccggtggagcttgcattccgttgcgaattgagtattctcaagtagctggtagatttagtctatcagccccacttccccatgtagaagctggaagctgctgagtttttagcatcctgataacattctttaccactgccactaggaaacttgccatcctctcagaattgctttgtggcgataaagcaatcgtccgttgaaaccatctgtttttatagcatgaagatttaatgcctataattaggaaggagttttcacagaaaccctccctcatgacagatttgactaagctggtaaatagtttggtgttgctctcattctgggtgaagatttcaatgtggaagatctagcaaatgctttggaaaggcctgtgaatggtgtgctcccctctgtgtctccatggcctgcagtccatgctcttgtgaaggagtttgggacactggctgttgcccggtgtttcagcactttcagtttaggggaaatgtgaatcaataggtatgatccatttctaatcaatttggccttctgctgctggaagtaactttacttataagtaacttgccatcagagaataaaagcaatatcttttaagttcctgaaaaattaaaacttgtactgtaatatactaagagtattatttatctggcagtgaaatattttgatcatttgcaaacacgccattgtctgctttgcactcagtattatctatttttattttctgtatgggtatttagaaattctttatatgaaaaataattgctggtttaaaatagaccattttaacaaagtgactatatttctttttacgaaaatgctatttttctatgatgtaaacaattgttaggcggcagatttttaaggaagtattattttatttaagagtctgtatccctttgtgtgagaggaacccaaagagggttcacttttgctttaaagctctgtcccttacccactgacaactctgctacttttattttatcttagaaaatgtcaatatagacatatcacagggttaataaaagaaacttttcacaaagatttttgtacaagtgtagctatcaggttatatttgaaaataaccctctgaaaaccagccaacattgtcatgacaatttttgctgccgtatcaactagaattaccaaaaaacatagttttatctttgtatgtgtgtggggatctaccctgagaccatgcttttcttcccaccctgccaccccacccctttaaagaaatacgtatttttatctagaatgatcttgaattagtctctgcatatttttagaaagtgcttggggacattatatatatgccattacaaaagcattatgaggcctatgtattctactgtgtttaatactgcattaacctgcacaaagtttatgcattttttcatgcatttttttccttctttctaagtaaggtattcctgacaactaacattccctaaatcatttcccctccctccctccctcccttcctttcttccttccttctgtcctccctcccttgctacctcttgccctccttccttcaccctgtcctccttttcccttttattttttccccttctctttcattttcttttcttttagagaaaccaccttatctatttttagacatttcgaattcctaaaatgtgaaccgttgggtgatctgtcctttggccctaaaacggctggccgggctgtcccggcctgttctcatctgtaccgtatgattttatttcataataactttatgtatttggactgtaacaaacaaaacagaacctaagtcgccccgaaaaatctttccaagccttttcaaaacacttatctgcagtccagaattcagctcttatgaaaagtgagagtgcactccagttttcacagcagcaataagtgcgggaaacaaaaagatcctcttcccaggaaaagttgagtggggaagagttcagacactgttgtagctggtgaatcattgaagtcacctggtagtaccaaataagggctgaggcgcctggaggtctttgtggggtcttccctctttaaatgcaaacgtaagaaggtatatgtgtatatacatttatatacgtgcacatgtatactcgtacatgtatgcacacatacccatacatgtatatgaactccgttctgatttcctctgaaattttgttgataccatctaaatacctctttgaatcaaaataacttaattttagctcattcctcaagagaaagagaaggatccccaaggaagaaaaactgttgtaccttctgtgattctcaaaccaaaatgtgatgcgcttctgttttgttatcttaaattgttgtatcatatctttctgaaaccattctgaattaagttgaaattttcaacatttatactttaactgttctaaatttaagcctacatgtaaatcttttttggggggaaggtaacttgaaaagtttaacttgaaaatttgacctttaaactttcatattctaaggtaaataatagcctataaccaacaacagctttcccagaggtcttgaatttaacactaattgtttagttattgtttctatttctcatacatacataacttcgttttttgtggctggaagaaaaagtttctatattttgtatttgtctttgttcttctcatgcacacaatttactgttggtgtttaataatttggagctcataaaattaaaagttgtaattttgaccatttgggctaaaaattatatgagggattacatatgcaatggattagtatttcttgatttgcaaaagaagggaaaatgatggtaatttagctcaaattgcctttctttgaagaaaatttctgaatgactgaaaaccaaatatctatattatcactttcaacctcatgtttctgcaaagtacagaaaaactcctcactgacagtgcacccagcccctgactgggttttcaggattatgtccatgtgcataactgcttggatttcttcttttaaagtccctaaaacatgaatctgttctttgagatcctggtttccttagcagagttgtaggttgcgggtttcattcacgtggaaattctaagtagaacttttgctgccccattttactgttggtgaagggccgttgttaatggaagtttacgttttaaaactcagatgactcagaaaccagactgtgatcattttttgcagcagcaaaatgacttattctgacagcatctcggtttggggcttctgaagaaaaaggatgaagctgatctgttgaaacaactactttcccaactcggaggcaaaaggggctgatagaagataacattcacctaccatttcatcttgtgacccccagagatcacgtttgcgtgttctggctgagttttttattattgtttgttttaaatgattaaataatacacaattaaatgtcaggatagcatctcttgcaaagtgaccagtgcagcagaattgtctttctatccatatttgagcttagagaaacatttcccatgtcctaagttcttagaagcaattactttagcgttggggagcattgttctaccagacccatttatgcaggggagatgaagcttaaaagacgggatgtggggtgggagtgtgtttcttaagccgaagctgttgcaggctgggggatttttgcattttctttttgttttgtttttgactgcagattctgtacatctgtctgtgggaggagagttgctactcaggacaggatttaagagacacattccagtgacctttaagaatctgcatggcgggaggtccttctccaggagtgtgggttggtccactctgggacccaccacactaagaagggggagatgataaaataacattaaaggaagaatggcctccagcctgcaggttttgttggaaagaaataaaaagggagtcattaagaccataaattcagattgaggcctcttgaaaaggttgatgtgggctagcaacctgcctgtcgaaacagtccttggttcatcagcagtgtgggaaggcagccaaggctcctgcagattcctggcatcgaccttggaaagcctctgcgatacttgtgtgtacgaatacagcagaggacagggaggtccttgttctgtggtctctgtttagtgactgaaacttaaacccaaaggcaagcccagattgtctggccgttcatccccatgctttgataggggttaggaggaaccctttccgtatgaaagacaggccctactagggcttacaaccaagccaaaggaccatctcttctttcttccacctcccttcacccctgccccgcagcagagccgagatgtgagacattcattgtcacggagcaaggagacaaaggcaagttcaagttgagaagcatatggcagcaaacagaaatgaaaaccatatgtcccagcaaggggaaaagcagtcatttccagattataaaaatcaatgaagtactctccacctaggtcagctgaaattcgagccctcacagtcaggcctgtcagagaagttaagcagaaacatctcggggggacttctaaaatttagtgaagacaaggccttgcaactccaaagaaactttttttcccccccttgaaacagggtcttgctctgttgcccagcctggagtgcagtggtgcagtcacggctcactgcagcctcaagctcctgggctcaagcactatccccacctcaacctccttagtagctgggactacaggtgcacaccaccatgcccagctaaccacagaaactttcatctcttcattttttctttgggcaccattaatacctaagacaggtagaaagggtcccagaaagacaccattggtaatggccgattgccggctgcagtcatcgcccccagatcaggctggtacaggatgccttaaggtgatgagaggtgagggtgcatgaagaataatgagcacagggaagagagaagcaggacaaagtagcagataaaatgccggcaaagcacagatgaatgtcttcaagaagctcttgtatttctctgcacagtgtaaatatccttgctatttcaggatggcggctggcctgctcagtaacatacatgttccaaataaagattttgcatgaaagtaaaaaaaaacg

SEQ ID NO: 24192 - DNA, 3433 bp, Homo sapiens
tcactgcctatgacggcttcgttcagtacattccctttgatgatccacggttacgacattttaaactagctcagccccagggtttctgtgaagacataaagcttgacgataaatcatataactccagtcctgtcactgctcaagagccggctcatggaggaatgcagcctgatggtgccatttggaatccacagagcttaatacccccgtcgggggatgagagaggcctggtcttggccgattccagcccccggtggctgtggggccagccccccggggatggggaaaacagtggcctccccaaccagagagaccgctgtgtggcaaggggacagtggcctgatgtgagaggcagccagcacgggcacactggaagacaagtttcctccccttactcacagggcgagagcacctgcgaaactcaaaccaagctcaaaaagttccaaactgggactcggaccaagaaaagttcaaagaaaaaaatgaacgagactatattttgcttggtttctatcccagtgaaatcagaatcacatctgccagatagagatatggacaacaatgacttaaagcccagtgctgatcaaaagaatgggtctgataagagcccggctctgcaagaacagagtctgctgagcatgtcttccaccgacctggagctgcaggccctcacaggaagcatgggtgggagaacggagttccaaaaacaagatctaggggaaccagaagaagacagacaaacaaatgacctcagtttcatccaccttacaaagcacagagaactcaagcattctggctcttggccagggcaccggtacagagatcagcaaacacaaaccagtttctccgaggagccccaaagttcgcagctgctccctggtgcaaagctgggagggccgagtcgtgcagcattgagtccaaaatgttcagaccctgctgcctccgaagctcagacgcacacagcattccctaccggtgatcacaaacagaggccaagtgcccgtaacctgaaaggtcacaggtccctcagcccatccagcaacagtgcgttctcaaggacttccttgtccgtggaccaggcaccgacgccaaaagcaggccgaagtcagccctgcgtggatgtccacgggcttggagcccaccctgggcctaagcgggaggtggtgaagggggagcccacgggcccttgcaacagtaaacaactctttgggcagtttctcctgaaaccggtcagccgtcgtccctgggatttgatcagtcagttagaaagttttaacaaggagctccaggaagaggaagaaagcagcagtagcagcagcagcagcagcagcagcagtgaggagagtgaggcggagccgcagcaggagaaccgtgctcactgcagacaggaggatgtgggcttccgcggaaacagcccggaaatgagggttgagccacagccgaggatgtgggtgccggagagccctgtgtgtaggtcgggaagaggtgagagtaagtctgagagctggagtgaggagctgcagcctggccacccacgtgcctggcctccatccccgggccgctttcgcgtggaagaaggtggcggtgcacctttctgctcagcagatggaagcacgagtgcagagaagggacacctggaggttagcaacggaatggacgagctggcaggtagcccatttcctgtgacgagaatgtcttcaagatcaagtgacgcaaaaccactgcccgcgtcctatccagctgaacctagggagccccaggaaagtccgaaaatcaccagtgctttcagctctgtgaaaccaagtgaagcggtccctcggaagtttgacagtggtggagagaggggggcagggctcccactgtccctgtctaacaagaaccgagggctctcagctccagacttacggtctgtggggctcacccctgggcaagaacagggtgccagtgagctagaggggtctttgggtgaagcaagcacaatagaaatccccccaggtgagtccttgcaagccagggctgcaaggatcctgggcattgaggtggcggtggagtccctcctgccgggcatccggagagcgggacagaaccagcctgctgagcccgatgcaagtgcctgcaccccagagtccccccaggaagagttgctatctcgcccagcaccggcagatgtccccagggtgtccactgatgccttttatggcaggaggaagtgcggctggaccaagagccctctctttgtaggggacagggacagtgccaggcgggctcctcaggcttttgagcactcagatgtggacggggttgtcaccagcacagaccctgtccctgagcctgagcccagccccttggagtccaagttcttcgaacaaaaggatgtggaaacaaaaccacccttcaggtccactttattccattttgtagaaagaaccccaagtgtggcaggctctgaaaagagacttagaagcccttccaaagtgattgaaagtttacaagagaaactggcctccccgcctaggagagcagaccctgaccgcctgatgagaatgaaagaggtgagctcagtgtcacggatgagagtcctgagcttcaggaatgccgactcccaggaggacgccgaggaattgaaggccaccacaaggggccaggccgggctcccgggaggccttgtgtctcctggcagtggggaccgtgcccagagattgggccactcactctctgtgtccaaggacagcatctccagggaagagaaggagcatccggcagcacaaaaggagaagagcatggatcaagacttctggtgcccagattcctatgaccctagcagagtggagagggtgtgatgaaatgccggtggagcttgcattccgttgcgaattgagtattctcaagtagctggtagatttagtctatcagccccacttccccatgtagaagctggaagctgctgagtttttagcatcctgataacattctttaccactgccactaggaaacttgccatcctctcagaattgctttgtggcgataaagcaatcgtccgttgaaaccatctgtttttatagcatgaagatttaatgcctataattaggaaggagttttcacagaaaccctccctcatgacagatttgactaagctggtaaatagtttggtgttgctctcattctgggtgaagatttcaatgtggaagatctagcaaatgctttggaaaggcctgtgaatggtgtgctcccctctgtgtctccatggcctgcagtccatgctcttgtgaaggagtttgggacactggctgttgcccggtgtttcagcactttcagtttaggggaaatgtgaatcaataggtatgatccatttctaatcaatttggccttctgctgctggaagtaactttacttataagtaacttgccatcagagaataaaagcaatatctttt

SEQ ID NO: 24193 - DNA, 7620 bp, Homo sapiens
tcactgcctatgacggcttcgttcagtacattccctttgatgatccacggttacgacattttaaactagctcagccccagggtttctgtgaagacataaagcttgacgataaatcatataactccagtcctgtcactgctcaagagccggctcatggaggaatgcagcctgatggtgccatttggaatccacagagcttaatacccccgtcgggggatgagagaggcctggtcttggccgattccagcccccggtggctgtggggccagccccccggggatggggaaaacagtggcctccccaaccagagagaccgctgtgtggcaaggggacagtggcctgatgtgagaggcagccagcacgggcacactggaagacaagtttcctccccttactcacagggcgagagcacctgcgaaactcaaaccaagctcaaaaagttccaaactgggactcggaccaagaaaagttcaaagaaaaaaatgaacgagactatattttgcttggtttctatcccagtgaaatcagaatcacatctgccagatagagatatggacaacaatgacttaaagcccagtgctgatcaaaagaatgggtctgataagagcccggctctgcaagaacagagtctgctgagcatgtcttccaccgacctggagctgcaggccctcacaggaagcatgggtgggagaacggagttccaaaaacaagatctaggggaaccagaagaagacagacaaacaaatgacctcagtttcatccaccttacaaagcacagagaactcaagcattctggctcttggccagggcaccggtacagagatcagcaaacacaaaccagtttctccgaggagccccaaagttcgcagctgctccctggtgcaaagctgggagggccgagtcgtgcagcattgagtccaaaatgttcagaccctgctgcctccgaagctcagacgcacacagcattccctaccggtgatcacaaacagaggccaagtgcccgtaacctgaaaggtcacaggtccctcagcccatccagcaacagtgcgttctcaaggacttccttgtccgtggaccaggcaccgacgccaaaagcaggccgaagtcagccctgcgtggatgtccacgggcttggagcccaccctgggcctaagcgggaggtggtgaagggggagcccacgggcccttgcaacagtaaacaactctttgggcagtttctcctgaaaccggtcagccgtcgtccctgggatttgatcagtcagttagaaagttttaacaaggagctccaggaagaggaagaaagcagcagtagcagcagcagcagcagcagcagcagtgaggagagtgaggcggagccgcagcaggagaaccgtgctcactgcagacaggaggatgtgggcttccgcggaaacagcccggaaatgagggttgagccacagccgaggatgtgggtgccggagagccctgtgtgtaggtcgggaagaggtgagagtaagtctgagagctggagtgaggagctgcagcctggccacccacgtgcctggcctccatccccgggccgctttcgcgtggaagaaggtggcggtgcacctttctgctcagcagatggaagcacgagtgcagagaagggtgccagtgagctagaggggtctttgggtgaagcaagcacaatagaaatccccccaggtgagtccttgcaagccagggctgcaaggatcctgggcattgaggtggcggtggagtccctcctgccgggcatccggagagcgggacagaaccagcctgctgagcccgatgcaagtgcctgcaccccagagtccccccaggaagagttgctatctcgcccagcaccggcagatgtccccagggtgtccactgatgccttttatggcaggaggaagtgcggctggaccaagagccctctctttgtaggggacagggacagtgccaggcgggctcctcaggcttttgagcactcagatgtggacggggttgtcaccagcacagaccctgtccctgagcctgagcccagccccttggagtccaagttcttcgaacaaaaggatgtggaaacaaaaccacccttcaggtccactttattccattttgtagaaagaaccccaagtgtggcaggctctgaaaagagacttagaagcccttccaaagtgattgaaagtttacaagagaaactggcctccccgcctaggagagcagaccctgaccgcctgatgagaatgaaagaggtgagctcagtgtcacggatgagagtcctgagcttcaggaatgccgactcccaggaggacgccgaggaattgaaggccaccacaaggggccaggccgggctcccgggaggccttgtgtctcctggcagtggggaccgtgcccagagattgggccactcactctctgtgtccaaggacagcatctccagggaagagaaggagcatccggcagcacaaaaggagaagagcatggatcaagacttctggtgcccagattcctatgaccctagcagagtggagagggtgtgatgaaatgccggtggagcttgcattccgttgcgaattgagtattctcaagtagctggtagatttagtctatcagccccacttccccatgtagaagctggaagctgctgagtttttagcatcctgataacattctttaccactgccactaggaaacttgccatcctctcagaattgctttgtggcgataaagcaatcgtccgttgaaaccatctgtttttatagcatgaagatttaatgcctataattaggaaggagttttcacagaaaccctccctcatgacagatttgactaagctggtaaatagtttggtgttgctctcattctgggtgaagatttcaatgtggaagatctagcaaatgctttggaaaggcctgtgaatggtgtgctcccctctgtgtctccatggcctgcagtccatgctcttgtgaaggagtttgggacactggctgttgcccggtgtttcagcactttcagtttaggggaaatgtgaatcaataggtatgatccatttctaatcaatttggccttctgctgctggaagtaactttacttataagtaacttgccatcagagaataaaagcaatatcttttaagttcctgaaaaattaaaacttgtactgtaatatactaagagtattatttatctggcagtgaaatattttgatcatttgcaaacacgccattgtctgctttgcactcagtattatctatttttattttctgtatgggtatttagaaattctttatatgaaaaataattgctggtttaaaatagaccattttaacaaagtgactatatttctttttacgaaaatgctatttttctatgatgtaaacaattgttaggcggcagatttttaaggaagtattattttatttaagagtctgtatccctttgtgtgagaggaacccaaagagggttcacttttgctttaaagctctgtcccttacccactgacaactctgctacttttattttatcttagaaaatgtcaatatagacatatcacagggttaataaaagaaacttttcacaaagatttttgtacaagtgtagctatcaggttatatttgaaaataaccctctgaaaaccagccaacattgtcatgacaatttttgctgccgtatcaactagaattaccaaaaaacatagttttatctttgtatgtgtgtggggatctaccctgagaccatgcttttcttcccaccctgccaccccacccctttaaagaaatacgtatttttatctagaatgatcttgaattagtctctgcatatttttagaaagtgcttggggacattatatatatgccattacaaaagcattatgaggcctatgtattctactgtgtttaatactgcattaacctgcacaaagtttatgcattttttcatgcatttttttccttctttctaagtaaggtattcctgacaactaacattccctaaatcatttcccctccctccctccctcccttcctttcttccttccttctgtcctccctcccttgctacctcttgccctccttccttcaccctgtcctccttttcccttttattttttccccttctctttcattttcttttcttttagagaaaccaccttatctatttttagacatttcgaattcctaaaatgtgaaccgttgggtgatctgtcctttggccctaaaacggctggccgggctgtcccggcctgttctcatctgtaccgtatgattttatttcataataactttatgtatttggactgtaacaaacaaaacagaacctaagtcgccccgaaaaatctttccaagccttttcaaaacacttatctgcagtccagaattcagctcttatgaaaagtgagagtgcactccagttttcacagcagcaataagtgcgggaaacaaaaagatcctcttcccaggaaaagttgagtggggaagagttcagacactgttgtagctggtgaatcattgaagtcacctggtagtaccaaataagggctgaggcgcctggaggtctttgtggggtcttccctctttaaatgcaaacgtaagaaggtatatgtgtatatacatttatatacgtgcacatgtatactcgtacatgtatgcacacatacccatacatgtatatgaactccgttctgatttcctctgaaattttgttgataccatctaaatacctctttgaatcaaaataacttaattttagctcattcctcaagagaaagagaaggatccccaaggaagaaaaactgttgtaccttctgtgattctcaaaccaaaatgtgatgcgcttctgttttgttatcttaaattgttgtatcatatctttctgaaaccattctgaattaagttgaaattttcaacatttatactttaactgttctaaatttaagcctacatgtaaatcttttttggggggaaggtaacttgaaaagtttaacttgaaaatttgacctttaaactttcatattctaaggtaaataatagcctataaccaacaacagctttcccagaggtcttgaatttaacactaattgtttagttattgtttctatttctcatacatacataacttcgttttttgtggctggaagaaaaagtttctatattttgtatttgtctttgttcttctcatgcacacaatttactgttggtgtttaataatttggagctcataaaattaaaagttgtaattttgaccatttgggctaaaaattatatgagggattacatatgcaatggattagtatttcttgatttgcaaaagaagggaaaatgatggtaatttagctcaaattgcctttctttgaagaaaatttctgaatgactgaaaaccaaatatctatattatcactttcaacctcatgtttctgcaaagtacagaaaaactcctcactgacagtgcacccagcccctgactgggttttcaggattatgtccatgtgcataactgcttggatttcttcttttaaagtccctaaaacatgaatctgttctttgagatcctggtttccttagcagagttgtaggttgcgggtttcattcacgtggaaattctaagtagaacttttgctgccccattttactgttggtgaagggccgttgttaatggaagtttacgttttaaaactcagatgactcagaaaccagactgtgatcattttttgcagcagcaaaatgacttattctgacagcatctcggtttggggcttctgaagaaaaaggatgaagctgatctgttgaaacaactactttcccaactcggaggcaaaaggggctgatagaagataacattcacctaccatttcatcttgtgacccccagagatcacgtttgcgtgttctggctgagttttttattattgtttgttttaaatgattaaataatacacaattaaatgtcaggatagcatctcttgcaaagtgaccagtgcagcagaattgtctttctatccatatttgagcttagagaaacatttcccatgtcctaagttcttagaagcaattactttagcgttggggagcattgttctaccagacccatttatgcaggggagatgaagcttaaaagacgggatgtggggtgggagtgtgtttcttaagccgaagctgttgcaggctgggggatttttgcattttctttttgttttgtttttgactgcagattctgtacatctgtctgtgggaggagagttgctactcaggacaggatttaagagacacattccagtgacctttaagaatctgcatggcgggaggtccttctccaggagtgtgggttggtccactctgggacccaccacactaagaagggggagatgataaaataacattaaaggaagaatggcctccagcctgcaggttttgttggaaagaaataaaaagggagtcattaagaccataaattcagattgaggcctcttgaaaaggttgatgtgggctagcaacctgcctgtcgaaacagtccttggttcatcagcagtgtgggaaggcagccaaggctcctgcagattcctggcatcgaccttggaaagcctctgcgatacttgtgtgtacgaatacagcagaggacagggaggtccttgttctgtggtctctgtttagtgactgaaacttaaacccaaaggcaagcccagattgtctggccgttcatccccatgctttgataggggttaggaggaaccctttccgtatgaaagacaggccctactagggcttacaaccaagccaaaggaccatctcttctttcttccacctcccttcacccctgccccgcagcagagccgagatgtgagacattcattgtcacggagcaaggagacaaaggcaagttcaagttgagaagcatatggcagcaaacagaaatgaaaaccatatgtcccagcaaggggaaaagcagtcatttccagattataaaaatcaatgaagtactctccacctaggtcagctgaaattcgagccctcacagtcaggcctgtcagagaagttaagcagaaacatctcggggggacttctaaaatttagtgaagacaaggccttgcaactccaaagaaactttttttcccccccttgaaacagggtcttgctctgttgcccagcctggagtgcagtggtgcagtcacggctcactgcagcctcaagctcctgggctcaagcactatccccacctcaacctccttagtagctgggactacaggtgcacaccaccatgcccagctaaccacagaaactttcatctcttcattttttctttgggcaccattaatacctaagacaggtagaaagggtcccagaaagacaccattggtaatggccgattgccggctgcagtcatcgcccccagatcaggctggtacaggatgccttaaggtgatgagaggtgagggtgcatgaagaataatgagcacagggaagagagaagcaggacaaagtagcagataaaatgccggcaaagcacagatgaatgtcttcaagaagctcttgtatttctctgcacagtgtaaatatccttgctatttcaggatggcggctggcctgctcagtaacatacatgttccaaataaagattttgcatgaaagtaaaaaaaaacg

SEQ ID NO: 24194 - DNA, 5919 bp, Homo sapiens
tcactgcctatgacggcttcgttcagtacattccctttgatgatccacggttacgacattttaaactagctcagccccagggtttctgtgaagacataaagcttgacgataaatcatataactccagtcctgtcactgctcaagagccggctcatggaggaatgcagcctgatggtgccatttggaatccacagagcttaatacccccgtcgggggatgagagaggcctggtcttggccgattccagcccccggtggctgtggggccagccccccggggatggggaaaacagtggcctccccaaccagagagaccgctgtgtggcaaggggacagtggcctgatgtgagaggcagccagcacgggcacactggaagacaagtttcctccccttactcacagggcgagagcacctgcgaaactcaaaccaagctcaaaaagttccaaactgggactcggaccaagaaaagttcaaagaaaaaaatgaacgagactatattttgcttggtttctatcccagtgaaatcagaatcacatctgccagatagagatatggacaacaatgacttaaagcccagtgctgatcaaaagaatgggtctgataagagcccggctctgcaagaacagagtctgctgagcatgtcttccaccgacctggagctgcaggccctcacaggaagcatgggtgggagaacggagttccaaaaacaagatctaggggaaccagaagaagacagacaaacaaatgacctcagtttcatccaccttacaaagcacagagaactcaagcattctggctcttggccagggcaccggtacagagatcagcaaacacaaaccagtttctccgaggagccccaaagttcgcagctgctccctggtgcaaagctgggagggccgagtcgtgcagcattgagtccaaaatgttcagaccctgctgcctccgaagctcagacgcacacagcattccctaccggtgatcacaaacagaggccaagtgcccgtaacctgaaaggtcacaggtccctcagcccatccagcaacagtgcgttctcaaggacttccttgtccgtggaccaggcaccgacgccaaaagcaggccgaagtcagccctgcgtggatgtccacgggcttggagcccaccctgggcctaagcgggaggtggtgaagggggagcccacgggcccttgcaacagtaaacaactctttgggcagtttctcctgaaaccggtcagccgtcgtccctgggatttgatcagtcagttagaaagttttaacaaggagctccaggaagaggaagaaagcagcagtagcagcagcagcagcagcagcagcagtgaggagagtgaggcggagccgcagcaggagaaccgtgctcactgcagacaggaggatgtgggcttccgcggaaacagcccggaaatgagggttgagccacagccgaggatgtgggtgccggagagccctgtgtgtaggtcgggaagaggtgagagtaagtctgagagctggagtgaggagctgcagcctggccacccacgtgcctggcctccatccccgggccgctttcgcgtggaagaaggtggcggtgcacctttctgctcagcagatggaagcacgagtgcagagaagggacacctggaggttagcaacggaatggacgagctggcaggtagcccatttcctgtgacgagaatgtcttcaagatcaagtgacgcaaaaccactgcccgcgtcctatccagctgaacctagggagccccaggaaagtccgaaaatcaccagtgctttcagctctgtgaaaccaagtgaagcggtccctcggaagtttgacagtggtggagagaggggggcagggctcccactgtccctgtctaacaagaaccgagggctctcagctccagacttacggtctgtggggctcacccctgggcaagaacagggtgccagtgagctagaggggtctttgggtgaagcaagcacaatagaaatccccccaggtgagtccttgcaagccagggctgcaaggatcctgggcattgaggtggcggtggagtccctcctgccgggcatccggagagcgggacagaaccagcctgctgagcccgatgcaagtgcctgcaccccagagtccccccaggaagagttgctatctcgcccagcaccggcagatgtccccagggtgtccactgatgccttttatggcaggaggaagtgcggctggaccaagagccctctctttgtaggggacagggacagtgccaggcgggctcctcaggcttttgagcactcagatgtggacggggttgtcaccagcacagaccctgtccctgagcctgagcccagccccttggagtccaagttcttcgaacaaaaggatgtggaaacaaaaccacccttcaggtccactttattccattttgtagaaagaaccccaagtgtggcaggctctgaaaagagacttagaagcccttccaaagtgattgaaagtttacaagagaaactggcctccccgcctaggagagcagaccctgaccgcctgatgagaatgaaagaggtgagctcagtgtcacggatgagagtcctgagcttcaggaatgccgactcccaggaggacgccgaggaattgaaggccaccacaaggggccaggccgggctcccgggaggccttgtgtctcctggcagtggggaccgtgcccagagattgggccactcactctctgtgtccaaggacagcatctccagggaagagaaggagcatccggcagcacaaaaggagaagagcatggatcaagacttctggtgcccagattcctatgaccctagcagagtggagagggtgtgatgaaatgccggtggagcttgcattccgttgcgaattgagtattctcaagtagctggtagatttagtctatcagccccacttccccatgtagaagctggaagctgctgagtttttagcatcctgataacattctttaccactgccactaggaaacttgccatcctctcagaattgctttgtggcgataaagcaatcgtccgttgaaaccatctgtttttatagcatgaagatttaatgcctataattaggaaggagttttcacagaaaccctccctcatgacagatttgactaagctggtaaatagtttggtgttgctctcattctgggtgaagatttcaatgtggaagatctagcaaatgctttggaaaggcctgtgaatggtgtgctcccctctgtgtctccatggcctgcagtccatgctcttgtgaaggagtttgggacactggctgttgcccggtgtttcagcactttcagtttaggggaaatgtgaatcaataggtatgatccatttctaatcaatttggccttctgctgctggaagtaactttacttataagtaacttgccatcagagaataaaagcaatatcttttaagttcctgaaaaattaaaacttgtactgtaatatactaagagtattatttatctggcagtgaaatattttgatcatttgcaaacacgccattgtctgctttgcactcagtattatctatttttattttctgtatgggtatttagaaattctttatatgaaaaataattgctggtttaaaatagaccattttaacaaagtgactatatttctttttacgaaaatgctatttttctatgatgtaaacaattgttaggcggcagatttttaaggaagtattattttatttaagagtctgtatccctttgtgtgagaggaacccaaagagggttcacttttgctttaaagctctgtcccttacccactgacaactctgctacttttattttatcttagaaaatgtcaatatagacatatcacagggttaataaaagaaacttttcacaaagatttttgtacaagtgtagctatcaggttatatttgaaaataaccctctgaaaaccagccaacattgtcatgacaatttttgctgccgtatcaactagaattaccaaaaaacatagttttatctttgtatgtgtgtggggatctaccctgagaccatgcttttcttcccaccctgccaccccacccctttaaagaaatacgtatttttatctagaatgatcttgaattagtctctgcatatttttagaaagtgcttggggacattatatatatgccattacaaaagcattatgaggcctatgtattctactgtgtttaatactgcattaacctgcacaaagtttatgcattttttcatgcatttttttccttctttctaagtaaggtattcctgacaactaacattccctaaatcatttcccctccctccctccctcccttcctttcttccttccttctgtcctccctcccttgctacctcttgccctccttccttcaccctgtcctccttttcccttttattttttccccttctctttcattttcttttcttttagagaaaccaccttatctatttttagacatttcgaattcctaaaatgtgaaccgttgggtgatctgtcctttggccctaaaacggctggccgggctgtcccggcctgttctcatctgtaccgtatgattttatttcataataactttatgtatttggactgtaacaaacaaaacagaacctaagtcgccccgaaaaatctttccaagccttttcaaaacacttatctgcagtccagaattcagctcttatgaaaagtgagagtgcactccagttttcacagcagcaataagtgcgggaaacaaaaagatcctcttcccaggaaaagttgagtggggaagagttcagacactgttgtagctggtgaatcattgaagtcacctggtagtaccaaataagggctgaggcgcctggaggtctttgtggggtcttccctctttaaatgcaaacgtaagaaggtatatgtgtatatacatttatatacgtgcacatgtatactcgtacatgtatgcacacatacccatacatgtatatgaactccgttctgatttcctctgaaattttgttgataccatctaaatacctctttgaatcaaaataacttaattttagctcattcctcaagagaaagagaaggatccccaaggaagaaaaactgttgtaccttctgtgattctcaaaccaaaatgtgatgcgcttctgttttgttatcttaaattgttgtatcatatctttctgaaaccattctgaattaagttgaaattttcaacatttatactttaactgttctaaatttaagcctacatgtaaatcttttttggggggaaggtaacttgaaaagtttaacttgaaaatttgacctttaaactttcatattctaaggtaaataatagcctataaccaacaacagctttcccagaggtcttgaatttaacactaattgtttagttattgtttctatttctcatacatacataacttcgttttttgtggctggaagaaaaagtttctatattttgtatttgtctttgttcttctcatgcacacaatttactgttggtgtttaataatttggagctcataaaatacaggtgcacaccaccatgcccagctaaccacagaaactttcatctcttcattttttctttgggcaccattaatacctaagacaggtagaaagggtcccagaaagacaccattggtaatggccgattgccggctgcagtcatcgcccccagatcaggctggtacaggatgccttaaggtgatgagaggtgagggtgcatgaagaataatgagcacagggaagagagaagcaggacaaagtagcagataaaatgccggcaaagcacagatgaatgtcttcaagaagctcttgtatttctctgcacagtgtaaatatccttgctatttcaggatggcggctggcctgctcagtaacatacatgttccaaataaagattttgcatgaaagtaaaaaaaaacg

SEQ ID NO: 24195 - DNA, 239 bp, Homo sapiens
acttcaccacagccgccaccaataactgcaccctaaccaaggaagccgcagataccactaacactgctaatagccaaataaaacatacagaggcttcactgctgcatgcctcagaagtaaatccaaagggccctacccaaccaacatcccagtcacatctccagtaaaaggtgccccccaacaacaaaagtaaaccccaaaacaagaaaaagcaactattacaccagatgtgcagaaag

SEQ ID NO: 24196 - DNA, 457 bp, Homo sapiens
aaaaaacttaaaaattagccaggtgtggtggtatgtgcctatagtcctagctactcgggaggctaagccaggaagactgcttaagcccaggagtttgaggatgcagtgagctgtgatcacatcactactctccagcctgggtaacagagcaagaccctgactgtaagaaaaaacaaactggcagggtatggtgtcatatgcctgtagtcccagctactcaggaggctgaggcaggagaatcacttgagctcaggagttcaaggccagcctgggcaacatagtgagatcttacctctaattacaacatttttaacacaaattttaaaaaatattttttttaaatctgccttataataacaggtaaagatgagtgttagaagtaagtgagagatacgaaggtagacgtcagaccatgaaagggtttaacttagacaagagagtttggatttcatctcaa

SEQ ID NO: 24197 - DNA, 416 bp, Homo sapiens
ttttttttggtagagatgggtctcgctttgttgcacaggctggtctcaaactcctaacttcaagcaaccctcctgccttgaactcccaaagtgctgagattacagatgtaagccaccatgcctggatagttttgtttttttttttctagttcccttacattgcacctgcccaaggttagccaggctatgggcagtgggcatttactggtggaatcatatccatgagtaaattattgaaagataagatgtcagtatctgctaatgagtgaatgaaaaaggtggggtttagccacgtggtggaatattactcagctatgaaaaggaagtgctgacacatgctgcaatgtggatgaatcttgaaaacatgatgctaagtgaaagaagccagtcacaaaaggccattaaaaatacaaaaa

SEQ ID NO: 24198 - DNA, 531 bp, Homo sapiens
ctacttcgcagaggaagtggataccatgctaaggaatttggaagcttattctagatcagggtgtacagctttttctataaagacccagatagtaagtattttaggcttttgcttgttacaaagtgcaggtcatacagaggaacctccttgtctctgtcattgtcatgtgaaagtagccatagacaatacaaaaagaatagctgtggccatgtgccaataaaactttatttgcaaaaacagaaagtgggctgggcatggtggctcacacctgtaatccagcactttgggaggcccaggagggtggctcacctgaagacaagagttcaagaccagcctggccaacatggtgaaaccctgtctctactaaaaatacaagaaaattagccgggcatggtggtgggtgcctataatctgagctactcaggaggctgaggcaggagaatcatttgaacccaggaggtggaggttgcagtgagccgagatcgtgccattgcactccagcctgggtgacaagagtgaaactccgtctca

SEQ ID NO: 24199 - DNA, 393 bp, Homo sapiens
ctacttcgcagaggaagtggataccatgctaaggaatttggaagcttattctagatcagggtgtacagctttttctataaagacccagatagtaagtattttaggcttttgcttgttacaaagtgcaggtcatacagaggaacctccttgtctctgtcattgtcatgtgaaagtagccatagacaatacaaaaagaatagctgtggccatgtgccaataaaactttatttgcaaaaacagaaagtgggctgggcatggtggctcacacctgtaatccagcactttgggaggcccaggagggtggctcacctgaagacaagagttcaagaccagcctggccaacatggtgaaaccatcccggctaattttcttgtatttttagtagagacaggg

SEQ ID NO: 24200 - DNA, 833 bp, Homo sapiens
aggaacgagcatttgtcccttttgtccttctgccatttgaggaagcaacaagaaggcccttaccagatgctggtgccttgatcttcaacttcccagccttcagaactgttgcgttcccccagtagacagacactgagatggaaatttgcataccgaaggtggattgaggattgtttatctgaaaaaaacatctatggtggagtaagaaaaatcacgactgggctatggagaaagctgaactgggatgcagaacagaagcttcagcctcactcgtggggagctctggcgctaaaaaaactcatcgaagatttcccaaattggaacaaggcctctgtactcctgcattgaccagtcatggaaagcaacagtgtgttcagcaagctggaactaaactgttcctgaatggagagttcccatcctgcctcagtggaatcaaagaaaagagaaaggctccaaaatgaacacaatgcgtgttatttgctaccataaactgtgcaactggtttctactgctgtgttgcaattgaatagtaatcaggagaagttacacgttgttcttagaaataatacaacgaatcctgtcaatcttaagtcctgacactgaatttaacgctctctgtttagtcctaccatcaaggatgatttgcaggtgaagaattcttgatagtcagatgcagactacgtcttcagatcctatggcctaaggttattaaggtgggagaagcaaaacaaatgcggttctcatccagtaataatggatttacaagaatttgaaacaaaactttccttccagctactgctttcatgtcagagaaataaaatacatgtacaaga

SEQ ID NO: 24201 - DNA, 747 bp, Homo sapiens
taggctctggtctcatcgcatactcagtctcaatgggatttccttaagagtcaaaaccccgacaattgcatgaagccggaagctcagcaatcttctgagggcatctatcttgttttctaagaagcattttggaggtttttctttacctggagaaagcactggctagagctatctggcatacaatgtaaagaagcttcacgaaaaataaaagaaaagtgaaaatatatttagctacaaatgattgtcctcttccctgaaaattacagaagaggaaagcaacagtgtgttcagcaagctggaactaaactgttcctgaatggagagttcccatcctgcctcagtggaatcaaagaaaagagaaaggctccaaaatgaacacaatgcgtgttatttgctaccataaactgtgcaactggtttctactgctgtgttgcaattgaatagtaatcaggagaagttacacgttgttcttagaaataatacaacgaatcctgtcaatcttaagtcctgacactgaatttaacgctctctgtttagtcctaccatcaaggatgatttgcaggtgaagaattcttgatagtcagatgcagactacgtcttcagatcctatggcctaaggttattaaggtgggagaagcaaaacaaatgcggttctcatccagtaataatggatttacaagaatttgaaacaaaactttccttccagctactgctttcatgtcagagaaataaaatacatgtacaaga

SEQ ID NO: 24202 - DNA, 1575 bp, Homo sapiens
  misc_feature (1560)..(1560): n is a, c, g, or t
  misc_feature (1567)..(1567): n is a, c, g, or t
ctcgagtagctgggactacagatgcgtgctaccacacaaggctaatattttgtattttagtagagacgggatttcaccatgttggccaggatggtctccgtctcctgacctcgtgatctgcctgccttggcctcccaaagtgttgggattacaggcataagccattgcgccatgctcaaggttcttaattacatctttaaaggccctttttccatgtacagtaacatattcaatggttctggggattaggacttggagccattattctacctacaacaattagtattggacttccatcattttctatcactcttgtaatcgagaaggactatttcactgggagtagcaagtcataatgtttgcgttggcatttgtgtgggggtttatcttcattcattaaataattgcatgtaaagaaaattcctgtcactatttcaaatgtttcatgtagttattatagtgcttcagaatccaaagggttatgtgttacttatgtaagatgagcagtctagggggtggagaacaggtcatcatagtgcagattcttcctagctgaagtgtgttttctctgggaacaaccaagtaggatttaatttgttttgcttccttttttgggaacttagacccatcttgcgatgtcctaagtctccaagcatcttatttgacctgcttatacacatttgactaaatagctaaatatgaccacattgacgtggtaaagctttaacacttttgtccagattgaatcactccatctgctatcagttaagcagtggaaaactgttatggaaaagcaaacatgttttgatagatttaatgtgtaaagaaggtatccatactctggaatgctgctgatcaaataaatgagctgcaagactttgttcgaaacaacactcaagcacaactgttttactttccataccaagtttggctgtgactgaatgaagaacatcagcattgatctttgctttgcacttgtacaagagactatttgcagagagccaaatatagcaacagaggatttaatatcttgccaaaaaatacaaaatctgttcccctttaagcatgacactctatcctttcttgtggatcttgctaaaaggaaaatatagctttaaactcccctattccttctgttgaaagcttaagaatctttttcaaatgagctatgtatggttttgtggtattttatgtttccaaaagaaaatggctacatgaaaaatctgtccagtgttatcatttttcttacaaaaaatacttctagttatggttgtattaattaatttgattgtgataatgattacacaatgtttacctatatcaaatcatcatatcgtataccttaaatatatataacttttatgtgtcaattataactcagtaagtctgggaaaatatcgttaagtcaaagattagagtcaacagaaataaagaaaaatcatactttgataacttcaggactaatcaaggatcaatgggtgacatgatatcatgctatgtgccattttgtgttaaacaaattacaccaacaataaaaaaaattggcttcaaaaaaaagtngacgcgnccgcgaat

SEQ ID NO: 24203 - DNA, 1196 bp, Homo sapiens
  misc_feature (1181)..(1181): n is a, c, g, or t
  misc_feature (1188)..(1188): n is a, c, g, or t
ctcgagtagctgggactacagatgcgtgctaccacacaaggctaatattttgtattttagtagagacgggatttcaccatgttggccaggatggtctccgtctcctgacctcgtgatctgcctgccttggcctcccaaagtgttgggattacaggcataagccattgcgccatgctcaaggttcttaattacatctttaaaggccctttttccatgtacagtaacatattcaatggttctggggattaggacttggagccattattctacctacaacaattagtattggacttccatcattttctatcactcttgtaatcgagaaggactatttcactgggagtagcaagtcataatgtttgcgttggcatttgtgtgggggtttatcttcattcattaaataattgcatgtaaagaaaattcctgtcactatttcaaatgtttcatgtagttattatagtgcttcagaatccaaagggttataatgagctgcaagactttgttcgaaacaacactcaagcacaactgttttactttccataccaagtttggctgtgactgaatgaagaacatcagcattgatctttgctttgcacttgtacaagagactatttgcagagagccaaatatagcaacagaggatttaatatcttgccaaaaaatacaaaatctgttcccctttaagcatgacactctatcctttcttgtggatcttgctaaaaggaaaatatagctttaaactcccctattccttctgttgaaagcttaagaatctttttcaaatgagctatgtatggttttgtggtattttatgtttccaaaagaaaatggctacatgaaaaatctgtccagtgttatcatttttcttacaaaaaatacttctagttatggttgtattaattaatttgattgtgataatgattacacaatgtttacctatatcaaatcatcatatcgtataccttaaatatatataacttttatgtgtcaattataactcagtaagtctgggaaaatatcgttaagtcaaagattagagtcaacagaaataaagaaaaatcatactttgataacttcaggactaatcaaggatcaatgggtgacatgatatcatgctatgtgccattttgtgttaaacaaattacaccaacaataaaaaaaattggcttcaaaaaaaagtngacgcgnccgcgaat

SEQ ID NO: 24204 - DNA, 508 bp, Homo sapiens
tacaaacctaaatttcctgtcactctaccatcaaacaagtggtttgctctatattttggtgacattcatactttctttctccatcacctgcctttttacttctactccccccaaacccctgcacacacacccctgaaatccctgtgctagatggaccatccaactctatttttgtttccaccaaatatttttgagcacctactggtgtcctcgcacaagattggatgtaaagcctaaaaccataaaaaccctagaagacaacctaggcaataccattcaggacataggcatgggcaaagacttcatgactaaaacaccaaaagcaatggcaacaaaagccaaaattgacaaatgggatctaattaaactaaacagcttctgcacagcaaaagaaactatcatcagagtaaataggcaactacagaatgggagaaaatttttgcagtctatccatctggcaaagggctaatatccagaatctacaaggaatttaaatttacaagaaaaa

SEQ ID NO: 24205 - DNA, 232 bp, Homo sapiens
tgtaagtttttagattaaacttgtcatattcatctctctgttctgttttttttttccttccccaagattctggtcataccatactactcagagttcttggaatatcgtaagctttttgaagcctttctgatattcctcaccaatgattattctgcctggaatattcttccctcttatctacctggcaaatttatactcatccttcaagacccaaatgaaacataagtgctcg

SEQ ID NO: 24206 - DNA, 418 bp, Homo sapiens
tttcccaatatgatctttgaaagaaagctgaaatcttactgaacttttgaaaagcaagtccccaacatgtatgcaggatcctaaaacaaacacgaaatgtaattttacaaggaagatgcaagttcaggaatgcttgacagtaaacattctcaatgttgtccttagcagttattccttactcttgacattttatgcattattattctctatcttaattagcagaactaatgacttaatagaacagaattgaactgtttaacagaattgtttacattttcaattactgaatggggaatcaagcacaagagagaggttttacactatttacacccaaaacattcacgtaataaccaacaaaaagtttaaacagaaaaatctaaaagcattaatatctctatttttaatataaaataattag

SEQ ID NO: 24207 - DNA, 556 bp, Homo sapiens
atcaaagggcgtgaaggaaggattttggtttcactgcagaaacataataagacaccgaagtgtgtgtttgtgtgtgcgtacatataattaaactacagaatataaaatagcatctaatatacatcaaaaatgagtttcatagaaaaattcattttacacatatgtctataaaataataaaatttattcagcctcacaattactttgtgaactggaaataacaatgagttgtcattttatccaaatctaaaaaaaaaaaacatacatacagtatcaagttctggttaaagtagtagatgaactttatgtggtacataagagtatctatacagtttgtgggctgcatcttgctagaatatattacattataaaatgcaccatttatttactctgcgatcaaacccccaacttgccccaagtggaggaaccctcagacatttgcagagcagtcagtgtgctagtaagcagcattctttacaaatctatgaacatcaaggtctccttggaacagatgttctgtgaacaatttataaaactccctcctgttagacacttag

SEQ ID NO: 24208 - DNA, 448 bp, Homo sapiens
tcataatgcttaagtcataagatggtggctggcattttttaatttattactaaaagctaagatatttgcattatattgtgcaaatttcacagaacaatgttgcattttctgagataaggctctaattttttaaatagtgctacatttagttgaaagtttcagtcagctagttagctgagttgaatgaaaaatatagaactgtatgtacatttatcaaatgataaaatatgttcatttttgtaagaaatcagaaaaattaagacgcaatggtgaagaacattagtacataaatatagcagaacattctccataaaatattctgttttcattctgctttgttatttttatccagttatgtttaatttttcaagggtgagagattatgtatagtactgtaccaattaaccttccacttttatacaataaataattcttactaaaagcaata

SEQ ID NO: 24209 - DNA, 391 bp, Homo sapiens
tttttcttttttgagacggagtctcaatctgttgctaggctagagtgcagtggcataatctcagctcactgcaacctctgcctcctgagttcaagcgattcttgtgcctcagcctccctagtagctgtgactacaggcacgtgccaccatgcctggctaatttttgtatttttagtagagacggggtttcaccatgttggccaggctggtcttgaactcctggcctcaagtgattttcctgcctctgcctccccaagtgctgggattacaggcgtaagccaccacgaccagcctccgggcattattcttactgcccaggtaatagtatttattaaacatctctttctacagcctagtaaagtaaaaatataacaagcacatttttagaaaa

SEQ ID NO: 24210 - DNA, 485 bp, Homo sapiens
tcatggaaaaatgtcaccaaatcaggaagtcttttgttgtagaagccactggaaggggcgtaaagcccacctttcttttcatactgtctcccggtatttcctctgaaagcaggagttcagctgcacttgagattcttactaccctgtggctggtatgaggtgccaaacagggaaaggattggtcacttcaccaacgtaatgacagctctctcttagagacacattacacaaatcctcaggttaacttttttgcaagtcctttaataaatacaagattattttcataaaataactgccatgttctgatttatcctagcaatagcacctacaccccatttagttacaaccaccacaaaaagctctgatgttccaaactcaagatagacagggtcctctttatctgaagatactttccccaagtccctgcagctacaagaccatttggagaagcaaaggtattcgtaatgataacatattcactaatg

SEQ ID NO: 24211 - DNA, 370 bp, Homo sapiens
ttagtatgaaggtaaagaatgaagttagaaaactgagggtaactaataagaaccttatcaaatgtaaattaaataattatttctacctatccttgatctcgtcatcttttatccaatcttctctttaaatttctttaatgaaaatctgcaaacttggcatctctcagctttattcttccgaattcagaaatactgccaccttgtgaatactattagatatgagagcgatcacaaattccggtataaatctgctgaactataaaactgatgatctgctcttaaccactctaggcacaagcaaatcagatttgcaaaatgaaaaccagtgcctgatgaccacatctgtaaattacaggacagtttaacagtt

SEQ ID NO: 24212 - DNA, 322 bp, Homo sapiens
gcttatttcctaatactgctcaaaccaggctacccaaaggacttgtaattcaagtttcattctccagcaagtaaaaaagtaagatgtgttttcaaggtgtcattttcacaaacaattgtccatggtaaaaattattctacaataaaactacccggtgtcattatttttttaatatcctgttttctagtgtatgtttacatacatcaacataaattaggcacttatgagtccctgatttatttcccaactttaacaagacgaaaacacttttttgtcttttgtaccagactataagcacccagagagcaaaaaacttaattaa

SEQ ID NO: 24213 - DNA, 199 bp, Homo sapiens
taaaaattcttattatggatctgtgtttcatttccctcctctttgattttcaaaagttgtagtttctcttatagcactgagtgggaggaaacagacaggaagttcatataggctttccggagttcatgaccccttagctaaacatgtaagagtcagttaagcagaaaaggaggtttccaaaatagaaggaacagcgtga

SEQ ID NO: 24214 - DNA, 517 bp, Homo sapiens
cagaggtttcagtgagctgaggtcacaccaccaccctccagcctgggtgagagtaagaccccagctcaaaacaaacaaacaaacaaacaaaaccccagaagacctgtataacaccataggccaaatagccctaacagatgtgttcagagcagtccaccgacagctgtagaatacacattcttctcaagtgatatggaactttctctgggatagatcaaatgttgtttttaccacatacaatgaagttttttaaaaaagaaagaaaatcataaaatataaactctctttctttgaggctcttgtcattcacctataacatcttttctttctacattgctatcatcttctgactacctggttgatcctgtttctttatttgaattttaagaatatggttgtctttctctctagtaaaagtgcaaacaagtattctgaatgaaattgtattagtctgttttcacactactgataaagacatacccaagactgggtaatttataaataaaaagaggtttaa

SEQ ID NO: 24215 - DNA, 498 bp, Homo sapiens
tgggctccagttctaccagccccatgttgacatcgtgtccaacaagacaccaagagaagcagggagtggctgaccttcattttccatatcaacacacagggggccctctgcacgcaccaacatctttgtctcctgaaaaatggcctttgtcagttatttttaaaaactggtgttaatcctgagacacggagatactcccaggaagacatccgagcctggacacactgagatgaaaccagaaacactccgagaggaaaatgacattgattccagccctcaaagcaacgggacaaaaaacaaacaggaggcttccctcccgccccaggggcagcggccggtgtctgcggctctgcgggaagggctctcactgtgaccagattgtggcttctgattgtattgtagaatttctggcccagcttttaaggttcaaggcttcctccctttgcttttatcttattttcttgtttaataaagatacgcctgtgtgagaagcattgc

SEQ ID NO: 24216 - DNA, 196 bp, Homo sapiens
gatctcctgacctcatgatccgcccgccttggcctcccaaagtgctgggattacaggcgtgagccactgcacccggaccgtgaacaatgtttttaatgcctacatttctggccttttatccatctcagtgcttctatatatcatttcccacccacagagacaggatgctgcatgtcagcaatctttgaagcaagta

SEQ ID NO: 24217 - DNA, 388 bp, Homo sapiens
ggggcttgcaacaaacacataactagtctcccatgtcatgtttcctgcccaagttgcatgggcaagaaagctaaagagtacgcttctagtttgcaaagataaaactgaacttcatctgtagtcttttgtagtgtttgtgggccaaaaagacagatactccagatcctaaattaaaagcctaggatggtcaccgtcaaggaaccatccttgaggatgagccttactaaggcttgggactgagccttactaggaagtgcagcccaaccctgacccagctcaattcctgggcaagtgaggagactgatcacatcagtccaatttttcctacagatggaaaggctgtgctctctctggtgggaaaatcatctggatcctttatggcactgcc

SEQ ID NO: 24218 - DNA, 513 bp, Homo sapiens
acataccctcaatatgatgtgttagaagtggccctatacctctgcattcttcttccttgaaatgcataactccagtctaatcatgagataaatatccttgaaacccataactctagtcaaatcatgagataaacatcagaaataccttaactgagggcccagtactcctcaaaattgttaaggttatcaaaaacaagaaagtctgagaaactgtcataaccaagaagaggctaaggagatatgacaactaaatgtaatatggtatcctggatgggatcctggaatggaaaaaaaagacattaggtaaaaactaagcgaatctgaataaaatacagattttagtttataatgggtttatcaattatgacagatgtacgatactgatgttggatgttaataatacgggaacctgagtgtggggtacacaagacctgtatactatcttcacagtttttttgtatgtcaagaactactctaaaatatagtttttaaaataaatcaaattgaaaaatt

SEQ ID NO: 24219 - DNA, 414 bp, Homo sapiens
ccttagattgattttggctccgagattgaggggcctgagtctggaagctgaggtttttgaggttggggaacttaatttgagaagattatctaattttggcaaagtctttagctttttagtgccgtattttttttttcatataaaggatagaatatttaggccgggcacggtggctcatgcctgtaatcccagcactttgggaggctgaggtgggtggatcacttgaggtcagtagttcaagaccatcctggccaacatggtgaaacctcatctgtactaaaatacaaaaagttagccgagcatggtggcacgcgcccgtagtcccagatactcgggaggctgaggcaggggaatcacttgaacccgggaggcggaggttgcagttagcggagattacgccactgcactccagcc

SEQ ID NO: 24220 - DNA, 191 bp, Homo sapiens
gctctcagtcttgtgatgaagataaatcccaggcccaagtgactggatagcaggatggagagtaattgttggcagggggtggcatggatgaggcgctgggggatttgagatgagagaagttatccttagcttgcggggggagcgggtcatgaaagcttcacaatagaagtggctcttgacttcagtattca

SEQ ID NO: 24221 - DNA, 509 bp, Homo sapiens
tatccatacatctgaaaaagtaatactataaaagttgaatactataaatggtttatagaaaccaattctattatataatcacaccacacatgctcaattttttcctcatctgatacatctgttgtcaacttaaaatcgatctaattaaataacttgttactgggaggtgcttgattaaaaattgtgggggagaagtctgaataaatgtgacctgttcttccagacttacagagtactcaccctatcatctttggatgctacagttaacagcaaagatttgtaaggcatgatatgtacactctgttacataactgttagaagcagtaattattatttcccaaaaagaggggcagaaaaaatatttttgaaatacacagagtaggatgggttgggtggctcatgcctgtaatcccagtactttgggtggctgaggcaggcagactgcttgagcccaggaaaccaggcttgagaccagcctgggcaacatggtgaaactccttctctacata

SEQ ID NO: 24222 - DNA, 882 bp, Homo sapiens
agagaatctgctcctataacgttttaaaaatccccaaagtcccagagattagcacttgctatggattttggaactatggttcaagtctaagacaaccaatatgaataagttcaatggagaaggaagaagtagcattcagcacaagaaactgtagattgtttctcccacttgttactgcatctttgttcatttcacccatagcattgcatttgatgtctgaagtaattaccacaaaataaaggtaaactacatcttccaagatgtaccaacagaaaacattcgtctaattttgtcaacattgaatttttaggatttaaatcttgtcttaatgaagactctagggctaaaattcatggtcagttccataaaatgcatctcactttatttctgaatttttcacaacccctctattttcttacattaaagaacatctggataagttagaatagtgccaacttgtttgatttgttatatgattttcttgttaatgtgttgagtatgggaaataagggctttctgtgtgtcttgactcacaggaaaactgaaactgccaagggaagcaacattaaaacaactgggatagattgaatacatttgaaaaaataatttctggaaaaacgctatacatgctttttatgtttatatcttctttcttattaagacatgaatcagatccatgtgggcattcaaaacaaatttattttgggttatattctttacaagtcataatttttacctaaaattgtggaatatgcatgtgaattacacatgtgtagtaataaactcaactattgaatttttcctgtttcatttctaaatgactgaactgatggtaaacaaatttaatgaagtcagctaccatgttgaaaataaggatattag

SEQ ID NO: 24223 - DNA, 214 bp, Homo sapiens
cccttaccatcctgaaaaattctaaactaaaaatatattaactgtgatgtgatattaatcatgtacctataaagttatctgtttcaggatacaaatgcagttgcttcctttagttgaagcaagtctatgggatcttttactctgtcatgcagcctatatccactcccttaaaggctcaaccctaggcgctattccaagagtccatcccatcaat

SEQ ID NO: 24224 - DNA, 330 bp, Homo sapiens
agtgcccttggctagcctcaccctagaattatctcatttgctttctggggaagttacccgcctccaaccctgaactgacaatgctcagggaagcttgggggcgctttagtcggctaatgatccctacacctcatcctgctcttttattcgctattcctaattagagcaccaggtagaaactgtgctggcctggtgaaaagatcttggataagaggaggcagtctgccctcttgtacacctactgtccctgtgcccctggatacatgatgaaacgtctctgtgcttcagttccttcatctgtaaaatgaaattaaaatgaacctcctttgc

SEQ ID NO: 24225 - DNA, 559 bp, Homo sapiens
cctcagcctagctgggactacaggcgtgtgccaccataccgggctaactttataacgattttttgtagagatggagtctcactatgttgcccaggctgatcttgaactcctaggcctcccaaggtgctaggattacagcagtggttcctactgctccagccctgtgtcattttaaatactctccgttattattattttttgagacagagtcttgctctgttgcccaggctggagtgcagtagtgtggtctcggctcactgcagcctttgcctcctaggttcaagtgattctcctgcctcagcctccccagtagctgggattacaggtgcccaccacgactcccggctaatttttgtatttttggtagagacaaggtttcaccatgttgaccaggctggtcttgagctcctgatctctggtgatctgcccacctcagcctcccaaaatgctgggattacaggcgtgagccactgcgcctggcctaaaaatactttattttttagagcagtgttaagttcacaacaaaattgagcagaaaatacagagagttcccatacac

SEQ ID NO: 24226 - DNA, 496 bp, Homo sapiens
aatctggggaaataacattctaggcagaggagatttctaatacaaagcacctaaagggagaatcatcttgacttgtaaaaggaacagaaagtcactttatgtaaaaatttgtaagtaaggctggggagttttaattttattctgtgtaaggatggtggatagagtggaagtgctagatcacttagtctctgcagtaatccaagtgacaaataatggtggcttggaataggggtatagcaggggagtctggaatgaagcaaacttttggggacttgtttaggaggtagtatcagtggtagctagctaatctgttttgtagcctgataatcttggacaatgtgtttataatcatggaaggttgtggtgcattagcaagagggtactggagtcagaactggggttcacttcctagccttgtgaccctggacgagatgtttcacctctcctgaaggcacagattcttttttttttttttgtaacggagtctctgttgccc

SEQ ID NO: 24227 - DNA, 785 bp, Homo sapiens
aatctggggaaataacattctaggcagaggagatttctaatacaaagcacctaaagggagaatcatcttgacttgtaaaaggaacagaaagtcactttatgtaaaaatttgtaagtaaggctggggagttttaattttattctgtgtaaggatggtggatagagtggaagtgctagatcacttagtctctgcagtaatccaagtgacaaataatggtggcttggaataggggtatagcaggggagtctggaatgaagcaaacttttggggacttgtttaggaggtagtatcagtggtagctagctaatctgttttgtagcgctgatcttgaactcctaggcctcccaaggtgctaggattacagcagtggttcctactgctccagccctgtgtcattttaaatactctccgttattattattttttgagacagagtcttgctctgttgcccaggctggagtgcagtagtgtggtctcggctcactgcagcctttgcctcctaggttcaagtgattctcctgcctcagcctccccagtagctgggattacaggtgcccaccacgactcccggctaatttttgtatttttggtagagacaaggtttcaccatgttgaccaggctggtcttgagctcctgatctctggtgatctgcccacctcagcctcccaaaatgctgggattacaggcgtgagccactgcgcctggcctaaaaatactttattttttagagcagtgttaagttcacaacaaaattgagcagaaaatacagagagttcccatacac

SEQ ID NO: 24228 - DNA, 812 bp, Homo sapiens
cagtgcgcaaccgttcgctaactgaaatgatggcgactggaacgccagagtctcaagcgcggttcggtcagtccgtgaaggggcttctcacggagaaggtgaccacctgtggtactgacgtaatcgcgctcaccaagcaggtgctgaaaggctcccggagctccgagctgctaggtcaggcagctcgaaacatggtactccaggaagatgccatcttgcactcagaagatagtttaaggaagatggcaataataacaacacatcttcaataccagcaagaagctattcagaagaatgttgaacagtcatcggatctacaggaccagttgaatcatctgttgaaatagaatgacattaactcagaggagatacgtgttttatttgtgatagcaaattcctaaatgaacattaggcaagtggtatcattatcaggccagctgcagcctcttgccttgacctgcattcctagaatttctttgttgctgtaattcttgattaagtgaccttgactttcattttgtaattttgctaatcatcagcaaattcacttgcatgacgttactgccaaatatgaaggcagttgaattattatgagtgattgtggcagaggtttgtgccatggtgaaaactttgatgtttgtctgtgttcattggatccatctttttaaatgacattaccatgagtctgtgtcaaacctaaatatctttgtttgaatttaaaatgggactctatattgtgtagttcaggtcttcattgactaagagatgagagaaatctgacataagaaaatattgttttcactgcaggaata

SEQ ID NO: 24229 - DNA, 780 bp, Homo sapiens
ggttgaattttggaagcacttcttgaatcggattaacccatgctcttattgaattttttcatctgctctgtttagtttgatattaaagcaaaattaagaggtcttagtttttcctatagaacttttaatatgtcaaaagctatattgtctaaatttcagtacttaagcaaatactgagtagtgttttaaattcagaaatagagcttctattatgaacacatgagaatgatttttttctcttaatcattattaaggaaatattttaatttcatggtcatataatggtgataagtaatacctgattgtttccttttctgttctagtaactcagaggagatacgtgttttatttgtgatagcaaattcctaaatgaacattaggcaagtggtatcattatcaggccagctgcagcctcttgccttgacctgcattcctagaatttctttgttgctgtaattcttgattaagtgaccttgactttcattttgtaattttgctaatcatcagcaaattcacttgcatgacgttactgccaaatatgaaggcagttgaattattatgagtgattgtggcagaggtttgtgccatggtgaaaactttgatgtttgtctgtgttcattggatccatctttttaaatgacattaccatgagtctgtgtcaaacctaaatatctttgtttgaatttaaaatgggactctatattgtgtagttcaggtcttcattgactaagagatgagagaaatctgacataagaaaatattgttttcactgcaggaata

SEQ ID NO: 24230 - DNA, 637 bp, Homo sapiens
cagtgcgcaaccgttcgctaactgaaatgatggcgactggaacgccagagtctcaagcgcggttcggtcagtccgtgaaggggcttctcacggagaaggtgaccacctgtggtactgacgtaatcgcgctcaccaagcaggtgctgaaaggctcccggagctccgagctgctaggtcaggcagctcgaaacatggtactccaggaagatgccatcttgcactcagaagatagtttaaggaagatggcaataataacaacacatcttcaataccagcaagaagctattcagaagaatgttgaacagtcatcggatctacaggaccagttgaatcatctgttgaaatagaatgacatgtaagagtgctgtaggactcctttgcctaatgctgaggagtaaataccttacacagctgtcctctgggtttggttttctattttcttctccaaaagttaatttgggaggccgaggcgggtggatcacgaggtcaggagttcgagaccagcctggccaagatggtgaaaccccgtctctactaaaaatacaaagaattagctgggcgtggtggcgggcgcctgtaatcccagctactcgggaagctgaggcaagagaatcgcttgaacccaggaggtggaggt

SEQ ID NO: 24231 - DNA, 718 bp, Homo sapiens
ggtcactaaaaaatgttttagttttcaaagtggatcctttggaggaattttttcccctcatacatggaagcaagtcatggaaatggtagttctttccatttccaaagctgaattccaaggcaaataaactttatattggtaatagttacaagagagatgatcatatttttatctaagtgctctacaaaacaaaacttgagcaacttatccaaagtttattgggatttttaaaagttctgttatctttttagtgtctagaaaaatgtccctcctactcataagattttggacttagtttcttactaacaacattctctcttatgtattccgaggtccaggatacagaggctgaaactctgactggttttttgaatggcattgagtggattcttgaagaagtggaatctaagcgtgcaagatgattctcttttcagatcttgggaactgaaaccatttgaaatttattactaaggtcgtgatgtgaatatttgctcagtcagcccaccttgtcctgcctttttgcagataggctttcatttggacagctataactgctgtgttttttatattatttttactctttaccataaatcaattacaagaaaagagtttcagtcctagtatttagccccaaaatgaacctttaaacatttttttggtaatttttatattttctgtctttttaaaaatattaaattctggaaaaaacaaaaatgtg

SEQ ID NO: 24232 - DNA, 2044 bp, Homo sapiens
ggaggctgacgcgctagcgtggctctaagacgcgtcacccacgctgcgggcaagccatggcgggaagcgagccgcgcagcggaacaaactcgccgccgccgcccttcagcgactggggccgcctggaggcggccatcctcagcggctggaagaccttctggcagtcagtgagcaaggagagggtggcgcgtacgacctcacgggaggaggtggatgaggcggccagcaccctgacgcggctgccggtgagcgtcggccgcaggccgcggaggacagtggggccggcccgggccggagggacctcccctggagccccccggggcctggggaactctcgcgccccggcctgggtctggctccgtccatgcagccattcctggcagtgtagtcaccgagaagctacagttgatcagaagcgtcttggcgtggaccctggtgctccgcagggggcccgaacatctcagggaagcaccttcatggggcccctggggaccctcccgatcgccctcaggttttccacccgccaaaacaggcacatgtgactaggacaccctgaatgtccggttacggaaatgagacagttcccaacttgctgattagcttgggaaagcattccagcgtccctgttcccagcgtctttgattccggatcactgtaccaaaacacttggagggccaaggtttttaccctctcaagaggacattgtgcctgtggctgttattgtgtatttgaagaaacaaaacggcccctcagttgaaaataaatgacttaagttacaagtgcctcaagttacatcaaggccacgagaatgacacacataacttattgttaaactttggggtagataggtaaatgaagagaacaaaaattattgaaaattattacaattctttgtctcatttggactattgacacctctctccaatgtgtatatcaacgtgaaagctgcaggtttagaatgcctccaagtttctccttgcagaggtttttcataacattttaatagattctgtagaggaactaagatgacaaatttacggccgggcgcggtggctcacgcctgtaatcccagcactttgggagacccaggtgggcggatcacgaggtcaggagatcaagaccatcctggctaacacggtgaaaccccgtctctactaaaaatataaaaaattagccgggcttggtggcaggcgcctgtagtcccagctacttgggaggctgaggcaggagcatggcgtgaacctgggagacggagcttgcagtgagccgagatcttgccactgcactccagcctgggcgacagagcgagactgtgtctcaaaaaagaaaaagacaaatgtacactctttgatttggtctgatgataaaatcagataaaggttgatatgggttttattttgaaggacaaattatttccttaactaatttatgtaactaactggtatatccaaatatctctgaggaaaaattaaaggaactggtgattttgctggaaaaatagcaagacagtggttgctttttcaggaatgtttcaggtgtttcagaaattaaatgtttaacaactacgaaactaaaatgttcagttatgatcctttgctgatagcaggaaaataatagatttaattattaatggtagatttagttattaaaaatactagtcagttgaccttttgttatttatttgttgattatgtggtttatcacccaaaaactattttcttcattcctttttcctacctgctgctttcttctgtttcagattgatgtacagctatatattttgtcctttctttcacctcatgatctgtgtcagttgggaagtacaaatcattattggaatgaaactgtaagagatccaattctgtggagatactttttgttgagggatcttccttcttggtcttctgttgactggaagtctcttccagatctagaaatcttaaaaaagcctatatctgaggtcactgatggtgcattttttgactacatggcagtgtaagtatctagttttatgaattaaaaagaagctattaaattttcctgt

SEQ ID NO: 24233 - DNA, 668 bp, Homo sapiens
ggatcctggtaaatttttgttccctcgctttgttagttttttattttattattttcaaaactattaaaagtaatgcaaattaagggttttgacttacattccttaggacatgaatggcaagatgaattttctcatattatggcaatgacagatccagcctttgggtcttcgggaagaccattgttggttttatcttgtatttctcaaggggatgtaaaaagaatgccctgtttttatttggctcatgagctgcatctgaatcttctaaatcacccatggctggtccaggatacagaggctgaaactctgactggttttttgaatggcattgagtggattcttgaagaagtggaatctaagcgtgcaagatgattctcttttcagatcttgggaactgaaaccatttgaaatttattactaaggtcgtgatgtgaatatttgctcagtcagcccaccttgtcctgcctttttgcagataggctttcatttggacagctataactgctgtgttttttatattatttttactctttaccataaatcaattacaagaaaagagtttcagtcctagtatttagccccaaaatgaacctttaaacatttttttggtaatttttatattttctgtctttttaaaaatattaaattctggaaaaaacaaaaatgtg

SEQ ID NO: 24234 - DNA, 699 bp, Homo sapiens
tgctgctgtctcaagggagatagaaacaaaagctgtcttaggggaggagcaggaattccacttgtaccaaggatcttgcactgatacaaattaaatgtttgctgactctggaggagaggcaggaaatttgcagtggagacctttctaccaatacagggcagaattcagcagtcatgctggaacactgagaaagcctgcagcactgaggctctggtgcacagggcctacctaaggcctgaggctggaatgagaaaactgagaaatctccatgtccctaccaattaaggagcaacagcagactactgcagggatgggggaagggtgtggagaggctctccttgcctcttccccataacccccatggcacagttaacaagataggctgaaagctgagaacaagtagaaactctgagaaagaaactctggtactccagtgctgttactgagaacaagataggcagcagcatgctgctggaagaatttaaagtctgtgtgttacaaagttaactatagcaataaaagccaaatccagctcaactacagactagtttgattcagcctactgcattaataccctgaccgaagtatgatgcctgtttttaggagtaaatcctttttccttcagtctttattgttcttctacataaaacacctaacattaaatctaaaaattatgagacactcacaaaatcagaatga

SEQ ID NO: 24235 - DNA, 1438 bp, Homo sapiens
ggaggctgacgcgctagcgtggctctaagacgcgtcacccacgctgcgggcaagccatggcgggaagcgagccgcgcagcggaacaaactcgccgccgccgcccttcagcgactggggccgcctggaggcggccatcctcagcggctggaagaccttctggcagtcaattgatgtacagctatatattttgtcctttctttcacctcatgatctgtgtcagttgggaagtacaaatcattattggaatgaaactgtaagagatccaattctgtggagatactttttgttgagggatcttccttcttggtcttctgttgactggaagtctcttccagatctagaaatcttaaaaaagcctatatctgaggtcactgatggtgcattttttgactacatggcagtctatagaatgtgctgtccatacacaagaagagcttcaaaatccagccgtcctatgtatggagctgtcacttcttttttacactccctgatcattcagaatgaaccacgatttgctatgtttggaccaggtttggaagaattgaatacctctttggtgttgagcttgatgtcttcagaggaactttgcccaacagctggtttgcctcagaggcagattgatggtattggatcaggagtcaattttcagttgaacaaccaacataaattcaacattctaatcttatattcaactaccagaaaggaaagagatagagcaagggaagagcatacaagtgcagttaacaagatgttcagtcgacacaatgaaggtgatgatcaacaaggaagccggtacagtgtgattccacagattcaaaaagtgtgtgaagttgtagatgggttcatctatgttgcaaatgctgaagctcataaaagacatgaatggcaagatgaattttctcatattatggcaatgacagatccagcctttgggtcttcgggaagaccattgttggttttatcttgtatttctcaaggggatgtaaaaagaatgccctgtttttatttggctcatgagctgcatctgaatcttctaaatcacccatggctggtccaggatacagaggctgaaactctgactggttttttgaatggcattgagtggattcttgaagaagtggaatctaagcgtgcaagatgattctcttttcagatcttgggaactgaaaccatttgaaatttattactaaggtcgtgatgtgaatatttgctcagtcagcccaccttgtcctgcctttttgcagataggctttcatttggacagctataactgctgtgttttttatattatttttactctttaccataaatcaattacaagaaaagagtttcagtcctagtatttagccccaaaatgaacctttaaacatttttttggtaatttttatattttctgtctttttaaaaatattaaattctggaaaaaacaaaaatgtg

SEQ ID NO: 24236 - DNA, 1607 bp, Homo sapiens
atttgattcaaaggtgtgttgtctgttatagataatctcagcaagtgctgctgtatctcacttgctaggcaatacctgtacaatagctaaccattgcatcaagtgtatatgaggctgtggaattagattttgcccagggaatagtaataatagtaactaccatttatggtcatataaagtacttatcatttttacaaccctgagttatttctttcttttcttttttttttttttgagacggagctttgctctgtcgcccaggctggagtgcagtggagcgatctcggctcactgcaggctccgctcctgggttcacgccattctcctgccttatcctcccgagtggctgggactggaggcgcccgccaccacgcctggctgattttttgtatttttggtagagacggggtttcaccgtgttacccaggatggtcttgatctcctgacctcgtgatccacccaccttggcctcccaaagtgctgggattacaggcgtgagccactgcgcccggccaaccctgagttatttctgttgctcaaataatacagatgaagaaactgaaattcagactctatagaatgtgctgtccatacacaagaagagcttcaaaatccagccgtcctatgtatggagctgtcacttcttttttacactccctgatcattcagaatgaaccacgatttgctatgtttggaccaggtttggaagaattgaatacctctttggtgttgagcttgatgtcttcagaggaactttgcccaacagctggtttgcctcagaggcagattgatggtattggatcaggagtcaattttcagttgaacaaccaacataaattcaacattctaatcttatattcaactaccagaaaggaaagagatagagcaagggaagagcatacaagtgcagttaacaagatgttcagtcgacacaatgaaggtgatgatcaacaaggaagccggtacagtgtgattccacagattcaaaaagtgtgtgaagttgtagatgggttcatctatgttgcaaatgctgaagctcataaaagacatgaatggcaagatgaattttctcatattatggcaatgacagatccagcctttgggtcttcgggaagaccattgttggttttatcttgtatttctcaaggggatgtaaaaagaatgccctgtttttatttggctcatgagctgcatctgaatcttctaaatcacccatggctggtccaggatacagaggctgaaactctgactggttttttgaatggcattgagtggattcttgaagaagtggaatctaagcgtgcaagatgattctcttttcagatcttgggaactgaaaccatttgaaatttattactaaggtcgtgatgtgaatatttgctcagtcagcccaccttgtcctgcctttttgcagataggctttcatttggacagctataactgctgtgttttttatattatttttactctttaccataaatcaattacaagaaaagagtttcagtcctagtatttagccccaaaatgaacctttaaacatttttttggtaatttttatattttctgtctttttaaaaatattaaattctggaaaaaacaaaaatgtg

SEQ ID NO: 24237 - DNA, 1340 bp, Homo sapiens
ggaggctgacgcgctagcgtggctctaagacgcgtcacccacgctgcgggcaagccatggcgggaagcgagccgcgcagcggaacaaactcgccgccgccgcccttcagcgactggggccgcctggaggcggccatcctcagcggctggaagaccttctggcagtcagtgagcaaggagagggtggcgcgtacgacctcacgggaggaggtggatgaggcggccagcaccctgacgcggctgccgattgatgtacagctatatattttgtcctttctttcacctcatgatctgtgtcagttgggaagtacaaatcattattggaatgaaactgtaagagatccaattctgtggagatactttttgttgagggatcttccttcttggtcttctgttgactggaagtctcttccagatctagaaatcttaaaaaagcctatatctgaggtcactgatggtgcattttttgactacatggcagtctatagaatgtgctgtccatacacaagaagagcttcaaaatccagccgtcctatgtatggagctgtcacttcttttttacactccctgatcattcagaatgaaccacgatttgctatgtttggaccaggtttggaagaattgaatacctctttggtgttgagcttgatgtcttcagaggaactttgcccaacagctggtttgcctcagaggcagattgatggtattggatcaggagtcaattttcagttgaacaaccaacataaattcaacattctaatcttatattcaactaccagaaaggaaagagatagagcaagggaagagcatacaagtgcagttaacaagatgttcagtcgacacaatgaaggtgatgatcaacaaggaagccggtacagtgtgattccacagattcaaaaagtgtgtgaagttgtagatgggttcatctatgttgcaaatgctgaagctcataaaagtccaggatacagaggctgaaactctgactggttttttgaatggcattgagtggattcttgaagaagtggaatctaagcgtgcaagatgattctcttttcagatcttgggaactgaaaccatttgaaatttattactaaggtcgtgatgtgaatatttgctcagtcagcccaccttgtcctgcctttttgcagataggctttcatttggacagctataactgctgtgttttttatattatttttactctttaccataaatcaattacaagaaaagagtttcagtcctagtatttagccccaaaatgaacctttaaacatttttttggtaatttttatattttctgtctttttaaaaatattaaattctggaaaaaacaaaaatgtg

SEQ ID NO: 24238 - DNA, 2374 bp, Homo sapiens
ggaggctgacgcgctagcgtggctctaagacgcgtcacccacgctgcgggcaagccatggcgggaagcgagccgcgcagcggaacaaactcgccgccgccgcccttcagcgactggggccgcctggaggcggccatcctcagcggctggaagaccttctggcagtcagtgagcaaggagagggtggcgcgtacgacctcacgggaggaggtggatgaggcggccagcaccctgacgcggctgccggtgagcgtcggccgcaggccgcggaggacagtggggccggcccgggccggagggacctcccctggagccccccggggcctggggaactctcgcgccccggcctgggtctggctccgtccatgcagccattcctggcagtgtagtcaccgagaagctacagttgatcagaagcgtcttggcgtggaccctggtgctccgcagggggcccgaacatctcagggaagcaccttcatggggcccctggggaccctcccgatcgccctcaggttttccacccgccaaaacaggcacatgtgactaggacaccctgaatgtccggttacggaaatgagacagttcccaacttgctgattagcttgggaaagcattccagcgtccctgttcccagcgtctttgattccggatcactgtaccaaaacacttggagggccaaggtttttaccctctcaagaggacattgtgcctgtggctgttattgtgtatttgaagaaacaaaacggcccctcagttgaaaataaatgacttaagttacaagtgcctcaagttacatcaaggccacgagaatgacacacataacttattgttaaactttggggtagataggtaaatgaagagaacaaaaattattgaaaattattacaattctttgtctcatttggactattgacacctctctccaatgtgtatatcaacgtgaaagctgcaggtttagaatgcctccaagtttctccttgcagaggtttttcataacattttaatagattctgtagaggaactaagatgacaaatttacggccgggcgcggtggctcacgcctgtaatcccagcactttgggagacccaggtgggcggatcacgaggtcaggagatcaagaccatcctggctaacacggtgaaaccccgtctctactaaaaatataaaaaattagccgggcttggtggcaggcgcctgtagtcccagctacttgggaggctgaggcaggagcatggcgtgaacctgggagacggagcttgcagtgagccgagatcttgccactgcactccagcctgggcgacagagcgagactgtgtctcaaaaaagaaaaagacaaatgtacactctttgatttggtctgatgataaaatcagataaaggttgatatgggttttattttgaaggacaaattatttccttaactaatttatgtaactaactggtatatccaaatatctctgaggaaaaattaaaggaactggtgattttgctggaaaaatagcaagacagtggttgctttttcaggaatgtttcaggtgtttcagaaattaaatgtttaacaactacgaaactaaaatgttcagttatgatcctttgctgatagcaggaaaataatagatttaattattaatggtagatttagttattaaaaatactagtcagttgaccttttgttatttatttgttgattatgtggtttatcacccaaaaactattttcttcattcctttttcctacctgctgctttcttctgtttcagattgatgtacagctatatattttgtcctttctttcacctcatgatctgtgtcagttgggaagtacaaatcattattggaatgaaactgtaagagatccaattctgtggagatactttttgttgagggatcttccttcttggtcttctgttgactggaagtctcttccagatctagaaatcttaaaaaagcctatatctgaggtcactgatggtgcattttttgactacatggcagttagagacggggtttcaccgtgttacccaggatggtcttgatctcctgacctcgtgatccacccaccttggcctcccaaagtgctgggattacaggcgtgagccactgcgcccggccaaccctgagttatttctgttgctcaaataatacagatgaagaaactgaaattcagactgtaagtggctcatataactaaaagtagtgaggcttggtcaggtctatccagcttcaaagttgttttgtgtttgttttttccccttcatgagttacaaggtttctaataaaaggattttgttaggttagtgattttgttaaccagcttgacttatttgaaggactttaggttttattttgatttgggcaacttttaatttttgata

SEQ ID NO: 24239 - DNA, 1516 bp, Homo sapiens
ggaggctgacgcgctagcgtggctctaagacgcgtcacccacgctgcgggcaagccatggcgggaagcgagccgcgcagcggaacaaactcgccgccgccgcccttcagcgactggggccgcctggaggcggccatcctcagcggctggaagaccttctggcagtcagtgagcaaggagagggtggcgcgtacgacctcacgggaggaggtggatgaggcggccagcaccctgacgcggctgccgattgatgtacagctatatattttgtcctttctttcacctcatgatctgtgtcagttgggaagtacaaatcattattggaatgaaactgtaagagatccaattctgtggagatactttttgttgagggatcttccttcttggtcttctgttgactggaagtctcttccagatctagaaatcttaaaaaagcctatatctgaggtcactgatggtgcattttttgactacatggcagtctatagaatgtgctgtccatacacaagaagagcttcaaaatccagccgtcctatgtatggagctgtcacttcttttttacactccctgatcattcagaatgaaccacgatttgctatgtttggaccaggtttggaagaattgaatacctctttggtgttgagcttgatgtcttcagaggaactttgcccaacagctggtttgcctcagaggcagattgatggtattggatcaggagtcaattttcagttgaacaaccaacataaattcaacattctaatcttatattcaactaccagaaaggaaagagatagagcaagggaagagcatacaagtgcagttaacaagatgttcagtcgacacaatgaaggtgatgatcaacaaggaagccggtacagtgtgattccacagattcaaaaagtgtgtgaagttgtagatgggttcatctatgttgcaaatgctgaagctcataaaagacatgaatggcaagatgaattttctcatattatggcaatgacagatccagcctttgggtcttcgggaagaccattgttggttttatcttgtatttctcaaggggatgtaaaaagaatgccctgtttttatttggctcatgagctgcatctgaatcttctaaatcacccatggctggtccaggatacagaggctgaaactctgactggttttttgaatggcattgagtggattcttgaagaagtggaatctaagcgtgcaagatgattctcttttcagatcttgggaactgaaaccatttgaaatttattactaaggtcgtgatgtgaatatttgctcagtcagcccaccttgtcctgcctttttgcagataggctttcatttggacagctataactgctgtgttttttatattatttttactctttaccataaatcaattacaagaaaagagtttcagtcctagtatttagccccaaaatgaacctttaaacatttttttggtaatttttatattttctgtctttttaaaaatattaaattctggaaaaaacaaaaatgtg

SEQ ID NO: 24240 - DNA, 1727 bp, Homo sapiens
ggaggctgacgcgctagcgtggctctaagacgcgtcacccacgctgcgggcaagccatggcgggaagcgagccgcgcagcggaacaaactcgccgccgccgcccttcagcgactggggccgcctggaggcggccatcctcagcggctggaagaccttctggcagtcagtgagcaaggagagggtggcgcgtacgacctcacgggaggaggtggatgaggcggccagcaccctgacgcggctgccgattgatgtacagctatatattttgtcctttctttcacctcatgatctgtgtcagttgggaagtacaaatcattattggaatgaaactgtaagagatccaattctgtggagatactttttgttgagggatcttccttcttggtcttctgttgactggaagtctcttccagatctagaaatcttaaaaaagcctatatctgaggtcactgatggtgcattttttgactacatggcagtctatagaatgtgctgtccatacacaagaagagcttcaaaatccagccgtcctatgtatggagctgtcacttcttttttacactccctgatcattcagaatgaaccacgatttgctatgtttggaccaggtttggaagaattgaatacctctttggtgttgagcttgatgtcttcagaggaactttgcccaacagctggtttgcctcagaggcagattgatggtattggatcaggagtcaattttcagttgaacaaccaacataaattcaacattctaatcttatattcaactaccagaaaggaaagagatagagcaagggaagagcatacaagtgcagttaacaagatgttcagtcgacacaatgaaggtgatgatcaacaaggaagccggtacagtgtgattccacagattcaaaaagtgtgtgaagttgtagatgggttcatctatgttgcaaatgctgaagctcataaaagtaagtactcatatgtacatttttaagcacattgttcttttcaaagcaaatggaaaatacctttttagactttactgtggcttcttaagaatatgatggcttattttatcaatgtgattttctgacccttactattaatagtgtgttctcacacttttgtgtgtattaggatcacctgggaagcttgttaaacatgttaacaagctgattcctaccctggtggattttattcctagatttgggttgtgtgaatcagatttgggcatctgttttttccaagcacccagggaattctgatgcattccaaagtttggtactagagctatacaatatttttttgctttatgcttctgcatttttttgatactgacattttgtctgcttctggctttattcaaataatctatgcaaataactatgaaaaattttatctttgttttatccaaatagtaaagagatgtgatggtagggtgttaagtagattagttgagaacactattcatatattctgaataattgccattcagaatgctatttttgtgtgaaatcaaaatatcattgggccatgagctagtattataatatctttcccaaatcctttgtgaacaaggtagaatataaatacataatatattgtatatatattatagttctctaatacactggtttgaatttctattcaatttattttccctgtgatctgttaggcatgaaagcagttgcaattactttctgttattacagggctatctataaaaagaaaacttagaagc

SEQ ID NO: 24241 - DNA, 1690 bp, Homo sapiens
ggaggctgacgcgctagcgtggctctaagacgcgtcacccacgctgcgggcaagccatggcgggaagcgagccgcgcagcggaacaaactcgccgccgccgcccttcagcgactggggccgcctggaggcggccatcctcagcggctggaagaccttctggcagtcagtgagcaaggagagggtggcgcgtacgacctcacgggaggaggtggatgaggcggccagcaccctgacgcggctgccgattgatgtacagctatatattttgtcctttctttcacctcatgatctgtgtcagttgggaagtacaaatcattattggaatgaaactgtaagagatccaattctgtggagatactttttgttgagggatcttccttcttggtcttctgttgactggaagtctcttccagatctagaaatcttaaaaaagcctatatctgaggtcactgatggtgcattttttgactacatggcagttagagacggggtttcaccgtgttacccaggatggtcttgatctcctgacctcgtgatccacccaccttggcctcccaaagtgctgggattacaggcgtgagccactgcgcccggccaaccctgagttatttctgttgctcaaataatacagatgaagaaactgaaattcagactctatagaatgtgctgtccatacacaagaagagcttcaaaatccagccgtcctatgtatggagctgtcacttcttttttacactccctgatcattcagaatgaaccacgatttgctatgtttggaccaggtttggaagaattgaatacctctttggtgttgagcttgatgtcttcagaggaactttgcccaacagctggtttgcctcagaggcagattgatggtattggatcaggagtcaattttcagttgaacaaccaacataaattcaacattctaatcttatattcaactaccagaaaggaaagagatagagcaagggaagagcatacaagtgcagttaacaagatgttcagtcgacacaatgaaggtgatgatcaacaaggaagccggtacagtgtgattccacagattcaaaaagtgtgtgaagttgtagatgggttcatctatgttgcaaatgctgaagctcataaaagacatgaatggcaagatgaattttctcatattatggcaatgacagatccagcctttgggtcttcgggaagaccattgttggttttatcttgtatttctcaaggggatgtaaaaagaatgccctgtttttatttggctcatgagctgcatctgaatcttctaaatcacccatggctggtccaggatacagaggctgaaactctgactggttttttgaatggcattgagtggattcttgaagaagtggaatctaagcgtgcaagatgattctcttttcagatcttgggaactgaaaccatttgaaatttattactaaggtcgtgatgtgaatatttgctcagtcagcccaccttgtcctgcctttttgcagataggctttcatttggacagctataactgctgtgttttttatattatttttactctttaccataaatcaattacaagaaaagagtttcagtcctagtatttagccccaaaatgaacctttaaacatttttttggtaatttttatattttctgtctttttaaaaatattaaattctggaaaaaacaaaaatgtg

SEQ ID NO: 24242 - DNA, 1497 bp, Homo sapiens
ggaggctgacgcgctagcgtggctctaagacgcgtcacccacgctgcgggcaagccatggcgggaagcgagccgcgcagcggaacaaactcgccgccgccgcccttcagcgactggggccgcctggaggcggccatcctcagcggctggaagaccttctggcagtcagtgagcaaggagagggtggcgcgtacgacctcacgggaggaggtggatgaggcggccagcaccctgacgcggctgccgattgatgtacagctatatattttgtcctttctttcacctcatgatctgtgtcagttgggaagtacaaatcattattggaatgaaactgtaagagatccaattctgtggagatactttttgttgagggatcttccttcttggtcttctgttgactggaagtctcttccagatctagaaatcttaaaaaagcctatatctgaggtcactgatggtgcattttttgactacatggcagtctatagaatgtgctgtccatacacaagaagagcttcaaaatccagccgtcctatgtatggagctgtcacttcttttttacactccctgatcattcagaatgaaccacgatttgctatgtttggaccaggtttggaagaattgaatacctctttggtgttgagcttgatgtcttcagaggaactttgcccaacagctggtttgcctcagaggcagattgatggtattggatcaggagtcaattttcagttgaacaaccaacataaattcaacattctaatcttatattcaactaccagaaaggaaagagatagagcaagggaagagcatacaagtgcagttaacaagatgttcagtcgacacaatgaaggtgatgatcaacaaggaagccggtacagtgtgattccacagattcaaaaagtgtgtgaagttgtagatgggttcatctatgttgcaaatgctgaagctcataaaaggcagaattcagcagtcatgctggaacactgagaaagcctgcagcactgaggctctggtgcacagggcctacctaaggcctgaggctggaatgagaaaactgagaaatctccatgtccctaccaattaaggagcaacagcagactactgcagggatgggggaagggtgtggagaggctctccttgcctcttccccataacccccatggcacagttaacaagataggctgaaagctgagaacaagtagaaactctgagaaagaaactctggtactccagtgctgttactgagaacaagataggcagcagcatgctgctggaagaatttaaagtctgtgtgttacaaagttaactatagcaataaaagccaaatccagctcaactacagactagtttgattcagcctactgcattaataccctgaccgaagtatgatgcctgtttttaggagtaaatcctttttccttcagtctttattgttcttctacataaaacacctaacattaaatctaaaaattatgagacactcacaaaatcagaatga

SEQ ID NO: 24243 - DNA, 372 bp, Homo sapiens
agcatttatattagaaatcaagaaagaggcaagctgcaggctatctaataataatacaaataataataactaacaattgcccctctcttccatccttagttcttagcagcctatgtttattctcaaagaaagtcctcttccttcatcttagtttatatggtaatagaaatgttagtttaaaaattgtgttctacaccacatgctgatgaaggtagttttagcattagatttacattaggaaagaagactcagaaacagggtactatgtaaccgtctctttcacatgttatctcatttatttctcatgggaatcctttaaggtccatattgttacccatttacttgtacaaatgtggaaaatgaagccctata

SEQ ID NO: 24244 - DNA, 366 bp, Homo sapiens
gatgagagcagatggacacccggtttccccatcctgtcctccctatctcagcacccagcagaggcgcgcttccacagctggcccccttgtcaccctttccagtttgcattttcctgccctttcgaaagaaccagcaggggtgaggtggtctattttcatgctgatgatcaactaactctgtggccaaggacagctgtgtcacctctcgctcccagactggcaggggaagcggcccctggatgaatgtccctttcgacaggtgaatctgcaactcttcaaactgcggaggcaccctcccctgaccctccttcagacccctgccagttcttctcaaaacagcttgtttagaaatttgggggctgggaa

SEQ ID NO: 24245 - DNA, 256 bp, Homo sapiens
ccttatgggatcaagatggatgcatcagataacatccacaacagtctttcagaaggtacataggcagatcttatttgactatttcttgtaaaaaaaaaaaaaaaaaaaagctcataaaagctaaagtccaactcagtaagagaagagtcttccaagttctaaatttagctataagagactagctttatcaaaggttaatacctgtgaaacccagaggagttggcaatgtatctcctatctagactcacttccataa

SEQ ID NO: 24246 - DNA, 498 bp, Homo sapiens
gggagttgacattagccattagtgtctgaatgacatggccatggtggcagaggtggaggtcctgcctgggtccaacaacatgggctctcactcaccgggaccgacttctgctactgctatgttcaacctgccagcaacagagactaatgcggagactccaaaatggcatgatacctcaaggagaccaactggacacttgaaggtctcatatgggctcacgtgctctgcttgagctcctctttcctgtgtcaccatctaaaaagtatccttggtcagaaagcttaatacctcctctgaagactgataatatacatcatcttcctggaccagtctacaagtgagggacagtgaatattttgaatggcagcttttagataacaaatcctcaaagagagatagagtcttactcatctctaacatgtgcttgactgtggaagactgccaattaataatgattgagtgatttgctaaataaataaaatctctgaacattgcagt

SEQ ID NO: 24247 - DNA, 436 bp, Homo sapiens
acattgggaatcgttgtcacagcaaggtagtttgcattccaaatcccagagccacacgttcactgtgtgtgcccatgctccagacactggtttagccatcatagagagctggactgtgccccaactccagagcagctcaaactgtgtggatatcaatattctcattcttagctgcccagctatttcacaggaatctgcaccttgattctgttaccaaggtggcagcagaggtgcatgtgccctgggcataagtgctgttactgccctgggtcccagaaccatgctccctccacacattcctgtgcttcacatctcagttctgcagccactccattggcaccactaatcaaatactcatgccactaccaatgcaagcaagctgacaagtcagacccggaaccaagagggattttatcagcaaaacttcctcactgag

SEQ ID NO: 24248 - DNA, 363 bp, Homo sapiens
ctccctccagtacaaatggctaggactagtttttgagtgtggtcaaacccacatcacctctctgaagagaatggctgactagtatggtcaaatgctcaattatcaagccatgggtaataagaaacttaactatttcctccagcatccccatgtattcagatcccacagggagataccaatgactataataattttggagtgtaaatgtgtttacccacaaaggcaagaaaacctttgtggtatataacctttggttatatagataactgccaaaaacttttttttaactgaaatgtttgagtaagtgactttaagatgagagtctgtccattaatgtatgtctattaaatgactttgaatcaa

SEQ ID NO: 24249 - DNA, 467 bp, Homo sapiens
acataattccctctcacttctaaggaacgctcttgctttgcttgtgaaatacgaacctctccccatctctcttcttttcctctctaccctctcttggctcccacattttagagaggacaagaactatcttactacagatctttttgtgagcattaataattgaaaataaatatttaggccaggcacagtggcttataactgtaataccagcactttaggaggctgaggcagggggatttaattgaactcaagagtttgagaccagtctggacaacatagtgagataccccactcatctctacaaaaaaatctaaaaattagccaggtgtggtggtgcacacccatagtcccagctatccaggaggctggggcaggaggattgcttgagcccaggagaacaaggctgcagtgagccatgatcataccactgcactccaggctgggtgacagagcaaaaccctgtctca

SEQ ID NO: 24250 - DNA, 498 bp, Homo sapiens
tatactgtgttaagccatcaagatacaggattatctaacttataaaatgggaagggttgttcctctcagaactttggatattcaatgagataatgactataagagctttgatctgtagagcacattacaaatttggtaaatttttgaaaaatgtcattaacagattcctccagtctgtatgaagctgtaaaatgttttagaatctttttccatttcacaactcctaaatattaggacaaattccagtatagtgaattttaaaggaacgtttaaattgtttttgaataaaagtaagaccttacttggaacttagggactgtttctttctttgtgttatttatgcatggtgagttattgaagggaagatagagctacaaagtgtctctctgctttcccttaagtatggttgtaatgaaatttgaactatattcaaattttcatggttaaaaacacttctagaacaattaggttgagatcagtctcaggaaaaaaaaaaaa

SEQ ID NO: 24251 - DNA, 305 bp, Homo sapiens
ctcaaatctcctttgtatcttggataagaccacttctctctcgggcttgtttcttatagtcaaaagcgcaggaatttagttgatctcccaagttactttggaccttaaattctgttttatggttgttcattttctatgtagtttagatttggttcattggactgatttgtgttctgtgtgcttttaaaattcaggaagatgtgactaggatagataaagcaaacatataaacactcagtttcattgacttaagtataaagactaacatgtttctcattagttataataaccttaaacttgatatg

SEQ ID NO: 24252 - DNA, 1446 bp, Homo sapiens
gttttttgaatgatctctgctccctggctctatgataggaattctcaacctgagtgaacaattcaaactgagattacttgtgtttagactcatatattttgataacatatgacttctccagtatgccccagaaagctgctaataacttgctcaacctgaaatttacagttttccaaattacaggttggcagagatactggattgataacaacatccacagttatcatataatcattcttatgctgtaaacaaaattattttggttagcagaatttaataattaactgttaactacatactaggcaatattgtagccactttatgtgcttcatgacaccttatgggataggtactattatcctcattttgcagatgaggaaactgaggtacaaggaggtattttctcaaggtcacacaactagggagtggtggcattagaatgggaacataggcagtctttctccaaagcctatgctgtgctgcctcttgttggagagtaaacctgttttacagtgtgtgtagtatggaagcagcataataataagaatagctgttccttattgagccattactgtggcagacaccgtactataagctgtggtatcaccattatctcatttgaatctcatagtagacctatcagttagaggtatgtaaatgcttcctcctctcccagcacctttacagatgaggatgctgagccctagaggtgaagaaagttgtctaatgacagagtgcttgtaagaggtaaagccaagacttgaagctctttcttgcagttactggatttctcctaatttacgggaactaatacagtacagtagctaaggatgcaagtactgaaaccagaaatcttgcctcaaatgccatttctgccacttgagctgtgtactttggacaaattaatctaatctttcccatttgaaagtcagacataatgtcttccctagaggcttgtgaggattaagtgaggcaagtgtatgtaaatgggctgagatcagagcttggctcacaacactcagtaatgatcactgccaattttttttggtatataaataaataaatacactatttcccccatgtttccaatttttaagacattgtatagtgaatttattgtatctttctcagattaacaattgcacacagtgcttgaaatttagaggtatttcacctgaaaagatgtctagagattgaaagaaaacatgctgggcatatgatttgaaaatataaataacatgctatttaaaaataagtttaccctatgttttctatcttttctggcacctagatataccatttaataagtaatagcaaggataatcatttttttaagccctggaaaatcttgattaaagaggacatttcagtattgcaaataaatgcatggtatttgtgtaacattgtggaaactaataaacacaaattgtattatagcaaaaaaaa

SEQ ID NO: 24253 - DNA, 636 bp, Homo sapiens
ttcctcggtgtcaacaccatccatctctgagggcgctggaccctgaggtggcccgagcttcacaggatcaccgccttggggtaggggcgcccgggcctggcatttcctcctaggaaggctcggtgagactgggatgggcatgcggctctccgctcgagcccaactccggtgccacctgcaccacggaggggtgaccccagggtcagggtcagagcggcttctcagaattcagcttgccacctctccgcggaccctgccttcatctcgtgcctcctcagagccctctgcgggcgcatgaagggcctttttttttttttttttttttttttttggcacaggtggaccaacggggggtgtgactgtgggcaccgtgcgcggaggcggaggctcatctggttcccaccctccgtgccgctggatgccccaggattttctccaaccggggtcccggcttggagccctccttggtgcgagctttggctcagcaatggggaaagcgggaatgggtctcgcccttgtggctgcctggtggaagcggcggttttgacacacgaatagtcgtggggagcagatccagagagggcgcatttgcaataataacgcttagtttatctctgccagaggggcgggaacagg

SEQ ID NO: 24254 - DNA, 372 bp, Homo sapiens
gttcccacccaacgctctctcgcccacttctactggggcccacttcctctcctgctctctctgtctcaacgtgattgactttcttgtgctgcccaggacttcttgcccacgtgcgccttcaaaacggtaagagctgcaactgaacgtgtgagacatggtgcagataggctgagaggcggcgggagagatgcccatgaactcaagtacccggacacgccctccacttctaccaccacgagtaacaccgcccccacgggaccgctctcgaggtcccccaagccaaggtgaggcaagtcccagttgaatgtcatcccgttcctcttgggcacggcggaccgctctcgcccttaaaggtgcgttgacgtggaaggt

SEQ ID NO: 24255 - DNA, 499 bp, Homo sapiens
agccaaaatgttggctataccaacacaaagcactaaatttttcatttttaacttggatattaaagcaaggatagatgatttggttaaggatgtatagaaaattattctactgtctttcattttcctctgtgtaaatgtataattcctaggaggaaaagaaaaatgttttctgcctacatatgtatcctctagtagcaaaagttgggcttagggtaggaataaggtggaaagacaaggagatatagagaaattagaaatttgtactatatgtttacatgcttatgtaaataaaattataaaagtgttgaaaatctgttcttaaaaatttcttgaattatatttataaatatgaaaatgtttgaagcagcacaatttgatggtttcacattaattcactgtgtaaacaaacctaaactaaattgaaaagcagtgttacatattattaaggtattgttgcttttgaaataaacttgcccacttcaaatgcttaaaaaaaaaa

SEQ ID NO: 24256 - DNA, 724 bp, Homo sapiens
tacaactagatcataagacccagcagcagggagctagttttattatatatttgtttctctagcacctaactaaatatccttatacacaataaatactaaagataatggtctgtgtaggtaacattgaggatatgaatagtatgaggtgatttcactagctgactactagtatgctagggctgttattacagaataccgtagactaaatggcttaagcaacagaaatttgttttcttacaattctggaaactggaagttgcaaatcaaggcaccggcaaggttatcctctctccttgtcttgcagatggtcacctttttgctgtgtccacacgagcttttctctgcgagtacactcctgatttctctttctcttataaggataccagtcctattggattagggccccagctttatgatctatttaacctcaattacctctgttaaaggccttctctccaaatagagtcacattgaggaattagggcttcaccatatgaatttttcagggagcaaaatttagcctgtaacaatgacctcctgaagataggtaggtatgccaagttgctaagatattaaatagaatccacactagatacttcagtaaagaaaatgatgtatagggaattgataaagcagatgctggagaactgaaatgcaaaatggaaaattgaagtaacaccaaggtaataacttcctgaatcagctacaaccccatgggctgggg

SEQ ID NO: 24257 - DNA, 436 bp, Homo sapiens
ctcttccagctctgttaatcaatggatcttttagaggtctggagggtcagccatacttcggccccactaggaagatggggcagtgggaaagggctttgagagatgtggcaaggtggcgcttccccattggttctttcatgacctgacttgctgacaattgcaccaggactttcctagtctcatgaagaatcagtgaaggtggccaggtgtgaagggaacaggagggacttgcttcttcaggaaacacttgagaccagagttcagcaacctctctgaccctgaaaggccgtcatctggaccaagcaggctcagagaggaccacaactaaactgaagtttatctgcaagggggaagaaaaaagtagagaggaaaagtcaggcaaggagaaaagaatgaggaagggaaggaggaaataatcacacttcaaccctcttcc

SEQ ID NO: 24258 - DNA, 463 bp, Homo sapiens
  misc_feature (42)..(42): n is a, c, g, or t
taaaataagaactcctataaaccttcactgataaaatccctntcagttttctccagttatcccaggtaacgtcctttatagcaaaaggatccggttcaggatcactcatacccagctgtcatatctttccagtctccttcattctagaagcattcttcattcttccttcatctttcatgacactgacacttttaattacaggccagctgatgtgtagaatgtccttccttttcttaggagatgttttctgtccttccttgaaaaccccactagtgttacctgccacgaggagagctaggcgctctgccccctaccccaagctggttgctctctcttacaacgcttcattaatcaagtacccttttttggagcattgatgatattcattcatccttttagccagtaaatattttttgatgtctattacgtgccaaatgggatacatttaagaacaaagcagacc

SEQ ID NO: 24259 - DNA, 315 bp, Homo sapiens
acattgagcctagtggtcatttattgactagacatcacagatgtactctgtgtcaacagaaaacccatacctctgttcaactttgggactttcagaactcacctgaaccaaccaatcagaacttagcttcatcaagtaattagaactaagcaagtttgaatccttcatttgcataaatggacttgagtgggaacccggacaggaacttttgctgtcaaaactgaaacctccttttgctccctggaaggaaccttcattttagaccacaggtcacatctccccattttgcaaactgcttagtggaataaagtctct

SEQ ID NO: 24260 - DNA, 534 bp, Homo sapiens
ggatgcatggctagagcccacgccaggtccctcctcagcctcctcacaaaggaccgaatgacttggctctgtgatcccatcccccagagactttggtgtgactgtggtgacccttggcatagcgcacccccccgactgcctcctcatctcaaaactttccaaaccatgacttttatagcagggctttaggaatcgcctggctctaccctctcacttcatggctacagatacttgtgccctgagagagcaagtgaatttcccaaagccaacagcaagccctctgattgctgctctaccaaaccaaaatgatttcagttctcatgaaacctaaggcctgactaaggaagattaagaaacctggtggtggtcgggtcctgtagtggggtgggaggaggggggagggatagtattaggagatatacctaatgtaaatgacgagttaatgagtgcagcacaccaacatggcacatgtatacatatgtaacaaacctgcaggttgtgcacatgtaccctagaacttaaagtataataaaa

SEQ ID NO: 24261 - DNA, 1861 bp, Homo sapiens
gatctcggctcactgcaagctccgcctcccgggttcatgccattctcctgcctcagcctcccgagtagctggtactacaggcgcctgccaccacgcctggctaatttttttgtattttcagtagagatggagtttcactgtgttagccaggacggtctcgatctcctgacctcgtgatcctcctgtctcggcctcccaaagtgctgggattacaggtgtgagccaccgtgcccggcctcttaagactaccttagaaagtagattgcaaaaaaactttaaacatgtatgtatttaaaaatttaataacaaaaccccccaaattctgtcatgatcttgatcattagaaagatttatgtaattggagaatttcagaaatatcttggtggcagaactagatgccttttgaggttcaatttaattctaacatcccgttaaaatttaatgtacaatatgtagagaaggacagcaactacacactgtacaccctaagactgatttttaaaaaagcaacatcaacttcaacatccaagtatcctatactttacacagtgcctggtatgtaatagttgcttaatgtttgctgaatgacagtgtgatcaaaggagtgttgttacatctgtcactctgaggtccttctggtgatgttgccatatcttataacatcaacaaatgttttcttaaaaatgaaattttcaggtgcattggctcacacctgtaatcccaacattttgggaggctgaagtgggagaattgcttgaggccaggagttcgacaccagcctgagcaacacagtgagacaccatctctaccaaaaaaattaaaaaattggctagtcatggtggtgtgtgcctttagtcctagctattcccaggagtttgaggttgcagggagtatgattgtgccactgcactccagcctgggtggcagagcaagactcggtctctatttttaaaaaaagaaagaaagaaaaatttgccttcactgccagttctacattgtggaggatactttgttttggcccctagagggagcgctagcctcctctataaatctcatcctcagcactctcctccagggttttcttacgctacattaaaagagaattgagaagaaactgttaaggtcaaaaacgtttcatgggcatgtttgtaggagcgtggatcaatccagtgagtgtggatcactgaaatcaatatgttgaatggatatctgtgctctcacgttcattacaacattcttcagaatcccaaatatacaatcaacctgtgttcatcaacagagatggatgaagaaaatgtggtatatatgaacaatagaatactattccacctaaacagggagaaattctgtcatttgtgataacgtggataaatctggaggacattatgctaagtgaaataagccaggtacagaaagacaaatacctcatgacctcacttatatgtggaatctaaaaaagtcaaactcacaaaagtagaaactagaatgctgattaccagaggctagggaggtggagaaggaggaaattgggagatgttgatcacaaaatacaaagtttgaacaaaaaaaaaaaaaaagaaaaaatacaaaatttcgacagacaggaggaataggttttgagatctattgcactattgattatagtcaataataatgtattctatatttcaaaataactgagtaaatttcaaatgtatcaccataaaaatgataggtaagtgaggtgatggatatgttatttggcatgatttatcattccacaaaatgtacatatattgaaacatcgcattgtatcccataactgtatgtaattatgatatgtcaatgaaaaataatattactaataaaaattttaattttc

SEQ ID NO: 24262 - DNA, 543 bp, Homo sapiens
cctgtatcagggagggaacaggcagatatatcgttacaaccagctcctctgtcccctgaatctttgctttccttgagtatcacctgttcactgtgtcctcttatgtggccaccctcaggaagtcccacaactgtcaaggcaggcaagccactacccttattgccagccacctctccaggaggaatgagtaggattgaggataattaacgagaaattaaataggcagctttagtaaataaccctataagtcattatcagtggagggaatgtcttttgtattatactaaaagttttcatgttttagacaaaaagccacagtgagatttcttcctagaaataacaatagccagttgtggcacggtttgagaaaccaggatgtaactttttttttttttttttatactttaagctttaaggtacatgtgcacaaagtgcaggttagttacatatgtatacatgtgccatgttggtgtgctgcacccatgaacgcgtcatttaacattaggtatatctccaaatgctatccctcccctctctccccac

SEQ ID NO: 24263 - DNA, 472 bp, Homo sapiens
tattataatgctaatagttttctagtagttacatattattcttttatatataatagttgtgacacaacttacctcactttcccctttgttgacctttattatgacattcaccaaaatttgaaaatgtatgtttctggttaatttttaatttatatttttttcatttataattcttttgaattattttgacctatttattggccagttttaataactgctgtaagaattccctattgtatttggtagggaatggacaatgatctactgcctaatatctcgagggcttagtatttttctcagtgactttgtgggttctttgtactgtgagattattaacactttattgatatttgattcagcatttgctccagtttgtggtttgtatgttgattttgaaaattcttttccatgttaagaatttgaacatttttatataataaaatatgttgcaaaatttttattaatgatttac

SEQ ID NO: 24264 - DNA, 359 bp, Homo sapiens
agaacacagagtacccataatatgtaattctaacacccattccccactaacctgccaatattgagttcactgccaaatcttaaaggcagacagccatttggctaatggtcagtaagcccaatttcctgccagatattagggcttgcttaagagtttgcctcatagtgtttgagaaatgatacgcaacctctccatggaacatgcattttgtaatagcaaaattatcaagagccttttcagtgctacaattgagatactagctgtgaatcaatgttcaaaaaaatcttaataaattgtttcagatgttactaggaaggatatttctggagtgtcaattagacacaattatagtttgagtt

SEQ ID NO: 24265 - DNA, 279 bp, Homo sapiens
ctcccaaagtgctgcgattacaggcgtgagccaccgcgcccggccaaacttgttgttttatagtcacacttcagttttgatcaaaacaatattcaccatctatcccttcacatttagtttttctctcaatgcctttgggtgcttaagggaaaaaaacaaagcaaatccatctgtaaaaggtaaagaatttaccctcctgaagaccctcaaagaatccaagggaggctcagaaggcagcactagaagagtcctccagtgttttgaatgatgattgcatgt

SEQ ID NO: 24266 - DNA, 751 bp, Homo sapiens
cttaggtgggggatggaaatgttctctaccttgattggaatagtggttaaataggtgtatgcatatgtcaacattcatggagtcatccacttaaaattgataattttaactgtacgtaaagtatttcttaaaaaagtaagttacatggttgaaaagactcaataagcaactaaaaagtggctgtcaaaattagttgctaattagacaattataaaagatgagtaaatataaaaattcgggaaaaatttacactcattttattttgcatgaatctttaaattcctaacacaatttagagaaatcagaactggaagtgagagatgttgtgttatgggtggaagatgaaagaaaaattattctgaactccatttaatgtactaacaaaataagcctttggccctatattacaaaatttggtgggaaaatatccactcagtgctttaaatttataaaatacttaacatatatcctagtttttatgattccctacctcatcccctatttcgaccagctattaatccatatcataacagctaaggggcttctactgaaccatttttctctgagactctatagccttcttctcccctctacctggaccacttgactgccacctctgttgctagccttgttaaggtttctaccaccagcagacaggcaaaagagattaagaaactgcaacccaaacctttaggatgccacagtgttggcttattatgtcttcctggctttttcagggatctttaggttg

SEQ ID NO: 24267 - DNA, 441 bp, Homo sapiens
gatatcccctttatcattttttattgcgtctatttgattcttctctcttttctgaagaagaaaatctttaaatgcaccatagttatatgatttgaaaagaaaatgtacactacaatgtagctgttcaataattcttaataaaacttctcattaccttgatttataaattggtaggatttgttctcatcagaatgttttaaaaaatctataaaaatagaagaaaagtatcctctcataaagctttatgggcactaacagcagttggaacttctcttactactgcctcatcactggttatatataagttttagtacaaagactataaatctggctgggctcatgctcataatctcagcactttcggaggcagaggcgggaggattgtttaaaggcaggatttagaaaccagcctgagcaacaaagtgagaccctgtcttaaaa

SEQ ID NO: 24268 - DNA, 459 bp, Homo sapiens
actgtgtacaaagacctgtgtctccagcctgagcagagcctaagactcagatgggggccagaccactctaggggaaagtccccaccacgtcccggcaactcacagcccccagacgtgttcgtttcttctgtggctgaaactacttctcaggccactgcttcagaagtacagaccaacagagatggtgaatgctgacagctgccgggagactcacgccttagtgacagtctccaggagaagactgtgaggccaccatttgggccacactgagaaattgtttttcatggttctataatgcatcttggcagaaaaaaacaaaaacccaaagctccttgtgctgaactcccaaaatgtagcaagtccagcccctgccataggcccaggcttcgtgctccccacccttggcaagttctccccacccccagccccacagtttattaaatgtttgattttcaaact

SEQ ID NO: 24269 - DNA, 472 bp, Homo sapiens
ttttgtttgaacccagaaatttgtggatagtgttgggaaatatagtgacctgatttatgctctcatagttcttagccatcatagaaacactataaagttaagagggctttatagacacttaggctgctataaaaaattatcccatttttatattcaagtcaatatgttttttcaagtctaaaacagtgtacagtatagaaaagggcaatgaagacagtctcttattttagtgataatcttctgtcctgataacttattaagtggaggggaatgcaagtttttaaaaaatactttgatatttttatttttattgaaaaaaatgttagagacagcatctccctcttgcccaagctcaactcttgggctcctgcaatcttcccaccccagcctcctgagtgtctgggaccacaggtgtgggccaccatgcccagcttatactttgatgtttttaatcaaaataaaagaattttgg

SEQ ID NO: 24270 - DNA, 2371 bp, Homo sapiens
taattaaaaaaaaaaaatagagacagggtctcagattttcattagatttggaaaccaagttagaatgttgactttggagccagacgaacagataccagttagctaggcatatgttcttccagggtctttggctagttaacattagtcatttgcttcgtgaaaattcaagaaccttttcagagccaagtacctggattaccttcccaatcaggtagaaattagacagggtccacagaagtagacacttaatgctgtggttcaataaatacttcccctaaatattaagtcttccctgagtctcagcaggtttgcattcacactgcttaagtaacttccagaacctggaagagtcgaaagagcacccctaggaaagagatgattccaaacagctttcattaacggcatgtaggcacaggtccctttcccaaaagtggattgttagtagtagttcattcaacctttgttaaggggtagctttccagaatgtgacattgtcctcagaaagatagacataggcttaaacataatggacatcctaaataggaattttcagattgtttttgaagtgaaaagtgttttaatgtctttaaatggaattgcataactaatggtatttaagtattttacatgttgctaataactttgaatatgattgttgcaattttatggaacctgggtctatgggactgctttttaagcagtttaaaaaaggttttcaaagtttaaaagccaatcttagcatgtataatccttatgggattcttaagttttatcctatcttgtttttgctcaagaacgctttatcagtgacgtttgttagaattttgttttttgttttttttttttaaattgtttttgggctagaaatgagtttctctagttttatttgttctccctgagttggagttatgcaatgaatggcatttttgtggtaaaatactaatcctaaaatctgttaactcactgttcatttaagtagggaatatctgtatacattaatgactaggtaaaacaggaaatacattttgaatatacagcctaaaggcaggcagttacagggtttttgatttctccgattttatagggtgcaagttcccagtggcaggatgccctgctgtgtgactgactacactgtgtcctgagcagtggtaatttcaatcacctctcatcagtttggccagccctacaaccaccattcctagccctgtgttgcttgacaggatacctgtgcttgaatggacataaggaaaagtccttactttctccccaatttacctctcaatcttagttcttccagaacacacttccctttcacaatgcaaataaactgaaagtgagatttgatacatggaattttgagaccaaccaactaaccttacacataatttgagggattcctggattcttctagtgatactgaaaagcacacttgactaaagcatagtgttttttgtttgttatggaaatacggtatacgttcatttaaaaataaatggacatacaaattgcatctccttaggagatacattttatatacatttcggtgcgtttttttccagtatggatttctatttgtttctctcttcctcttgttttttctgtgtcactcttgtatgtcctcatatctttcatacctcttgtgtagtctctagaagcagaacacctaagtcctgggtctggataatgaaaccctcagtctctggggcctctgaaaataaggaagcattggagctattgccatgttgagtaatgggcttcctagaactattgtcatctatcctgccagtgttttatgttgtagctgtttttctttgacaggtgagttccagctatgttgttagtcatgatcctgccattattttctgtgttctgtaggatgtctccaggctacttaaacatattttatgagtttgcaataaaattgttgaatcttgtatgatcaagtcactcctctgctcagaaatccacagtgacttcttagtaagcccctacattatatgcatacttgtttttttcttaactttactcccacttctacctaacagggacctcaacttaagtctcttcagttcttcaaggcctggccttgttcctgattcctcaaaaaatcttgactctaaggcctattttattgtctgtctctgaatccctataaagcttcaagtctgtatgacattcttaacgccaaattatatattgtcttgtactgttcctagctggtacatgtatattagtcttgtctccctcatgagaatgtaagctccttaagggcagggaccatgtcttaatttttgtatccaccacagtgcctagcacagtgcttggcacatgggtgctgaataaatacctttgtttattgatcaaaaaaaaa

SEQ ID NO: 24271 - DNA, 361 bp, Homo sapiens
aaattgcttttagagtttgactagtattccggagaataaagatctgatttaggccttaagcattcagtaatgaaaattaaaaagaaaaaaaatagtcaacttgttaatgcaagtgtctgtttggctgctgaatttttatagtgagggtaactttaactctgaaattatcccttatgtgtgagagtgaattaaatggtgacatataaaacagccattgctaagtagggatcgaagcctaacaagagtagagaaatcagtgagcacatagttgggctgaatgaattgtatcctggcctggccagattatttccttgggtccaaagagagcctgccatgaaaatcacccctcataggtaagtag

SEQ ID NO: 24272 - DNA, 436 bp, Homo sapiens
attgtatttaaggcaaataaaacaaagaaatcatttattcaacaaatatgtattaagggtctactaagaatgagcactgacctaggtattggggatacagtggtgaacaaaaggcccaaaatctgccttcctggaccttactttagtaatagagatatgcagacaacaaggaaaataaataagtaaaatatatggtatgttggaaggtaataagtgctaaaggagaaaacaaaaataaagcaggaaagagtagtataaaatgttgtggaagaggggcttaacatttcatacacagtggctagggaaggctttattgagaagggggcttctaagccaagccctgaaggaaataagagagataaccctgtagacattagaggaaaagcattccagacaaaaggaacaagtgcaaaggccctaaagtagaaggatgcct

SEQ ID NO: 24273 - DNA, 447 bp, Homo sapiens
ctttgattttaatttaggaatgaattttttaaaatgcatataaccagctcagggtctgtgcttcatcatcaccctggctttttttttgtgctaatttttcctcttactacttttatgagtaccagaaaattatccaaagctaagagaagaaataaaacactgtttttgctccttattaataatttgcttctaagtttttgttagagagtaggtaaaaacgtttggcaaagtagattgctcatagagtttagctatccatgctttgtttttacctttagtttagttttatggcaggggaataggacttgttgaagggagtgggaaagaagggatgcaggtcttcataataaggaatgtcggccaggcgcagtatctcacacctgtaatcccagcactttgggaggccaaggcaggcagatcactaggtcaggagttcgagaccagcct

SEQ ID NO: 24274 - DNA, 4341 bp, Homo sapiens
gtccgcctgccgcccgctggcctgctccctccggggcaagtcttgcttcttaagcgctcctttcacacacgcgcgcgctcgctgggccgtcccctcctctccggccctcctcctcctcctggtccttgctaacgctgccgtcggggaggattgatgtcccttcagcatcatgcagccgccgccgaggaaggacattcagtcagaagaaggctgctattgaaagagagtatgcacagggtatgcagaagttggctagtcaatacctgaagagagattggcctggagtaaaagctgatgatcggaatgattacaggagcatgtatcccgtttggaaatcttttctcgagggaacaatgcaggtagcccagtctcggatgaatatatgtgaaaactataaaaacttcatttctgagcctgcaaggacagtgagaagcttaaaagaacagcaactaaaaaggtgtgtggaccagttgacaaagatccaaactgaattacaagagacagtgaaagatttagctaaaggcaaaaagaaatactttgagactgaacagatggctcatgcagtacgagagaaagctgacatcgaggcaaaatctaaacttagtctttttcaatcaagaatcagtttacagaaggcaagtgtaaagttaaaagcccggcgatctgagtgtaattccaaagctacccacgcaaggaatgattatcttcttaccctagcggcagcaaatgcacatcaggatcgctactatcaaacagatttagttaacattatgaaggctcttgatggaaatgtgtatgatcatctcaaggattatttaatagccttcagccggactgagctagaaacatgccaagctgtgcagaacacattccagtttttattagaaaactccagcaaggtggtccgggactacaatcttcagctgtttttgcaagaaaacgctgtatttcacaaaccccagcccttccagttccagccttgtgacagtgatactagccgacagttagaatcagaaactgggaccacagaggagcacagtctaaataaggaagctcgaaaatgggccacacgtgtggcacgtgagcataaaaacattgttcaccaacaacgggttctaaatgatctggagtgtcatggagctgctgtatcagaacaaagccgagcagagctagaacagaaaatagatgaagctagagaaaatattcgtaaagcagagataattaaattgaaagctgaagcccggttggacctgctaaagcagattggtgtttctgtggacacatggctaaagagtgccatgaaccaagtaatggaagaactggaaaatgagcgatgggcccgccctcctgcagtgaccagtaatggcactttacactcgcttaatgcagataccgaaagagaagaaggcgaagagtttgaagataacatggatgttttcgatgacagcagttccagcccttctggcaccttaagaaattatccactcacctgcaaagttgtttattcctacaaggcttctcaaccagatgagttgaccattgaggaacatgaggtgttagaagtgattgaagatggagatatggaagactgggtaaaggctcgaaataaagttggccaagtgggttatgtgccagaaaagtacctacagtttcccacctcgaacagcctcctgagcatgctgcagtccctggccgctttggacagtcggtcacacacgtccagcaattccacggaagcagaactcgtttcaggcagcctcaacggagatgccagtgtatgttttgtgaaagcactttatgattatgagggccagacagatgatgagttatcttttcctgagggagcaataatccgtatcttgaacaaagaaaaccaagatgatgatggcttctgggaaggggaattcaatgggcgtattggagttttcccatcggtgctagtggaagaactttcagcctcagaaaatggtgacactccatggatgagagagattcagatctctccttcccccaagccacacgcctccctgcctccactgccgttgtacgaccagcctcccagcagcccctaccccagcccagataagaggagctccctgtactttccccggtctccttcagcaaacgaaaaaagccttcatgctgagtcaccaggattctcacaggcatcaaggcatactcctgagacctcatatggcaaactgcgacctgtccgggcagctccccctccacctacacagaatcaccgaaggccagcagagaagattgaagatgtggaaatcacactggtgtgatgatgggcttgcccatccattactgctacaatcaaggccaggcttggagtttggccagtcttgttttttaggcacctttgcatgatgatgactcttgaacagagcaaaaaacaaggaggattatgtgtgactgggtggcctggtagactcctcccacgttttgaatatttcgtgccttttttttttgttgtcattttctatgtcatttctcctaccatagcacaaatcctagcggaccctaggagcaaagaggggggcagccctcatgcctaacagtggtctgtttttatatgagactcaagaacaggcctcattccagggcacagtccctaaattactgatcatgtgcactcgtacagtatattactgtgaccacaaggatgtggcaaagattctcatctttcttcaagtggcttttgctcatctgattgagaattaatcagatcatgttggctacataaggaaacagaaggagggatttcaggagaggctggctcctccccaaggttagtccccagactgagaaagtgaaaccttattgggaaaaattggactgccctgaatttagcaccaattgcattaacgcacatctcttccacaactaacagacttaaaataacagtgtccttcgtattaatatctgtgccattcatttagaattagcagagctaatatggaggggctgaactagtagccacatcttgttcatcacatagactaatagaaaggaggctgtggctaaagcagaaatggaacttccggatctgaaattagccaatataatgttcttttgtatttgggtatttttcatcttaatttttacagcatatactcttcttaccagtatccttagaatccaaatgtctagataagttgaggacacatacctgcattgttgagcttctctactggggacgccccggcattattttattcccaagccagcagaccggcccagacagccaggctgtggctggtccagaccaactgctatggtggaaaatgcagcttccaggtcccactaccctgacatttccgtggaaggaagaacctggtggctcgtggaggaaaccagctttctatgagaaaggactgaaggattgcgcaccctgcacaagtacagattgaccaggaaaagacaagtgtcttctgtgtgtcacagggaaagccaggagtggccttctctgcaggccagcaagcctgcagcagcaggtgcccccacgtcaggtgctgactgtccgctgtccgctcctgtagaaggtagggagcacaatacctagggactaagggatgttcgccggttgtggtttgtttttttttttttttccttggttaagaaatcaaatttgcagaatttaatctacaagttgtattatgctttgaaaactccatccctcctaagaatcttaaaaaacttgaaatgctcgccaaatgtccccatgggatttttgaccaaaagtaaggtgataactgaagaaatttttagttctttgatcacttcagtgacaatacccattaatgaatcttctccatgatttggggttttttttcgttgttgttttttacacttcttaacctgttgatctatttgaggtcttttgtgtttatcaaacttattcttaagtttaaaaaagaaattaaaagggtggtttttttaagattttaaagtttgctaacatattaaaaatcttcaaatgcttattaaatagagcagttcttgccacccagtcttgtattctgtctttagctagccaaattgtccttgaatttgggttttccacaacctcaaagggttatttgaaatcttttgttgtattttaaaatattttttggaagagctgctaattttattttaaaaaacaaagttgtgaaaacatgcctcctttttaaaaaataacccctccatccaggatatggaatccagcaccacagtgcacaggtcagggctcggagggagcctctgtgcagatgtgctttctttacagtggctgtaaaaagtttgtatttattatgtataaaatgttgaataataaaaaaaatggaatta

SEQ ID NO: 24275 - DNA, 658 bp, Homo sapiens
gacgggtcctgcctcgtccccggctgaggggcgaggaggctgtcgtgctgtcttcagaaaagcgaggaccgggcccgggaggtgaaagttacacaagaactgaaaaacattcaagttgagcagatgacaaaacttcaagccaaacatcaagcagaatgtgatttgcttgaagatatgaggtaaggctatagtaaatagttcaaggacttctgtttgtctgtttcaaagaacctttgagttaccaagccccaggaactgatgatggaatttccttttggatttcctgctttaaggctgttagaactttgactcagctggaaattagaactggaactaacacaatacaaactttttccttcagtgggggacctataatgcacacatagtattcagaaaaaacaaggaccttaaaagtcttactagtcaaattataataattaaagattcttgtttaaataatctttccacggaattgtaacaatcattttattgaccttaacggttttacacagttagatttttaaaccaacacttgtggttaatggttaatatctgggggtgagccagtcaaccccagatggttatatgctctcactgggttagaacatgacaaatacaactttgtttttgagtgccaaatttagtgagaagtgtgttt

SEQ ID NO: 24276 - DNA, 611 bp, Homo sapiens
ctgagggtgactctagagagatccccccgaggaggtgaaagttacacaagaactgaaaaacattcaagttgagcagatgacaaaacttcaagccaaacatcaagcagaatgtgatttgcttgaagatatgaggtaaggctatagtaaatagttcaaggacttctgtttgtctgtttcaaagaacctttgagttaccaagccccaggaactgatgatggaatttccttttggatttcctgctttaaggctgttagaactttgactcagctggaaattagaactggaactaacacaatacaaactttttccttcagtgggggacctataatgcacacatagtattcagaaaaaacaaggaccttaaaagtcttactagtcaaattataataattaaagattcttgtttaaataatctttccacggaattgtaacaatcattttattgaccttaacggttttacacagttagatttttaaaccaacacttgtggttaatggttaatatctgggggtgagccagtcaaccccagatggttatatgctctcactgggttagaacatgacaaatacaactttgtttttgagtgccaaatttagtgagaagtgtgttt

SEQ ID NO: 24277 - DNA, 4238 bp, Homo sapiens
gggaagcagaatgtgatttgcttgaagatatgaggacattcagtcagaagaaggctgctattgaaagagagtatgcacagtattccattgtatggatataccacagtttatccattttcctgttgatggacatggtatgcagaagttggctagtcaatacctgaagagagattggcctggagtaaaagctgatgatcggaatgattacaggagcatgtatcccgtttggaaatcttttctcgagggaacaatgcaggtagcccagtctcggatgaatatatgtgaaaactataaaaacttcatttctgagcctgcaaggacagtgagaagcttaaaagaacagcaactaaaaaggtgtgtggaccagttgacaaagatccaaactgaattacaagagacagtgaaagatttagctaaaggcaaaaagaaatactttgagactgaacagatggctcatgcagtacgagagaaagctgacatcgaggcaaaatctaaacttagtctttttcaatcaagaatcagtttacagaaggcaagtgtaaagttaaaagcccggcgatctgagtgtaattccaaagctacccacgcaaggaatgattatcttcttaccctagcggcagcaaatgcacatcaggatcgctactatcaaacagatttagttaacattatgaaggctcttgatggaaatgtgtatgatcatctcaaggattatttaatagccttcagccggactgagctagaaacatgccaagctgtgcagaacacattccagtttttattagaaaactccagcaaggtggtccgggactacaatcttcagctgtttttgcaagaaaacgctgtatttcacaaaccccagcccttccagttccagccttgtgacagtgatactagccgacagttagaatcagaaactgggaccacagaggagcacagtctaaataaggaagctcgaaaatgggccacacgtgtggcacgtgagcataaaaacattgttcaccaacaacgggttctaaatgatctggagtgtcatggagctgctgtatcagaacaaagccgagcagagctagaacagaaaatagatgaagctagagaaaatattcgtaaagcagagataattaaattgaaagctgaagcccggttggacctgctaaagcagattggtgtttctgtggacacatggctaaagagtgccatgaaccaagtaatggaagaactggaaaatgagcgatgggcccgccctcctgcagtgaccagtaatggcactttacactcgcttaatgcagataccgaaagagaagaaggcgaagagtttgaagataacatggatgttttcgatgacagcagttccagcccttctggcaccttaagaaattatccactcacctgcaaagttgtttattcctacaaggcttctcaaccagatgagttgaccattgaggaacatgaggtgttagaagtgattgaagatggagatatggaagactgggtaaaggctcgaaataaagttggccaagtgggttatgtgccagaaaagtacctacagtttcccacctcgaacagcctcctgagcatgctgcagtccctggccgctttggacagtcggtcacacacgtccagcaattccacggaagcagaactcgtttcaggcagcctcaacggagatgccagtgtatgttttgtgaaagcactttatgattatgagggccagacagatgatgagttatcttttcctgagggagcaataatccgtatcttgaacaaagaaaaccaagatgatgatggcttctgggaaggggaattcaatgggcgtattggagttttcccatcggtgctagtggaagaactttcagcctcagaaaatggtgacactccatggatgagagagattcagatctctccttcccccaagccacacgcctccctgcctccactgccgttgtacgaccagcctcccagcagcccctaccccagcccagataagaggagctccctgtactttccccggtctccttcagcaaacgaaaaaagccttcatgctgagtcaccaggattctcacaggcatcaaggcatactcctgagacctcatatggcaaactgcgacctgtccgggcagctccccctccacctacacagaatcaccgaaggccagcagagaagattgaagatgtggaaatcacactggtgtgatgatgggcttgcccatccattactgctacaatcaaggccaggcttggagtttggccagtcttgttttttaggcacctttgcatgatgatgactcttgaacagagcaaaaaacaaggaggattatgtgtgactgggtggcctggtagactcctcccacgttttgaatatttcgtgccttttttttttgttgtcattttctatgtcatttctcctaccatagcacaaatcctagcggaccctaggagcaaagaggggggcagccctcatgcctaacagtggtctgtttttatatgagactcaagaacaggcctcattccagggcacagtccctaaattactgatcatgtgcactcgtacagtatattactgtgaccacaaggatgtggcaaagattctcatctttcttcaagtggcttttgctcatctgattgagaattaatcagatcatgttggctacataaggaaacagaaggagggatttcaggagaggctggctcctccccaaggttagtccccagactgagaaagtgaaaccttattgggaaaaattggactgccctgaatttagcaccaattgcattaacgcacatctcttccacaactaacagacttaaaataacagtgtccttcgtattaatatctgtgccattcatttagaattagcagagctaatatggaggggctgaactagtagccacatcttgttcatcacatagactaatagaaaggaggctgtggctaaagcagaaatggaacttccggatctgaaattagccaatataatgttcttttgtatttgggtatttttcatcttaatttttacagcatatactcttcttaccagtatccttagaatccaaatgtctagataagttgaggacacatacctgcattgttgagcttctctactggggacgccccggcattattttattcccaagccagcagaccggcccagacagccaggctgtggctggtccagaccaactgctatggtggaaaatgcagcttccaggtcccactaccctgacatttccgtggaaggaagaacctggtggctcgtggaggaaaccagctttctatgagaaaggactgaaggattgcgcaccctgcacaagtacagattgaccaggaaaagacaagtgtcttctgtgtgtcacagggaaagccaggagtggccttctctgcaggccagcaagcctgcagcagcaggtgcccccacgtcaggtgctgactgtccgctgtccgctcctgtagaaggtagggagcacaatacctagggactaagggatgttcgccggttgtggtttgtttttttttttttttccttggttaagaaatcaaatttgcagaatttaatctacaagttgtattatgctttgaaaactccatccctcctaagaatcttaaaaaacttgaaatgctcgccaaatgtccccatgggatttttgaccaaaagtaaggtgataactgaagaaatttttagttctttgatcacttcagtgacaatacccattaatgaatcttctccatgatttggggttttttttcgttgttgttttttacacttcttaacctgttgatctatttgaggtcttttgtgtttatcaaacttattcttaagtttaaaaaagaaattaaaagggtggtttttttaagattttaaagtttgctaacatattaaaaatcttcaaatgcttattaaatagagcagttcttgccacccagtcttgtattctgtctttagctagccaaattgtccttgaatttgggttttccacaacctcaaagggttatttgaaatcttttgttgtattttaaaatattttttggaagagctgctaattttattttaaaaaacaaagttgtgaaaacatgcctcctttttaaaaaataacccctccatccaggatatggaatccagcaccacagtgcacaggtcagggctcggagggagcctctgtgcagatgtgctttctttacagtggctgtaaaaagtttgtatttattatgtataaaatgttgaataataaaaaaaatggaatta

SEQ ID NO: 24278 - DNA, 4017 bp, Homo sapiens
gggaagcagaatgtgatttgcttgaagatatgaggacattcagtcagaagaaggctgctattgaaagagagtatgcacagtattccattgtatggatataccacagtttatccattttcctgttgatggacatggtatgcagaagttggctagtcaatacctgaagagagattggcctggagtaaaagctgatgatcggaatgattacaggagcatgtatcccgtttggaaatcttttctcgagggaacaatgcaggtagcccagtctcggatgaatatatgtgaaaactataaaaacttcatttctgagcctgcaaggacagtgagaagcttaaaagaacagcaactaaaaaggtgtgtggaccagttgacaaagatccaaactgaattacaagagacagtgaaagatttagctaaaggcaaaaagaaatactttgagactgaacagatggctcatgcagtacgagagaaagctgacatcgaggcaaaatctaaacttagtctttttcaatcaagaatcagtttacagaaggcaagtgtaaagttaaaagcccggcgatctgagtgtaattccaaagctacccacgcaaggaatgattatcttcttaccctagcggcagcaaatgcacatcaggatcgctactatcaaacagatttagttaacattatgaaggctcttgatggaaatgtgtatgatcatctcaaggattatttaatagccttcagccggactgagctagaaacatgccaagctgtgcagaacacattccagtttttattagaaaactccagcaaggtggtccgggactacaatcttcagctgtttttgcaagaaaacgctgtatttcacaaaccccagcccttccagttccagccttgtgacagtgatactagccgacagttagaatcagaaactgggaccacagaggagcacagtctaaataaggaagctcgaaaatgggccacacgtgtggcacgtgagcataaaaacattgttcaccaacaacgggttctaaatgatctggagtgtcatggagctgctgtatcagaacaaagccgagcagagctagaacagaaaatagatgaagctagagaaaatattcgtaaagcagagataattaaattgaaagctgaagcccggttggacctgctaaagcagattggtgtttctgtggacacatggctaaagagtgccatgaaccaagtaatggaagaactggaaaatgagcgatgggcccgccctcctgcagtgaccagtaatggcactttacactcgcttaatgcagataccgaaagagaagaaggcgaagagtttgaagataacatggatgttttcgatgacagcagttccagcccttctggcaccttaagaaattatccactcacctgcaaagttgtttattcctacaaggcttctcaaccagatgagttgaccattgaggaacatgaggtgttagaagtgattgaagatggagatatggaagactgggtaaaggctcgaaataaagttggccaagtgggttatgtgccagaaaagtacctacagtttcccacctcgaacagcctcctgagcatgctgcagtccctggccgctttggacagtcggtcacacacgtccagcaattccacggaagcagaactcgtttcaggcagcctcaacggagatgccagtgatctctccttcccccaagccacacgcctccctgcctccactgccgttgtacgaccagcctcccagcagcccctaccccagcccagataagaggagctccctgtactttccccggtctccttcagcaaacgaaaaaagccttcatgctgagtcaccaggattctcacaggcatcaaggcatactcctgagacctcatatggcaaactgcgacctgtccgggcagctccccctccacctacacagaatcaccgaaggccagcagagaagattgaagatgtggaaatcacactggtgtgatgatgggcttgcccatccattactgctacaatcaaggccaggcttggagtttggccagtcttgttttttaggcacctttgcatgatgatgactcttgaacagagcaaaaaacaaggaggattatgtgtgactgggtggcctggtagactcctcccacgttttgaatatttcgtgccttttttttttgttgtcattttctatgtcatttctcctaccatagcacaaatcctagcggaccctaggagcaaagaggggggcagccctcatgcctaacagtggtctgtttttatatgagactcaagaacaggcctcattccagggcacagtccctaaattactgatcatgtgcactcgtacagtatattactgtgaccacaaggatgtggcaaagattctcatctttcttcaagtggcttttgctcatctgattgagaattaatcagatcatgttggctacataaggaaacagaaggagggatttcaggagaggctggctcctccccaaggttagtccccagactgagaaagtgaaaccttattgggaaaaattggactgccctgaatttagcaccaattgcattaacgcacatctcttccacaactaacagacttaaaataacagtgtccttcgtattaatatctgtgccattcatttagaattagcagagctaatatggaggggctgaactagtagccacatcttgttcatcacatagactaatagaaaggaggctgtggctaaagcagaaatggaacttccggatctgaaattagccaatataatgttcttttgtatttgggtatttttcatcttaatttttacagcatatactcttcttaccagtatccttagaatccaaatgtctagataagttgaggacacatacctgcattgttgagcttctctactggggacgccccggcattattttattcccaagccagcagaccggcccagacagccaggctgtggctggtccagaccaactgctatggtggaaaatgcagcttccaggtcccactaccctgacatttccgtggaaggaagaacctggtggctcgtggaggaaaccagctttctatgagaaaggactgaaggattgcgcaccctgcacaagtacagattgaccaggaaaagacaagtgtcttctgtgtgtcacagggaaagccaggagtggccttctctgcaggccagcaagcctgcagcagcaggtgcccccacgtcaggtgctgactgtccgctgtccgctcctgtagaaggtagggagcacaatacctagggactaagggatgttcgccggttgtggtttgtttttttttttttttccttggttaagaaatcaaatttgcagaatttaatctacaagttgtattatgctttgaaaactccatccctcctaagaatcttaaaaaacttgaaatgctcgccaaatgtccccatgggatttttgaccaaaagtaaggtgataactgaagaaatttttagttctttgatcacttcagtgacaatacccattaatgaatcttctccatgatttggggttttttttcgttgttgttttttacacttcttaacctgttgatctatttgaggtcttttgtgtttatcaaacttattcttaagtttaaaaaagaaattaaaagggtggtttttttaagattttaaagtttgctaacatattaaaaatcttcaaatgcttattaaatagagcagttcttgccacccagtcttgtattctgtctttagctagccaaattgtccttgaatttgggttttccacaacctcaaagggttatttgaaatcttttgttgtattttaaaatattttttggaagagctgctaattttattttaaaaaacaaagttgtgaaaacatgcctcctttttaaaaaataacccctccatccaggatatggaatccagcaccacagtgcacaggtcagggctcggagggagcctctgtgcagatgtgctttctttacagtggctgtaaaaagtttgtatttattatgtataaaatgttgaataataaaaaaaatggaatta

SEQ ID NO: 24279 - DNA, 3437 bp, Homo sapiens
tgcaatctttactgggcagagtttaaaagccgcccaactggtggatattgagctctcccctgtcagtgctctgagaatgaccatagctgagagccgacagttagaatcagaaactgggaccacagaggagcacagtctaaataaggaagctcgaaaatgggccacacgtgtggcacgtgagcataaaaacattgttcaccaacaacgggttctaaatgatctggagtgtcatggagctgctgtatcagaacaaagccgagcagagctagaacagaaaatagatgaagctagagaaaatattcgtaaagcagagataattaaattgaaagctgaagcccggttggacctgctaaagcagattggtgtttctgtggacacatggctaaagagtgccatgaaccaagtaatggaagaactggaaaatgagcgatgggcccgccctcctgcagtgaccagtaatggcactttacactcgcttaatgcagataccgaaagagaagaaggcgaagagtttgaagataacatggatgttttcgatgacagcagttccagcccttctggcaccttaagaaattatccactcacctgcaaagttgtttattcctacaaggcttctcaaccagatgagttgaccattgaggaacatgaggtgttagaagtgattgaagatggagatatggaagactgggtaaaggctcgaaataaagttggccaagtgggttatgtgccagaaaagtacctacagtttcccacctcgaacagcctcctgagcatgctgcagtccctggccgctttggacagtcggtcacacacgtccagcaattccacggaagcagaactcgtttcaggcagcctcaacggagatgccagtgtatgttttgtgaaagcactttatgattatgagggccagacagatgatgagttatcttttcctgagggagcaataatccgtatcttgaacaaagaaaaccaagatgatgatggcttctgggaaggggaattcaatgggcgtattggagttttcccatcggtgctagtggaagaactttcagcctcagaaaatggtgacactccatggatgagagagattcagatctctccttcccccaagccacacgcctccctgcctccactgccgttgtacgaccagcctcccagcagcccctaccccagcccagataagaggagctccctgtactttccccggtctccttcagcaaacgaaaaaagccttcatgctgagtcaccaggattctcacaggcatcaaggcatactcctgagacctcatatggcaaactgcgacctgtccgggcagctccccctccacctacacagaatcaccgaaggccagcagagaagattgaagatgtggaaatcacactggtgtgatgatgggcttgcccatccattactgctacaatcaaggccaggcttggagtttggccagtcttgttttttaggcacctttgcatgatgatgactcttgaacagagcaaaaaacaaggaggattatgtgtgactgggtggcctggtagactcctcccacgttttgaatatttcgtgccttttttttttgttgtcattttctatgtcatttctcctaccatagcacaaatcctagcggaccctaggagcaaagaggggggcagccctcatgcctaacagtggtctgtttttatatgagactcaagaacaggcctcattccagggcacagtccctaaattactgatcatgtgcactcgtacagtatattactgtgaccacaaggatgtggcaaagattctcatctttcttcaagtggcttttgctcatctgattgagaattaatcagatcatgttggctacataaggaaacagaaggagggatttcaggagaggctggctcctccccaaggttagtccccagactgagaaagtgaaaccttattgggaaaaattggactgccctgaatttagcaccaattgcattaacgcacatctcttccacaactaacagacttaaaataacagtgtccttcgtattaatatctgtgccattcatttagaattagcagagctaatatggaggggctgaactagtagccacatcttgttcatcacatagactaatagaaaggaggctgtggctaaagcagaaatggaacttccggatctgaaattagccaatataatgttcttttgtatttgggtatttttcatcttaatttttacagcatatactcttcttaccagtatccttagaatccaaatgtctagataagttgaggacacatacctgcattgttgagcttctctactggggacgccccggcattattttattcccaagccagcagaccggcccagacagccaggctgtggctggtccagaccaactgctatggtggaaaatgcagcttccaggtcccactaccctgacatttccgtggaaggaagaacctggtggctcgtggaggaaaccagctttctatgagaaaggactgaaggattgcgcaccctgcacaagtacagattgaccaggaaaagacaagtgtcttctgtgtgtcacagggaaagccaggagtggccttctctgcaggccagcaagcctgcagcagcaggtgcccccacgtcaggtgctgactgtccgctgtccgctcctgtagaaggtagggagcacaatacctagggactaagggatgttcgccggttgtggtttgtttttttttttttttccttggttaagaaatcaaatttgcagaatttaatctacaagttgtattatgctttgaaaactccatccctcctaagaatcttaaaaaacttgaaatgctcgccaaatgtccccatgggatttttgaccaaaagtaaggtgataactgaagaaatttttagttctttgatcacttcagtgacaatacccattaatgaatcttctccatgatttggggttttttttcgttgttgttttttacacttcttaacctgttgatctatttgaggtcttttgtgtttatcaaacttattcttaagtttaaaaaagaaattaaaagggtggtttttttaagattttaaagtttgctaacatattaaaaatcttcaaatgcttattaaatagagcagttcttgccacccagtcttgtattctgtctttagctagccaaattgtccttgaatttgggttttccacaacctcaaagggttatttgaaatcttttgttgtattttaaaatattttttggaagagctgctaattttattttaaaaaacaaagttgtgaaaacatgcctcctttttaaaaaataacccctccatccaggatatggaatccagcaccacagtgcacaggtcagggctcggagggagcctctgtgcagatgtgctttctttacagtggctgtaaaaagtttgtatttattatgtataaaatgttgaataataaaaaaaatggaatta

SEQ ID NO: 24280 - DNA, 3466 bp, Homo sapiens
ttgagtttttgttatggttttattctgtttagttttttaaagtaaaacttcacctcattatgaaagttttacagcatttaaatttttatgttcaacatgtttctcaaaatcatttcaatattttgatccccagtttttgtcatgatcagctcacatctgctccttatctaacctttttaattttgtccatgaccatcctacactgcaggcttctcaaccagatgagttgaccattgaggaacatgaggtgttagaagtgattgaagatggagatatggaagactgggtaaaggtatattcctttgctcatatcgccctttcttgtgacatttttaggagtttgttttggtctttgttgtgccctgtctaaattgtgtgtgtaaacttgttttgtcacatgtcttttacccaggcgctcgaaataaagttggccaagtgggttatgtgccagaaaagtacctacagtttcccacctcgaacagcctcctgagcatgctgcagtccctggccgctttggacagtcggtcacacacgtccagcaattccacggaagcagaactcgtttcaggcagcctcaacggagatgccagtggtaaagactgaaacaaggcactctttatttggtcacgtttgacctaaactgtattgccctggagtaagccttcagtaggataaaaagcacaactttcctcctgtcctataatatgcttttctttatatggtcacgtttgtcctgcacagtagaaccctaaagttaatcattcatcagtgagtaaaaaaattacaactttaatcctattctgtatgatgctcttttagttgtcatgtgagcataggggtggttgcaaaagcaaccggctgttaattatcttaccagatttgtttttctcttgctccctagtatgttttgtgaaagcactttatgattatgagggccagacagatgatgagttatcttttcctgagggagcaataatccgtatcttgaacaaagaaaaccaagatgatgatggcttctgggaaggggaattcaatgggcgtattggagttttcccatcggtgctagtggaagaactttcagcctcagaaaatggtgacactccatggatgagagagattcagatctctccttcccccaagccacacgcctccctgcctccactgccgttgtacgaccagcctcccagcagcccctaccccagcccagataagaggagctccctgtactttccccggtctccttcagcaaacgaaaaaagccttcatgctgagtcaccaggattctcacaggcatcaaggcatactcctgagacctcatatggcaaactgcgacctgtccgggcagctccccctccacctacacagaatcaccgaaggccagcagagaagattgaagatgtggaaatcacactggtgtgatgatgggcttgcccatccattactgctacaatcaaggccaggcttggagtttggccagtcttgttttttaggcacctttgcatgatgatgactcttgaacagagcaaaaaacaaggaggattatgtgtgactgggtggcctggtagactcctcccacgttttgaatatttcgtgccttttttttttgttgtcattttctatgtcatttctcctaccatagcacaaatcctagcggaccctaggagcaaagaggggggcagccctcatgcctaacagtggtctgtttttatatgagactcaagaacaggcctcattccagggcacagtccctaaattactgatcatgtgcactcgtacagtatattactgtgaccacaaggatgtggcaaagattctcatctttcttcaagtggcttttgctcatctgattgagaattaatcagatcatgttggctacataaggaaacagaaggagggatttcaggagaggctggctcctccccaaggttagtccccagactgagaaagtgaaaccttattgggaaaaattggactgccctgaatttagcaccaattgcattaacgcacatctcttccacaactaacagacttaaaataacagtgtccttcgtattaatatctgtgccattcatttagaattagcagagctaatatggaggggctgaactagtagccacatcttgttcatcacatagactaatagaaaggaggctgtggctaaagcagaaatggaacttccggatctgaaattagccaatataatgttcttttgtatttgggtatttttcatcttaatttttacagcatatactcttcttaccagtatccttagaatccaaatgtctagataagttgaggacacatacctgcattgttgagcttctctactggggacgccccggcattattttattcccaagccagcagaccggcccagacagccaggctgtggctggtccagaccaactgctatggtggaaaatgcagcttccaggtcccactaccctgacatttccgtggaaggaagaacctggtggctcgtggaggaaaccagctttctatgagaaaggactgaaggattgcgcaccctgcacaagtacagattgaccaggaaaagacaagtgtcttctgtgtgtcacagggaaagccaggagtggccttctctgcaggccagcaagcctgcagcagcaggtgcccccacgtcaggtgctgactgtccgctgtccgctcctgtagaaggtagggagcacaatacctagggactaagggatgttcgccggttgtggtttgtttttttttttttttccttggttaagaaatcaaatttgcagaatttaatctacaagttgtattatgctttgaaaactccatccctcctaagaatcttaaaaaacttgaaatgctcgccaaatgtccccatgggatttttgaccaaaagtaaggtgataactgaagaaatttttagttctttgatcacttcagtgacaatacccattaatgaatcttctccatgatttggggttttttttcgttgttgttttttacacttcttaacctgttgatctatttgaggtcttttgtgtttatcaaacttattcttaagtttaaaaaagaaattaaaagggtggtttttttaagattttaaagtttgctaacatattaaaaatcttcaaatgcttattaaatagagcagttcttgccacccagtcttgtattctgtctttagctagccaaattgtccttgaatttgggttttccacaacctcaaagggttatttgaaatcttttgttgtattttaaaatattttttggaagagctgctaattttattttaaaaaacaaagttgtgaaaacatgcctcctttttaaaaaataacccctccatccaggatatggaatccagcaccacagtgcacaggtcagggctcggagggagcctctgtgcagatgtgctttctttacagtggctgtaaaaagtttgtatttattatgtataaaatgttgaataataaaaaaaatggaatta

SEQ ID NO: 24281 - DNA, 2285 bp, Homo sapiens
atagtgaagactaggttgaaagcacgtgctcacaacatttctgagacccctagggtgcccatgtccttggacagatgagtgattaggttttggggatgcttcagatactgagtcaggaactgactgacaaactacgtaattgtttcctgctcaggtccgggcagctccccctccacctacacagaatcaccgaaggccagcagagaagattgaagatgtggaaatcacactggtgtgatgatgggcttgcccatccattactgctacaatcaaggccaggcttggagtttggccagtcttgttttttaggcacctttgcatgatgatgactcttgaacagagcaaaaaacaaggaggattatgtgtgactgggtggcctggtagactcctcccacgttttgaatatttcgtgccttttttttttgttgtcattttctatgtcatttctcctaccatagcacaaatcctagcggaccctaggagcaaagaggggggcagccctcatgcctaacagtggtctgtttttatatgagactcaagaacaggcctcattccagggcacagtccctaaattactgatcatgtgcactcgtacagtatattactgtgaccacaaggatgtggcaaagattctcatctttcttcaagtggcttttgctcatctgattgagaattaatcagatcatgttggctacataaggaaacagaaggagggatttcaggagaggctggctcctccccaaggttagtccccagactgagaaagtgaaaccttattgggaaaaattggactgccctgaatttagcaccaattgcattaacgcacatctcttccacaactaacagacttaaaataacagtgtccttcgtattaatatctgtgccattcatttagaattagcagagctaatatggaggggctgaactagtagccacatcttgttcatcacatagactaatagaaaggaggctgtggctaaagcagaaatggaacttccggatctgaaattagccaatataatgttcttttgtatttgggtatttttcatcttaatttttacagcatatactcttcttaccagtatccttagaatccaaatgtctagataagttgaggacacatacctgcattgttgagcttctctactggggacgccccggcattattttattcccaagccagcagaccggcccagacagccaggctgtggctggtccagaccaactgctatggtggaaaatgcagcttccaggtcccactaccctgacatttccgtggaaggaagaacctggtggctcgtggaggaaaccagctttctatgagaaaggactgaaggattgcgcaccctgcacaagtacagattgaccaggaaaagacaagtgtcttctgtgtgtcacagggaaagccaggagtggccttctctgcaggccagcaagcctgcagcagcaggtgcccccacgtcaggtgctgactgtccgctgtccgctcctgtagaaggtagggagcacaatacctagggactaagggatgttcgccggttgtggtttgtttttttttttttttccttggttaagaaatcaaatttgcagaatttaatctacaagttgtattatgctttgaaaactccatccctcctaagaatcttaaaaaacttgaaatgctcgccaaatgtccccatgggatttttgaccaaaagtaaggtgataactgaagaaatttttagttctttgatcacttcagtgacaatacccattaatgaatcttctccatgatttggggttttttttcgttgttgttttttacacttcttaacctgttgatctatttgaggtcttttgtgtttatcaaacttattcttaagtttaaaaaagaaattaaaagggtggtttttttaagattttaaagtttgctaacatattaaaaatcttcaaatgcttattaaatagagcagttcttgccacccagtcttgtattctgtctttagctagccaaattgtccttgaatttgggttttccacaacctcaaagggttatttgaaatcttttgttgtattttaaaatattttttggaagagctgctaattttattttaaaaaacaaagttgtgaaaacatgcctcctttttaaaaaataacccctccatccaggatatggaatccagcaccacagtgcacaggtcagggctcggagggagcctctgtgcagatgtgctttctttacagtggctgtaaaaagtttgtatttattatgtataaaatgttgaataataaaaaaaatggaatta

SEQ ID NO: 24282 - DNA, 4184 bp, Homo sapiens
gggaagcagaatgtgatttgcttgaagatatgaggacattcagtcagaagaaggctgctattgaaagagagtatgcacagtattccattgtatggatataccacagtttatccattttcctgttgatggacatggtatgcagaagttggctagtcaatacctgaagagagattggcctggagtaaaagctgatgatcggaatgattacaggagcatgtatcccgtttggaaatcttttctcgagggaacaatgcaggtagcccagtctcggatgaatatatgtgaaaactataaaaacttcatttctgagcctgcaaggacagtgagaagcttaaaagaacagcaactaaaaaggtgtgtggaccagttgacaaagatccaaactgaattacaagagacagtgaaagatttagctaaaggcaaaaagaaatactttgagactgaacagatggctcatgcagtacgagagaaagctgacatcgaggcaaaatctaaacttagtctttttcaatcaagaatcagtttacagaaggcaagtgtaaagttaaaagcccggcgatctgagtgtaattccaaagctacccacgcaaggaatgattatcttcttaccctagcggcagcaaatgcacatcaggatcgctactatcaaacagatttagttaacattatgaaggctcttgatggaaatgtgtatgatcatctcaaggattatttaatagccttcagccggactgagctagaaacatgccaagctgtgcagaacacattccagtttttattagaaaactccagcaaggtggtccgggactacaatcttcagctgtttttgcaagaaaacgctgtatttcacaaaccccagcccttccagttccagccttgtgacagtgatactagccgacagttagaatcagaaactgggaccacagaggagcacagtctaaataaggaagctcgaaaatgggccacacgtgtggcacgtgagcataaaaacattgttcaccaacaacgggttctaaatgatctggagtgtcatggagctgctgtatcagaacaaagccgagcagagctagaacagaaaatagatgaagctagagaaaatattcgtaaagcagagataattaaattgaaagctgaagcccggttggacctgctaaagcagattggtgtttctgtggacacatggctaaagagtgccatgaaccaagtaatggaagaactggaaaatgagcgatgggcccgccctcctgcagtgaccagtaatggcactttacactcgcttaatgcagataccgaaagagaagaaggcgaagagtttgaagataacatggatgttttcgatgacagcagttccagcccttctggcaccttaagaaattatccactcacctgcaaagttgtttattcctacaaggcttctcaaccagatgagttgaccattgaggaacatgaggtgttagaagtgattgaagatggagatatggaagactgggtaaaggctcgaaataaagttggccaagtgggttatgtgccagaaaagtacctacagtttcccacctcgaacagcctcctgagcatgctgcagtccctggccgctttggacagtcggtcacacacgtccagcaattccacggaagcagaactcgtttcaggcagcctcaacggagatgccagtgtatgttttgtgaaagcactttatgattatgagggccagacagatgatgagttatcttttcctgagggagcaataatccgtatcttgaacaaagaaaaccaagatgatgatggcttctgggaaggggaattcaatgggcgtattggagttttcccatcggtgctagtggaagaactttcagcctcagaaaatggtgacactccatggatgagagagattcagatctctccttcccccaagccacacgcctccctgcctccactgccgttgtacgaccagcctcccagcagcccctaccccagcccagataagaggagctccctgtactttccccggtctccttcagcaaacgaaaaaagccttcatgctgagtcaccaggattctcacaggcatcaaggcatactcctgagacctcatatggcaaactgcgacctgtccgggcagctccccctccacctacacagaatcaccgaaggccagcagagaagattgaagatgtggaaatcacactggtgtgatgatgggcttgcccatccattactgctacaatcaaggccaggcttggagtttggccagtcttgttttttaggcacctttgcatgatgatgactcttgaacagagcaaaaaacaaggaggattatgtgtgactgggtggcctggtagactcctcccacgttttgaatatttcgtgccttttttttttgttgtcattttctatgtcatttctcctaccatagcacaaatcctagcggaccctaggagcaaagaggggggcagccctcatgcctaacagtggtctgtttttatatgagactcaagaacaggcctcattccagggcacagtccctaaattactgatcatgtgcactcgtacagtatattactgtgaccacaaggatgtggcaaagattctcatctttcttcaagtggcttttgctcatctgattgagaattaatcagatcatgttggctacataaggaaacagaaggagggatttcaggagaggctggctcctccccaaggttagtccccagactgagaaagtgaaaccttattgggaaaaattggactgccctgaatttagcaccaattgcattaacgcacatctcttccacaactaacagacttaaaataacagtgtccttcgtattaatatctgtgccattcatttagaattagcagagctaatatggaggggctgaactagtagccacatcttgttcatcacatagactaatagaaaggaggctgtggctaaagcagaaatggaacttccggatctgaaattagccaatataatgttcttttgtatttgggtatttttcatcttaatttttacagcatatactcttcttaccagtatccttagaatccaaatgtctagataagttgaggacacatacctgcattgttgagcttctctactggggacgccccggcattattttattcccaagccagcagaccggcccagacagccaggctgtggctggtccagaccaactgctatggtggaaaatgcagcttccaggtcccactaccctgacatttccgtggaaggaagaacctggtggctcgtggaggaaaccagctttctatgagaaaggactgaaggattgcgcaccctgcacaagtacagattgaccaggcaggccagcaagcctgcagcagcaggtgcccccacgtcaggtgctgactgtccgctgtccgctcctgtagaaggtagggagcacaatacctagggactaagggatgttcgccggttgtggtttgtttttttttttttttccttggttaagaaatcaaatttgcagaatttaatctacaagttgtattatgctttgaaaactccatccctcctaagaatcttaaaaaacttgaaatgctcgccaaatgtccccatgggatttttgaccaaaagtaaggtgataactgaagaaatttttagttctttgatcacttcagtgacaatacccattaatgaatcttctccatgatttggggttttttttcgttgttgttttttacacttcttaacctgttgatctatttgaggtcttttgtgtttatcaaacttattcttaagtttaaaaaagaaattaaaagggtggtttttttaagattttaaagtttgctaacatattaaaaatcttcaaatgcttattaaatagagcagttcttgccacccagtcttgtattctgtctttagctagccaaattgtccttgaatttgggttttccacaacctcaaagggttatttgaaatcttttgttgtattttaaaatattttttggaagagctgctaattttattttaaaaaacaaagttgtgaaaacatgcctcctttttaaaaaataacccctccatccaggatatggaatccagcaccacagtgcacaggtcagggctcggagggagcctctgtgcagatgtgctttctttacagtggctgtaaaaagtttgtatttattatgtataaaatgttgaataataaaaaaaatggaatta

SEQ ID NO: 24283 - DNA, 2013 bp, Homo sapiens
ttgagtttttgttatggttttattctgtttagttttttaaagtaaaacttcacctcattatgaaagttttacagcatttaaatttttatgttcaacatgtttctcaaaatcatttcaatattttgatccccagtttttgtcatgatcagctcacatctgctccttatctaacctttttaattttgtccatgaccatcctacactgcaggcttctcaaccagatgagttgaccattgaggaacatgaggtgttagaagtgattgaagatggagatatggaagactgggtaaaggtatattcctttgctcatatcgccctttcttgtgacatttttaggagtttgttttggtctttgttgtgccctgtctaaattgtgtgtgtaaacttgttttgtcacatgtcttttacccaggcgttggctacataaggaaacagaaggagggatttcaggagaggctggctcctccccaaggttagtccccagactgagaaagtgaaaccttattgggaaaaattggactgccctgaatttagcaccaattgcattaacgcacatctcttccacaactaacagacttaaaataacagtgtccttcgtattaatatctgtgccattcatttagaattagcagagctaatatggaggggctgaactagtagccacatcttgttcatcacatagactaatagaaaggaggctgtggctaaagcagaaatggaacttccggatctgaaattagccaatataatgttcttttgtatttgggtatttttcatcttaatttttacagcatatactcttcttaccagtatccttagaatccaaatgtctagataagttgaggacacatacctgcattgttgagcttctctactggggacgccccggcattattttattcccaagccagcagaccggcccagacagccaggctgtggctggtccagaccaactgctatggtggaaaatgcagcttccaggtcccactaccctgacatttccgtggaaggaagaacctggtggctcgtggaggaaaccagctttctatgagaaaggactgaaggattgcgcaccctgcacaagtacagattgaccaggaaaagacaagtgtcttctgtgtgtcacagggaaagccaggagtggccttctctgcaggccagcaagcctgcagcagcaggtgcccccacgtcaggtgctgactgtccgctgtccgctcctgtagaaggtagggagcacaatacctagggactaagggatgttcgccggttgtggtttgtttttttttttttttccttggttaagaaatcaaatttgcagaatttaatctacaagttgtattatgctttgaaaactccatccctcctaagaatcttaaaaaacttgaaatgctcgccaaatgtccccatgggatttttgaccaaaagtaaggtgataactgaagaaatttttagttctttgatcacttcagtgacaatacccattaatgaatcttctccatgatttggggttttttttcgttgttgttttttacacttcttaacctgttgatctatttgaggtcttttgtgtttatcaaacttattcttaagtttaaaaaagaaattaaaagggtggtttttttaagattttaaagtttgctaacatattaaaaatcttcaaatgcttattaaatagagcagttcttgccacccagtcttgtattctgtctttagctagccaaattgtccttgaatttgggttttccacaacctcaaagggttatttgaaatcttttgttgtattttaaaatattttttggaagagctgctaattttattttaaaaaacaaagttgtgaaaacatgcctcctttttaaaaaataacccctccatccaggatatggaatccagcaccacagtgcacaggtcagggctcggagggagcctctgtgcagatgtgctttctttacagtggctgtaaaaagtttgtatttattatgtataaaatgttgaataataaaaaaaatggaatta

SEQ ID NO: 24284 - DNA, 4293 bp, Homo sapiens
gggaagcagaatgtgatttgcttgaagatatgaggacattcagtcagaagaaggctgctattgaaagagagtatgcacagtattccattgtatggatataccacagtttatccattttcctgttgatggacatggtatgcagaagttggctagtcaatacctgaagagagattggcctggagtaaaagctgatgatcggaatgattacaggagcatgtatcccgtttggaaatcttttctcgagggaacaatgcaggtagcccagtctcggatgaatatatgtgaaaactataaaaacttcatttctgagcctgcaaggacagtgagaagcttaaaagaacagcaactaaaaaggtgtgtggaccagttgacaaagatccaaactgaattacaagagacagtgaaagatttagctaaaggcaaaaagaaatactttgagactgaacagatggctcatgcagtacgagagaaagctgacatcgaggcaaaatctaaacttagtctttttcaatcaagaatcagtttacagaaggcaagtgtaaagttaaaagcccggcgatctgagtgtaattccaaagctacccacgcaaggaatgattatcttcttaccctagcggcagcaaatgcacatcaggatcgctactatcaaacagatttagttaacattatgaaggctcttgatggaaatgtgtatgatcatctcaaggattatttaatagccttcagccggactgagctagaaacatgccaagctgtgcagaacacattccagtttttattagaaaactccagcaaggtggtccgggactacaatcttcagctgtttttgcaagaaaacgctgtatttcacaaaccccagcccttccagttccagccttgtgacagtgatactagccgacagttagaatcagaaactgggaccacagaggagcacagtctaaataaggaagctcgaaaatgggccacacgtgtggcacgtgagcataaaaacattgttcaccaacaacgggttctaaatgatctggagtgtcatggagctgctgtatcagaacaaagccgagcagagctagaacagaaaatagatgaagctagagaaaatattcgtaaagcagagataattaaattgaaagctgaagcccggttggacctgctaaagcagattggtgtttctgtggacacatggctaaagagtgccatgaaccaagtaatggaagaactggaaaatgagcgatgggcccgccctcctgcagtgaccagtaatggcactttacactcgcttaatgcagataccgaaagagaagaaggcgaagagtttgaagataacatggatgttttcgatgacagcagttccagcccttctggcaccttaagaaattatccactcacctgcaaagttgtttattcctacaaggcttctcaaccagatgagttgaccattgaggaacatgaggtgttagaagtgattgaagatggagatatggaagactgggtaaaggctcgaaataaagttggccaagtgggttatgtgccagaaaagtacctacagtttcccacctcgaacagcctcctgagcatgctgcagtccctggccgctttggacagtcggtcacacacgtccagcaattccacggaagcagaactcgtttcaggcagcctcaacggagatgccagtgtatgttttgtgaaagcactttatgattatgagggccagacagatgatgagttatcttttcctgagggagcaataatccgtatcttgaacaaagaaaaccaagatgatgatggcttctgggaaggggaattcaatgggcgtattggagttttcccatcggtgctagtggaagaactttcagcctcagaaaatggtgacactccatggatgagagagattcagatctctccttcccccaagccacacgcctccctgcctccactgccgttgtacgaccagcctcccagcagcccctaccccagcccagataagaggagctccctgtactttccccggtctccttcagcaaacgaaaaaagccttcatgctgagtcaccaggattctcacaggcatcaaggcatactcctgagacctcatatggcaaactgcgacctgtccgggcagctccccctccacctacacagaatcaccgaaggccagcagagaagattgaagatgtggaaatcacactggtgtgatgatgggcttgcccatccattactgctacaatcaaggccaggcttggagtttggccagtcttgttttttaggcacctttgcatgatgatgactcttgaacagagcaaaaaacaaggaggattatgtgtgactgggtggcctggtagactcctcccacgttttgaatatttcgtgccttttttttttgttgtcattttctatgtcatttctcctaccatagcacaaatcctagcggaccctaggagcaaagaggggggcagccctcatgcctaacagtggtctgtttttatatgagactcaagaacaggcctcattccagggcacagtccctaaattactgatcatgtgcactcgtacagtatattactgtgaccacaaggatgtggcaaagattctcatctttcttcaagtggcttttgctcatctgattgagaattaatcagatcatgttggctacataaggaaacagaaggagggatttcaggagaggctggctcctccccaaggttagtccccagactgagaaagtgaaaccttattgggaaaaattggactgccctgaatttagcaccaattgcattaacgcacatctcttccacaactaacagacttaaaataacagtgtccttcgtattaatatctgtgccattcatttagaattagcagagctaatatggaggggctgaactagtagccacatcttgttcatcacatagactaatagaaaggaggctgtggctaaagcagaaatggaacttccggatctgaaattagccaatataatgttcttttgtatttgggtatttttcatcttaatttttacagcatatactcttcttaccagtatccttagaatccaaatgtctagataagttgaggacacatacctgcattgttgagcttctctactggggacgccccggcattattttattcccaagccagcagaccggcccagacagccaggctgtggctggtccagaccaactgctatggtggaaaatgcagcttccaggtcccactaccctgacatttccgtggaaggaagaacctggtggctcgtggaggaaaccagctttctatgagaaaggactgaaggattgcgcaccctgcacaagtacagattgaccaggaaaagacaagtgtcttctgtgtgtcacagggaaagccaggagtggccttctctgcaggccagcaagcctgcagcagcaggtgcccccacgtcaggtgctgactgtccgctgtccgctcctgtagaaggtagggagcacaatacctagggactaagggatgttcgccggttgtggtttgtttttttttttttttccttggttaagaaatcaaatttgcagaatttaatctacaagttgtattatgctttgaaaactccatccctcctaagaatcttaaaaaacttgaaatgctcgccaaatgtccccatgggatttttgaccaaaagtaaggtgataactgaagaaatttttagttctttgatcacttcagtgacaatacccattaatgaatcttctccatgatttggggttttttttcgttgttgttttttacacttcttaacctgttgatctatttgaggtcttttgtgtttatcaaacttattcttaagtttaaaaaagaaattaaaagggtggtttttttaagattttaaagtttgctaacatattaaaaatcttcaaatgcttattaaatagagcagttcttgccacccagtcttgtattctgtctttagctagccaaattgtccttgaatttgggttttccacaacctcaaagggttatttgaaatcttttgttgtattttaaaatattttttggaagagctgctaattttattttaaaaaacaaagttgtgaaaacatgcctcctttttaaaaaataacccctccatccaggatatggaatccagcaccacagtgcacaggtcagggctcggagggagcctctgtgcagatgtgctttctttacagtggctgtaaaaagtttgtatttattatgtataaaatgttgaataataaaaaaaatggaattatgatttctaagttttaatatagaaaggtttgggtaaacagacctttccaaaaggc

SEQ ID NO: 24285 - DNA, 3359 bp, Homo sapiens
gggaagcagaatgtgatttgcttgaagatatgaggacattcagtcagaagaaggctgctattgaaagagagtatgcacagtattccattgtatggatataccacagtttatccattttcctgttgatggacatggtatgcagaagttggctagtcaatacctgaagagagattggcctggagtaaaagctgatgatcggaatgattacaggagcatgtatcccgtttggaaatcttttctcgagggaacaatgcaggtagcccagtctcggatgaatatatgtgaaaactataaaaacttcatttctgagcctgcaaggacagtgagaagcttaaaagaacagcaactaaaaaggtgtgtggaccagttgacaaagatccaaactgaattacaagagacagtgaaagatttagctaaaggcaaaaagaaatactttgagactgaacagatggctcatgcagtacgagagaaagctgacatcgaggcaaaatctaaacttagtctttttcaatcaagaatcagtttacagaaggcaagtgtaaagttaaaagcccggcgatctgagtgtaattccaaagctacccacgcaaggaatgattatcttcttaccctagcggcagcaaatgcacatcaggatcgctactatcaaacagatttagttaacattatgaaggctcttgatggaaatgtgtatgatcatctcaaggattatttaatagccttcagccggactgagctagaaacatgccaagctgtgcagaacacattccagtttttattagaaaactccagcaaggtggtccgggactacaatcttcagctgtttttgcaagaaaacgctgtatttcacaaaccccagcccttccagttccagccttgtgacagtgatactagccgacagttagaatcagaaactgggaccacagaggagcacagtctaaataaggaagctcgaaaatgggccacacgtgtggcacgtgagcataaaaacattgttcaccaacaacgggttctaaatgatctggagtgtcatggagctgctgtatcagaacaaagccgagcagagctagaacagaaaatagatgaagctagagaaaatattcgtaaagcagagataattaaattgaaagctgaagcccggttggacctgctaaagcagattggtgtttctgtggacacatggctaaagagtgccatgaaccaagtaatggaagaactggaaaatgagcgatgggcccgccctcctgcagtgaccagtaatggcactttacactcgcttaatgcagataccgaaagagaagaaggcgaagagtttgaagataacatggatgttttcgatgacagcagttccagcccttctggcaccttaagaaattatccactcacctgcaaagttgtttattcctacaaggcttctcaaccagatgagttgaccattgaggaacatgaggtgttagaagtgattgaagatggagatatggaagactgggtaaaggctcgaaataaagttggccaagtgggttatgtgccagaaaagtacctacagtttcccacctcgaacagcctcctgagcatgctgcagtccctggccgctttggacagtcggtcacacacgtccagcaattccacggaagcagaactcgtttcaggcagcctcaacggagatgccagtgtatgttttgtgaaagcactttatgattatgagggccagacagatgatgagttatcttttcctgagggagcaataatccgtatcttgaacaaagaaaaccaagatgatgatggcttctgggaaggggaattcaatgggcgtattggagttttcccatcggtgctagtggaagaactttcagcctcagaaaatggtgacactccatggatgagagagattcagatctctccttcccccaagccacacgcctccctgcctccactgccgttgtacgaccagcctcccagcagcccctaccccagcccagataagaggagctccctgtactttccccggtctccttcagcaaacgaaaaaagccttcatgctgagtcaccaggattctcacaggcatcaaggcatactcctgagacctcatatggcaaactgcgacctgtccgggcagctccccctccacctacacagaatcaccgaaggccagcagagaagattgaagatgtggaaatcacactggtgtgatgatgggcttgcccatccattactgctacaatcaaggccaggcttggagtttggccagtcttgttttttaggcacctttgcatgatgatgactcttgaacagagcaaaaaacaaggaggattatgtgtgactgggtggcctggtagactcctcccacgttttgaatatttcgtgccttttttttttgttgtcattttctatgtcatttctcctaccatagcacaaatcctagcggaccctaggagcaaagaggggggcagccctcatgcctaacagtggtctgtttttatatgagactcaagaacaggcctcattccagggcacagtccctaaattactgatcatgtgcactcgtacagtatattactgtgaccacaaggatgtggcaaagattctcatctttcttcaagtggcttttgctcatctgattgagaattaatcagatcatgttggctacataaggaaacagaaggagggatttcaggagaggctggctcctccccaaggttagtccccagactgagaaagtgaaaccttattgggaaaaattggactgccctgaatttagcaccaattgcattaacgcacatctcttccacaactaacagacttaaaataacagtgtccttcgtattaatatctgtgccattcatttagaattagcagagctaatatggaggggctgaactagtagccacatcttgttcatcacatagactaatagaaaggaggctgtggctaaagcagaaatggaacttccggatctgaaattagccaatataatgttcttttgtatttgggtatttttcatcttaatttttacagcatatactcttcttaccagtatccttagaatccaaatgtctagataagttgaggacacatacctgcattgttgagcttctctactggggacgccccggcattattttattcccaagccagcagaccggcccagacagccaggctgtggctggtccagaccaactgctatggtggaaaatgcagcttccaggtcccactaccctgacatttccgtggaaggaagaacctggtggctcgtggaggaaaccagctttctatgagaaaggactgaaggattgcgcaccggacagtcagatgacaggaaagaccaggggtccgggggccggcagaggggcctctggcc

SEQ ID NO: 24286 - DNA, 3327 bp, Homo sapiens
gggaagcagaatgtgatttgcttgaagatatgaggacattcagtcagaagaaggctgctattgaaagagagtatgcacagtattccattgtatggatataccacagtttatccattttcctgttgatggacatggtatgcagaagttggctagtcaatacctgaagagagattggcctggagtaaaagctgatgatcggaatgattacaggagcatgtatcccgtttggaaatcttttctcgagggaacaatgcaggtagcccagtctcggatgaatatatgtgaaaactataaaaacttcatttctgagcctgcaaggacagtgagaagcttaaaagaacagcaactaaaaaggtgtgtggaccagttgacaaagatccaaactgaattacaagagacagtgaaagatttagctaaaggcaaaaagaaatactttgagactgaacagatggctcatgcagtacgagagaaagctgacatcgaggcaaaatctaaacttagtctttttcaatcaagaatcagtttacagaaggcaagtgtaaagttaaaagcccggcgatctgagtgtaattccaaagctacccacgcaaggaatgattatcttcttaccctagcggcagcaaatgcacatcaggatcgctactatcaaacagatttagttaacattatgaaggctcttgatggaaatgtgtatgatcatctcaaggattatttaatagccttcagccggactgagctagaaacatgccaagctgtgcagaacacattccagtttttattagaaaactccagcaaggtggtccgggactacaatcttcagctgtttttgcaagaaaacgctgtatttcacaaaccccagcccttccagttccagccttgtgacagtgatactagccgacagttagaatcagaaactgggaccacagaggagcacagtctaaataaggaagctcgaaaatgggccacacgtgtggcacgtgagcataaaaacattgttcaccaacaacgggttctaaatgatctggagtgtcatggagctgctgtatcagaacaaagccgagcagagctagaacagaaaatagatgaagctagagaaaatattcgtaaagcagagataattaaattgaaagctgaagcccggttggacctgctaaagcagattggtgtttctgtggacacatggctaaagagtgccatgaaccaagtaatggaagaactggaaaatgagcgatgggcccgccctcctgcagtgaccagtaatggcactttacactcgcttaatgcagataccgaaagagaagaaggcgaagagtttgaagataacatggatgttttcgatgacagcagttccagcccttctggcaccttaagaaattatccactcacctgcaaagttgtttattcctacaaggcttctcaaccagatgagttgaccattgaggaacatgaggtgttagaagtgattgaagatggagatatggaagactgggtaaaggctcgaaataaagttggccaagtgggttatgtgccagaaaagtacctacagtttcccacctcgaacagcctcctgagcatgctgcagtccctggccgctttggacagtcggtcacacacgtccagcaattccacggaagcagaactcgtttcaggcagcctcaacggagatgccagtgtatgttttgtgaaagcactttatgattatgagggccagacagatgatgagttatcttttcctgagggagcaataatccgtatcttgaacaaagaaaaccaagatgatgatggcttctgggaaggggaattcaatgggcgtattggagttttcccatcggtgctagtggaagaactttcagcctcagaaaatggtgacactccatggatgagagagattcagatctctccttcccccaagccacacgcctccctgcctccactgccgttgtacgaccagcctcccagcagcccctaccccagcccagataagaggagctccctgtactttccccggtctccttcagcaaacgaaaaaagccttcatgctgagtcaccaggattctcacaggcatcaaggcatactcctgagacctcatatggcaaactgcgacctgtccgggcagctccccctccacctacacagaatcaccgaaggccagcagagaagattgaagatgtggaaatcacactggtgtgatgatgggcttgcccatccattactgctacaatcaaggccaggcttggagtttggccagtcttgttttttaggcacctttgcatgatgatgactcttgaacagagcaaaaaacaaggaggattatgtgtgactgggtggcctggtagactcctcccacgttttgaatatttcgtgccttttttttttgttgtcattttctatgtcatttctcctaccatagcacaaatcctagcggaccctaggagcaaagaggggggcagccctcatgcctaacagtggtctgtttttatatgagactcaagaacaggcctcattccagggcacagtccctaaattactgatcatgtgcactcgtacagtatattactgtgaccacaaggatgtggcaaagattctcatctttcttcaagtggcttttgctcatctgattgagaattaatcagatcatgttggctacataaggaaacagaaggagggatttcaggagaggctggctcctccccaaggttagtccccagactgagaaagtgaaaccttattgggaaaaattggactgccctgaatttagcaccaattgcattaacgcacatctcttccacaactaacagacttaaaataacagtgtccttcgtattaatatctgtgccattcatttagaattagcagagctaatatggaggggctgaactagtagccacatcttgttcatcacatagactaatagaaaggaggctgtggctaaagcagaaatggaacttccggatctgaaattagccaatataatgttcttttgtatttggatttgggttttccacaacctcaaagggttatttgaaatcttttgttgtattttaaaatattttttggaagagctgctaattttattttaaaaaacaaagttgtgaaaacatgcctcctttttaaaaaataacccctccatccaggatatggaatccagcaccacagtgcacaggtcagggctcggagggagcctctgtgcagatgtgctttctttacagtggctgtaaaaagtttgtatttattatgtataaaatgttgaataataaaaaaaatggaattatgatttctaagttttaatatagaaaggtttgggtaaacagacctttccaaaaggc

SEQ ID NO: 24287 - DNA, 1992 bp, Homo sapiens
gggaagcagaatgtgatttgcttgaagatatgaggacattcagtcagaagaaggctgctattgaaagagagtatgcacagtattccattgtatggatataccacagtttatccattttcctgttgatggacatggtatgcagaagttggctagtcaatacctgaagagagattggcctggagtaaaagctgatgatcggaatgattacaggagcatgtatcccgtttggaaatcttttctcgagggaacaatgcaggtagcccagtctcggatgaatatatgtgaaaactataaaaacttcatttctgagcctgcaaggacagtgagaagcttaaaagaacagcaactaaaaaggtgtgtggaccagttgacaaagatccaaactgaattacaagagacagtgaaagatttagctaaaggcaaaaagaaatactttgagactgaacagatggctcatgcagtacgagagaaagctgacatcgaggcaaaatctaaacttagtctttttcaatcaagaatcagtttacagaaggcaagtgtaaagttaaaagcccggcgatctgagtgtaattccaaagctacccacgcaaggaatgattatcttcttaccctagcggcagcaaatgcacatcaggatcgctactatcaaacagatttagttaacattatgaaggctcttgatggaaatgtgtatgatcatctcaaggattatttaatagccttcagccggactgagctagaaacatgccaagctgtgcagaacacattccagtttttattagaaaactccagcaaggtggtccgggactacaatcttcagctgtttttgcaagaaaacgctgtatttcacaaaccccagcccttccagttccagccttgtgacagtgatactagccgacagttagaatcagaaactgggaccacagaggagcacagtctaaataaggaagctcgaaaatgggccacacgtgtggcacgtgagcataaaaacattgttcaccaacaacgggttctaaatgatctggagtgtcatggagctgctgtatcagaacaaagccgagcagagctagaacagaaaatagatgaagctagagaaaatattcgtaaagcagagataattaaattgaaagctgaagcccggttggacctgctaaagcagattggtgtttctgtggacacatggctaaagagtgccatgaaccaagtaatggaagaactggaaaatgagcgatgggcccgccctcctgcagtgaccagtaatggcactttacactcgcttaatgcagataccgaaagagaagaaggcgaagagtttgaagataacatggatgttttcgatgacagcagttccagcccttctggcaccttaagaaattatccactcacctgcaaagttgtttattcctacaaggcttctcaaccagatgagttgaccattgaggaacatgaggtgttagaagtgattgaagatggagatatggaagactgggtaaaggctcgaaataaagttggccaagtgggttatgtgccagaaaagtacctacagtttcccacctcgaacagcctcctgagcatgctgcagtccctggccgctttggacagtcggtcacacacgtccagcaattccacggaagcagaactcgtttcaggcagcctcaacggagatgccagtgtatgttttgtgaaagcactttatgattatgagggccagacagatgatgagttatcttttcctgagggagcaataatccgtatcttgaacaaagaaaaccaagatgatgatggcttctgggaaggggaattcaatgggcgtattggagttttcccatcggtgctagtggaagaactttcagcctcagaaaatggtgacactccatggatgagagagattcagatctctccttcccccaagccacacgcctccctgcctccactgccgttgtacgaccagcctcccagcagccccatctgttaataaatatctcaactcca

SEQ ID NO: 24288 - DNA, 862 bp, Homo sapiens
gtccgcctgccgcccgctggcctgctccctccggggcaagtcttgcttcttaagcgctcctttcacacacgcgcgcgctcgctgggccgtcccctcctctccggccctcctcctcctcctggtccttgctaacgctgccgtcggggaggattgatgtcccttcagcatcatgcagccgccgccgaggaaggacattcagtcagaagaaggctgctattgaaagagagtatgcacagggtatgcagaagttggctagtcaatacctgaagagagattggcctggagtaaaagctgatgatcggaatgattacaggagcatgtatcccgtttggaaatcttttctcgagggaacaatgcaggtagcccagtctcggatgaatatatgtgaaaactataaaaacttcatttctgagcctgcaaggacagtgagaagcttaaaagaacagcaactaaaaaggtgtgtggaccagttgacaaagatccaaactgaattacaagagacagtgaaagatttagctaaaggcaaaaagaaatactttgagactgaacagatggctcatgcagtacgagagaaagctgacatcgaggcaaaatctaaacttagtctttttcaatcaagaatcagtttacagaaggcaagtgtaaagttaaaagcccggcgatctgagtgtaattccaaagctacccacgcaaggaatgattatcttcttaccctagcggcagcaaatgcacatcaggatcgctactatcaaacagatttagttaacattatgaaggtgcggcaaacatttgttatctagtggttattgatgtagaagatacaagagtgatgtaagaaataaaataatgactcaaactggga

SEQ ID NO: 24289 - DNA, 564 bp, Homo sapiens
aaaaaaaaaaaaaactctattctttcataacatgaaaaatgtaagtgcgaaagatagtcatttctatgcagagttaaaaggcaaattaacattttgaaacaatcaggttttaagtgtttttccggctttcaaccattttcttgaagtaaggaaactagccaatggtttctaatttttcttagcttaatgcagataccgaaagagaagaaggcgaagagtttgaagataacatggatgttttcgatgacagcagttccagcccttctggcaccttaagaaattatccactcacctgcaaagttgtttattcctacaaggtttgtatttctccaacataatgttattaaattctgattaactctgaagatacacatgactgtatccatccagtctctcaagctgtacttagcataaaattgttattaggttaatattggggcaacataacagaatggtgatgagtttaggctctgacttgacgtctttcacttgctactccgtctgcctagaactctttttttccccaaatctcagttggttgtcccctgctcctcattgaagctc

SEQ ID NO: 24290 - DNA, 848 bp, Homo sapiens
gggtatcaggcactcttaggctcccagcccccatccacactctgctcacctctcctggtggttaatgtctttgaatcttttttagaaatagaagacaggctcttttaaaactgtaggaagacctagacatggattgagcttgtgcatgaaatggaatgactggcagtttattttgcacgtctttagtttgtaatatttatagtcgtgtattttcatttaacctctgttcaggctatttggctttaatttttcattaaataagtatcttcaataaataaaactagatggcgaatattggatttatggccttcaggggagaggcgagcaagagacatattctgacagatgtattttcctgaagcaatttttttgggttaaatttgtaaaaagaccttcataaatatatggtatattttaggtgaaagttacacaagaactgaaaaacattcaagttgagcagatgacaaaacttcaagccaaacatcaagcagaatgtgatttgcttgaagatatgaggtaaggctatagtaaatagttcaaggacttctgtttgtctgtttcaaagaacctttgagttaccaagccccaggaactgatgatggaatttccttttggatttcctgctttaaggctgttagaactttgactcagctggaaattagaactggaactaacacaatacaaactttttccttcagtgggggacctataatgcacacatagtattcagaaaaaacaaggaccttaaaagtcttactagtcaaattataataattaaagattcttgtttaaataatctttccacggaattgtaacaatcattttattgaccttaacggttttacaca

SEQ ID NO: 24291 - DNA, 1870 bp, Homo sapiens
gggaagcagaatgtgatttgcttgaagatatgaggacattcagtcagaagaaggctgctattgaaagagagtatgcacagtattccattgtatggatataccacagtttatccattttcctgttgatggacatggtatgcagaagttggctagtcaatacctgaagagagattggcctggagtaaaagctgatgatcggaatgattacaggagcatgtatcccgtttggaaatcttttctcgagggaacaatgcaggtagcccagtctcggatgaatatatgtgaaaactataaaaacttcatttctgagcctgcaaggacagtgagaagcttaaaagaacagcaactaaaaaggtgtgtggaccagttgacaaagatccaaactgaattacaagagacagtgaaagatttagctaaaggcaaaaagaaatactttgagactgaacagatggctcatgcagtacgagagaaagctgacatcgaggcaaaatctaaacttagtctttttcaatcaagaatcagtttacagaaggcaagtgtaaagttaaaagcccggcgatctgagtgtaattccaaagctacccacgcaaggaatgattatcttcttaccctagcggcagcaaatgcacatcaggatcgctactatcaaacagatttagttaacattatgaaggctcttgatggaaatgtgtatgatcatctcaaggattatttaatagccttcagccggactgagctagaaacatgccaagctgtgcagaacacattccagtttttattagaaaactccagcaaggtggtccgggactacaatcttcagctgtttttgcaagaaaacgctgtatttcacaaaccccagcccttccagttccagccttgtgacagtgatactagccgacagttagaatcagaaactgggaccacagaggagcacagtctaaataaggaagctcgaaaatgggccacacgtgtggcacgtgagcataaaaacattgttcaccaacaacgggttctaaatgatctggagtgtcatggagctgctgtatcagaacaaagccgagcagagctagaacagaaaatagatgaagctagagaaaatattcgtaaagcagagataattaaattgaaagctgaagcccggttggacctgctaaagcagattggtgtttctgtggacacatggctaaagagtgccatgaaccaagtaatggaagaactggaaaatgagcgatgggcccgccctcctgcagtgaccagtaatggcactttacactcgcttaatgcagataccgaaagagaagaaggcgaagagtttgaagataacatggatgttttcgatgacagcagttccagcccttctggcaccttaagaaattatccactcacctgcaaagttgtttattcctacaaggcttctcaaccagatgagttgaccattgaggaacatgaggtgttagaagtgattgaagatggagatatggaagactgggtaaaggctcgaaataaagttggccaagtgggttatgtgccagaaaagtacctacagtttcccacctcgaacagcctcctgagcatgctgcagtccctggccgctttggacagtcggtcacacacgtccagcaattccacggaagcagaactcgtttcaggcagcctcaacggagatgccagtggtaaagactgaaacaaggcactctttatttggtcacgtttgacctaaactgtattgccctggagtaagccttcagtaggataaaaagcacaactttcctcctgtcctataatatgcttttctttatatggtcacgtttgtcctgcacagtagaaccctaaagttaatcattcatcagtgagtaaaaaaattacaact

SEQ ID NO: 24292 - DNA, 4010 bp, Homo sapiens
ggtaaaggccccaaggtactccggggcactgcacattttatcattgggttgaaaaaacacgtataaaaacttcatttctgagcctgcaaggacagtgagaagcttaaaagaacagcaactaaaaaggtgtgtggaccagttgacaaagatccaaactgaattacaagagacagtgaaagatttagctaaaggcaaaaagaaatactttgagactgaacagatggctcatgcagtacgagagaaagctgacatcgaggcaaaatctaaacttagtctttttcaatcaagaatcagtttacagaaggcaagtgtaaagttaaaagcccggcgatctgagtgtaattccaaagctacccacgcaaggaatgattatcttcttaccctagcggcagcaaatgcacatcaggatcgctactatcaaacagatttagttaacattatgaaggctcttgatggaaatgtgtatgatcatctcaaggattatttaatagccttcagccggactgagctagaaacatgccaagctgtgcagaacacattccagtttttattagaaaactccagcaaggtggtccgggactacaatcttcagctgtttttgcaagaaaacgctgtatttcacaaaccccagcccttccagttccagccttgtgacagtgatactagccgacagttagaatcagaaactgggaccacagaggagcacagtctaaataaggaagctcgaaaatgggccacacgtgtggcacgtgagcataaaaacattgttcaccaacaacgggttctaaatgatctggagtgtcatggagctgctgtatcagaacaaagccgagcagagctagaacagaaaatagatgaagctagagaaaatattcgtaaagcagagataattaaattgaaagctgaagcccggttggacctgctaaagcagattggtgtttctgtggacacatggctaaagagtgccatgaaccaagtaatggaagaactggaaaatgagcgatgggcccgccctcctgcagtgaccagtaatggcactttacactcgcttaatgcagataccgaaagagaagaaggcgaagagtttgaagataacatggatgttttcgatgacagcagttccagcccttctggcaccttaagaaattatccactcacctgcaaagttgtttattcctacaaggcttctcaaccagatgagttgaccattgaggaacatgaggtgttagaagtgattgaagatggagatatggaagactgggtaaaggctcgaaataaagttggccaagtgggttatgtgccagaaaagtacctacagtttcccacctcgaacagcctcctgagcatgctgcagtccctggccgctttggacagtcggtcacacacgtccagcaattccacggaagcagaactcgtttcaggcagcctcaacggagatgccagtgtatgttttgtgaaagcactttatgattatgagggccagacagatgatgagttatcttttcctgagggagcaataatccgtatcttgaacaaagaaaaccaagatgatgatggcttctgggaaggggaattcaatgggcgtattggagttttcccatcggtgctagtggaagaactttcagcctcagaaaatggtgacactccatggatgagagagattcagatctctccttcccccaagccacacgcctccctgcctccactgccgttgtacgaccagcctcccagcagcccctaccccagcccagataagaggagctccctgtactttccccggtctccttcagcaaacgaaaaaagccttcatgctgagtcaccaggattctcacaggcatcaaggcatactcctgagacctcatatggcaaactgcgacctgtccgggcagctccccctccacctacacagaatcaccgaaggccagcagagaagattgaagatgtggaaatcacactggtgtgatgatgggcttgcccatccattactgctacaatcaaggccaggcttggagtttggccagtcttgttttttaggcacctttgcatgatgatgactcttgaacagagcaaaaaacaaggaggattatgtgtgactgggtggcctggtagactcctcccacgttttgaatatttcgtgccttttttttttgttgtcattttctatgtcatttctcctaccatagcacaaatcctagcggaccctaggagcaaagaggggggcagccctcatgcctaacagtggtctgtttttatatgagactcaagaacaggcctcattccagggcacagtccctaaattactgatcatgtgcactcgtacagtatattactgtgaccacaaggatgtggcaaagattctcatctttcttcaagtggcttttgctcatctgattgagaattaatcagatcatgttggctacataaggaaacagaaggagggatttcaggagaggctggctcctccccaaggttagtccccagactgagaaagtgaaaccttattgggaaaaattggactgccctgaatttagcaccaattgcattaacgcacatctcttccacaactaacagacttaaaataacagtgtccttcgtattaatatctgtgccattcatttagaattagcagagctaatatggaggggctgaactagtagccacatcttgttcatcacatagactaatagaaaggaggctgtggctaaagcagaaatggaacttccggatctgaaattagccaatataatgttcttttgtatttgggtatttttcatcttaatttttacagcatatactcttcttaccagtatccttagaatccaaatgtctagataagttgaggacacatacctgcattgttgagcttctctactggggacgccccggcattattttattcccaagccagcagaccggcccagacagccaggctgtggctggtccagaccaactgctatggtggaaaatgcagcttccaggtcccactaccctgacatttccgtggaaggaagaacctggtggctcgtggaggaaaccagctttctatgagaaaggactgaaggattgcgcaccctgcacaagtacagattgaccaggaaaagacaagtgtcttctgtgtgtcacagggaaagccaggagtggccttctctgcaggccagcaagcctgcagcagcaggtgcccccacgtcaggtgctgactgtccgctgtccgctcctgtagaaggtagggagcacaatacctagggactaagggatgttcgccggttgtggtttgtttttttttttttttccttggttaagaaatcaaatttgcagaatttaatctacaagttgtattatgctttgaaaactccatccctcctaagaatcttaaaaaacttgaaatgctcgccaaatgtccccatgggatttttgaccaaaagtaaggtgataactgaagaaatttttagttctttgatcacttcagtgacaatacccattaatgaatcttctccatgatttggggttttttttcgttgttgttttttacacttcttaacctgttgatctatttgaggtcttttgtgtttatcaaacttattcttaagtttaaaaaagaaattaaaagggtggtttttttaagattttaaagtttgctaacatattaaaaatcttcaaatgcttattaaatagagcagttcttgccacccagtcttgtattctgtctttagctagccaaattgtccttgaatttgggttttccacaacctcaaagggttatttgaaatcttttgttgtattttaaaatattttttggaagagctgctaattttattttaaaaaacaaagttgtgaaaacatgcctcctttttaaaaaataacccctccatccaggatatggaatccagcaccacagtgcacaggtcagggctcggagggagcctctgtgcagatgtgctttctttacagtggctgtaaaaagtttgtatttattatgtataaaatgttgaataataaaaaaaatggaatta

SEQ ID NO: 24293 - DNA, 4669 bp, Homo sapiens
gggaagcagaatgtgatttgcttgaagatatgaggacattcagtcagaagaaggctgctattgaaagagagtatgcacagtattccattgtatggatataccacagtttatccattttcctgttgatggacatggtatgcagaagttggctagtcaatacctgaagagagattggcctggagtaaaagctgatgatcggaatgattacaggagcatgtatcccgtttggaaatcttttctcgagggaacaatgcaggtagcccagtctcggatgaatatatgtgaaaactataaaaacttcatttctgagcctgcaaggacagtgagaagcttaaaagaacagcaactaaaaaggtgtgtggaccagttgacaaagatccaaactgaattacaagagacagtgaaagatttagctaaaggcaaaaagaaatactttgagactgaacagatggctcatgcagtacgagagaaagctgacatcgaggcaaaatctaaacttagtctttttcaatcaagaatcagtttacagaaggcaagtgtaaagttaaaagcccggcgatctgagtgtaattccaaagctacccacgcaaggaatgattatcttcttaccctagcggcagcaaatgcacatcaggatcgctactatcaaacagatttagttaacattatgaaggctcttgatggaaatgtgtatgatcatctcaaggattatttaatagccttcagccggactgagctagaaacatgccaagctgtgcagaacacattccagtttttattagaaaactccagcaaggtggtccgggactacaatcttcagctgtttttgcaagaaaacgctgtatttcacaaaccccagcccttccagttccagccttgtgacagtgatactagccgacagttagaatcagaaactgggaccacagaggagcacagtctaaataaggaagctcgaaaatgggccacacgtgtggcacgtgagcataaaaacattgttcaccaacaacgggttctaaatgatctggagtgtcatggagctgctgtatcagaacaaagccgagcagagctagaacagaaaatagatgaagctagagaaaatattcgtaaagcagagataattaaattgaaagctgaagcccggttggacctgctaaagcagattggtgtttctgtggacacatggctaaagagtgccatgaaccaagtaatggaagaactggaaaatgagcgatgggcccgccctcctgcagtgaccagtaatggcactttacactcgcttaatgcagataccgaaagagaagaaggcgaagagtttgaagataacatggatgttttcgatgacagcagttccagcccttctggcaccttaagaaattatccactcacctgcaaagttgtttattcctacaaggcttctcaaccagatgagttgaccattgaggaacatgaggtgttagaagtgattgaagatggagatatggaagactgggtaaaggtatattcctttgctcatatcgccctttcttgtgacatttttaggagtttgttttggtctttgttgtgccctgtctaaattgtgtgtgtaaacttgttttgtcacatgtcttttacccaggcgctcgaaataaagttggccaagtgggttatgtgccagaaaagtacctacagtttcccacctcgaacagcctcctgagcatgctgcagtccctggccgctttggacagtcggtcacacacgtccagcaattccacggaagcagaactcgtttcaggcagcctcaacggagatgccagtggtaaagactgaaacaaggcactctttatttggtcacgtttgacctaaactgtattgccctggagtaagccttcagtaggataaaaagcacaactttcctcctgtcctataatatgcttttctttatatggtcacgtttgtcctgcacagtagaaccctaaagttaatcattcatcagtgagtaaaaaaattacaactttaatcctattctgtatgatgctcttttagttgtcatgtgagcataggggtggttgcaaaagcaaccggctgttaattatcttaccagatttgtttttctcttgctccctagtatgttttgtgaaagcactttatgattatgagggccagacagatgatgagttatcttttcctgagggagcaataatccgtatcttgaacaaagaaaaccaagatgatgatggcttctgggaaggggaattcaatgggcgtattggagttttcccatcggtgctagtggaagaactttcagcctcagaaaatggtgacactccatggatgagagagattcagatctctccttcccccaagccacacgcctccctgcctccactgccgttgtacgaccagcctcccagcagcccctaccccagcccagataagaggagctccctgtactttccccggtctccttcagcaaacgaaaaaagccttcatgctgagtcaccaggattctcacaggcatcaaggcatactcctgagacctcatatggcaaactgcgacctgtccgggcagctccccctccacctacacagaatcaccgaaggccagcagagaagattgaagatgtggaaatcacactggtgtgatgatgggcttgcccatccattactgctacaatcaaggccaggcttggagtttggccagtcttgttttttaggcacctttgcatgatgatgactcttgaacagagcaaaaaacaaggaggattatgtgtgactgggtggcctggtagactcctcccacgttttgaatatttcgtgccttttttttttgttgtcattttctatgtcatttctcctaccatagcacaaatcctagcggaccctaggagcaaagaggggggcagccctcatgcctaacagtggtctgtttttatatgagactcaagaacaggcctcattccagggcacagtccctaaattactgatcatgtgcactcgtacagtatattactgtgaccacaaggatgtggcaaagattctcatctttcttcaagtggcttttgctcatctgattgagaattaatcagatcatgttggctacataaggaaacagaaggagggatttcaggagaggctggctcctccccaaggttagtccccagactgagaaagtgaaaccttattgggaaaaattggactgccctgaatttagcaccaattgcattaacgcacatctcttccacaactaacagacttaaaataacagtgtccttcgtattaatatctgtgccattcatttagaattagcagagctaatatggaggggctgaactagtagccacatcttgttcatcacatagactaatagaaaggaggctgtggctaaagcagaaatggaacttccggatctgaaattagccaatataatgttcttttgtatttgggtatttttcatcttaatttttacagcatatactcttcttaccagtatccttagaatccaaatgtctagataagttgaggacacatacctgcattgttgagcttctctactggggacgccccggcattattttattcccaagccagcagaccggcccagacagccaggctgtggctggtccagaccaactgctatggtggaaaatgcagcttccaggtcccactaccctgacatttccgtggaaggaagaacctggtggctcgtggaggaaaccagctttctatgagaaaggactgaaggattgcgcaccctgcacaagtacagattgaccaggaaaagacaagtgtcttctgtgtgtcacagggaaagccaggagtggccttctctgcaggccagcaagcctgcagcagcaggtgcccccacgtcaggtgctgactgtccgctgtccgctcctgtagaaggtagggagcacaatacctagggactaagggatgttcgccggttgtggtttgtttttttttttttttccttggttaagaaatcaaatttgcagaatttaatctacaagttgtattatgctttgaaaactccatccctcctaagaatcttaaaaaacttgaaatgctcgccaaatgtccccatgggatttttgaccaaaagtaaggtgataactgaagaaatttttagttctttgatcacttcagtgacaatacccattaatgaatcttctccatgatttggggttttttttcgttgttgttttttacacttcttaacctgttgatctatttgaggtcttttgtgtttatcaaacttattcttaagtttaaaaaagaaattaaaagggtggtttttttaagattttaaagtttgctaacatattaaaaatcttcaaatgcttattaaatagagcagttcttgccacccagtcttgtattctgtctttagctagccaaattgtccttgaatttgggttttccacaacctcaaagggttatttgaaatcttttgttgtattttaaaatattttttggaagagctgctaattttattttaaaaaacaaagttgtgaaaacatgcctcctttttaaaaaataacccctccatccaggatatggaatccagcaccacagtgcacaggtcagggctcggagggagcctctgtgcagatgtgctttctttacagtggctgtaaaaagtttgtatttattatgtataaaatgttgaataataaaaaaaatggaatta

SEQ ID NO: 24294 - DNA, 3259 bp, Homo sapiens
ccacgcgtcgcccacgcgtcgcaacaacgggttctaaatgatctggagtgtcatggagctgctgtatcagaacaaagccgagcagagctagaacagaaaatagatgaagctagagaaaatattcgtaaagcagagataattaaattgaaagctgaagcccggttggacctgctaaagcagattggtgtttctgtggacacatggctaaagagtgccatgaaccaagtaatggaagaactggaaaatgagcgatgggcccgccctcctgcagtgaccagtaatggcactttacactcgcttaatgcagataccgaaagagaagaaggcgaagagtttgaagataacatggatgttttcgatgacagcagttccagcccttctggcaccttaagaaattatccactcacctgcaaagttgtttattcctacaaggcttctcaaccagatgagttgaccattgaggaacatgaggtgttagaagtgattgaagatggagatatggaagactgggtaaaggctcgaaataaagttggccaagtgggttatgtgccagaaaagtacctacagtttcccacctcgaacagcctcctgagcatgctgcagtccctggccgctttggacagtcggtcacacacgtccagcaattccacggaagcagaactcgtttcaggcagcctcaacggagatgccagtgtatgttttgtgaaagcactttatgattatgagggccagacagatgatgagttatcttttcctgagggagcaataatccgtatcttgaacaaagaaaaccaagatgatgatggcttctgggaaggggaattcaatgggcgtattggagttttcccatcggtgctagtggaagaactttcagcctcagaaaatggtgacactccatggatgagagagattcagatctctccttcccccaagccacacgcctccctgcctccactgccgttgtacgaccagcctcccagcagcccctaccccagcccagataagaggagctccctgtactttccccggtctccttcagcaaacgaaaaaagccttcatgctgagtcaccaggattctcacaggcatcaaggcatactcctgagacctcatatggcaaactgcgacctgtccgggcagctccccctccacctacacagaatcaccgaaggccagcagagaagattgaagatgtggaaatcacactggtgtgatgatgggcttgcccatccattactgctacaatcaaggccaggcttggagtttggccagtcttgttttttaggcacctttgcatgatgatgactcttgaacagagcaaaaaacaaggaggattatgtgtgactgggtggcctggtagactcctcccacgttttgaatatttcgtgccttttttttttgttgtcattttctatgtcatttctcctaccatagcacaaatcctagcggaccctaggagcaaagaggggggcagccctcatgcctaacagtggtctgtttttatatgagactcaagaacaggcctcattccagggcacagtccctaaattactgatcatgtgcactcgtacagtatattactgtgaccacaaggatgtggcaaagattctcatctttcttcaagtggcttttgctcatctgattgagaattaatcagatcatgttggctacataaggaaacagaaggagggatttcaggagaggctggctcctccccaaggttagtccccagactgagaaagtgaaaccttattgggaaaaattggactgccctgaatttagcaccaattgcattaacgcacatctcttccacaactaacagacttaaaataacagtgtccttcgtattaatatctgtgccattcatttagaattagcagagctaatatggaggggctgaactagtagccacatcttgttcatcacatagactaatagaaaggaggctgtggctaaagcagaaatggaacttccggatctgaaattagccaatataatgttcttttgtatttgggtatttttcatcttaatttttacagcatatactcttcttaccagtatccttagaatccaaatgtctagataagttgaggacacatacctgcattgttgagcttctctactggggacgccccggcattattttattcccaagccagcagaccggcccagacagccaggctgtggctggtccagaccaactgctatggtggaaaatgcagcttccaggtcccactaccctgacatttccgtggaaggaagaacctggtggctcgtggaggaaaccagctttctatgagaaaggactgaaggattgcgcaccctgcacaagtacagattgaccaggaaaagacaagtgtcttctgtgtgtcacagggaaagccaggagtggccttctctgcaggccagcaagcctgcagcagcaggtgcccccacgtcaggtgctgactgtccgctgtccgctcctgtagaaggtagggagcacaatacctagggactaagggatgttcgccggttgtggtttgtttttttttttttttccttggttaagaaatcaaatttgcagaatttaatctacaagttgtattatgctttgaaaactccatccctcctaagaatcttaaaaaacttgaaatgctcgccaaatgtccccatgggatttttgaccaaaagtaaggtgataactgaagaaatttttagttctttgatcacttcagtgacaatacccattaatgaatcttctccatgatttggggttttttttcgttgttgttttttacacttcttaacctgttgatctatttgaggtcttttgtgtttatcaaacttattcttaagtttaaaaaagaaattaaaagggtggtttttttaagattttaaagtttgctaacatattaaaaatcttcaaatgcttattaaatagagcagttcttgccacccagtcttgtattctgtctttagctagccaaattgtccttgaatttgggttttccacaacctcaaagggttatttgaaatcttttgttgtattttaaaatattttttggaagagctgctaattttattttaaaaaacaaagttgtgaaaacatgcctcctttttaaaaaataacccctccatccaggatatggaatccagcaccacagtgcacaggtcagggctcggagggagcctctgtgcagatgtgctttctttacagtggctgtaaaaagtttgtatttattatgtataaaatgttgaataataaaaaaaatggaatta

SEQ ID NO: 24295 - DNA, 4184 bp, Homo sapiens
gggaagcagaatgtgatttgcttgaagatatgaggacattcagtcagaagaaggctgctattgaaagagagtatgcacagtattccattgtatggatataccacagtttatccattttcctgttgatggacatggtatgcagaagttggctagtcaatacctgaagagagattggcctggagtaaaagctgatgatcggaatgattacaggagcatgtatcccgtttggaaatcttttctcgagggaacaatgcaggtagcccagtctcggatgaatatatgtgaaaactataaaaacttcatttctgagcctgcaaggacagtgagaagcttaaaagaacagcaactaaaaaggtgtgtggaccagttgacaaagatccaaactgaattacaagagacagtgaaagatttagctaaaggcaaaaagaaatactttgagactgaacagatggctcatgcagtacgagagaaagctgacatcgaggcaaaatctaaacttagtctttttcaatcaagaatcagtttacagaaggcaagtgtaaagttaaaagcccggcgatctgagtgtaattccaaagctacccacgcaaggaatgattatcttcttaccctagcggcagcaaatgcacatcaggatcgctactatcaaacagatttagttaacattatgaaggctcttgatggaaatgtgtatgatcatctcaaggattatttaatagccttcagccggactgagctagaaacatgccaagctgtgcagaacacattccagtttttattagaaaactccagcaaggtggtccgggactacaatcttcagctgtttttgcaagaaaacgctgtatttcacaaaccccagcccttccagttccagccttgtgacagtgatactagccgacagttagaatcagaaactgggaccacagaggagcacagtctaaataaggaagctcgaaaatgggccacacgtgtggcacgtgagcataaaaacattgttcaccaacaacgggttctaaatgatctggagtgtcatggagctgctgtatcagaacaaagccgagcagagctagaacagaaaatagatgaagctagagaaaatattcgtaaagcagagataattaaattgaaagctgaagcccggttggacctgctaaagcagattggtgtttctgtggacacatggctaaagagtgccatgaaccaagtaatggaagaactggaaaatgagcgatgggcccgccctcctgcagtgaccagtaatggcactttacactcgcttaatgcagataccgaaagagaagaaggcgaagagtttgaagataacatggatgttttcgatgacagcagttccagcccttctggcaccttaagaaattatccactcacctgcaaagttgtttattcctacaaggcttctcaaccagatgagttgaccattgaggaacatgaggtgttagaagtgattgaagatggagatatggaagactgggtaaaggctcgaaataaagttggccaagtgggttatgtgccagaaaagtacctacagtttcccacctcgaacagcctcctgagcatgctgcagtccctggccgctttggacagtcggtcacacacgtccagcaattccacggaagcagaactcgtttcaggcagcctcaacggagatgccagtgtatgttttgtgaaagcactttatgattatgagggccagacagatgatgagttatcttttcctgagggagcaataatccgtatcttgaacaaagaaaaccaagatgatgatggcttctgggaaggggaattcaatgggcgtattggagttttcccatcggtgctagtggaagaactttcagcctcagaaaatggtgacactccatggatgagagagattcagatctctccttcccccaagccacacgcctccctgcctccactgccgttgtacgaccagcctcccagcagcccctaccccagcccagataagaggagctccctgtactttccccggtctccttcagcaaacgaaaaaagccttcatgctgagtcaccaggattctcacaggcatcaaggcatactcctgagacctcatatggcaaactgcgacctgtccgggcagctccccctccacctacacagaatcaccgaaggccagcagagaagattgaagatgtggaaatcacactggtgtgatgatgggcttgcccatccattactgctacaatcaaggccaggcttggagtttggccagtcttgttttttaggcacctttgcatgatgatgactcttgaacagagcaaaaaacaaggaggattatgtgtgactgggtggcctggtagactcctcccacgttttgaatatttcgtgccttttttttttgttgtcattttctatgtcatttctcctaccatagcacaaatcctagcggaccctaggagcaaagaggggggcagccctcatgcctaacagtggtctgtttttatatgagactcaagaacaggcctcattccagggcacagtccctaaattactgatcatgtgcactcgtacagtatattactgtgaccacaaggatgtggcaaagattctcatctttcttcaagtggcttttgctcatctgattgagaattaatcagatcatgttggctacataaggaaacagaaggagggatttcaggagaggctggctcctccccaaggttagtccccagactgagaaagtgaaaccttattgggaaaaattggactgccctgaatttagcaccaattgcattaacgcacatctcttccacaactaacagacttagctaatatggaggggctgaactagtagccacatcttgttcatcacatagactaatagaaaggaggctgtggctaaagcagaaatggaacttccggatctgaaattagccaatataatgttcttttgtatttgggtatttttcatcttaatttttacagcatatactcttcttaccagtatccttagaatccaaatgtctagataagttgaggacacatacctgcattgttgagcttctctactggggacgccccggcattattttattcccaagccagcagaccggcccagacagccaggctgtggctggtccagaccaactgctatggtggaaaatgcagcttccaggtcccactaccctgacatttccgtggaaggaagaacctggtggctcgtggaggaaaccagctttctatgagaaaggactgaaggattgcgcaccctgcacaagtacagattgaccaggaaaagacaagtgtcttctgtgtgtcacagggaaagccaggagtggccttctctgcaggccagcaagcctgcagcagcaggtgcccccacgtcaggtgctgactgtccgctgtccgctcctgtagaaggtagggagcacaatacctagggactaagggatgttcgccggttgtggtttgtttttttttttttttccttggttaagaaatcaaatttgcagaatttaatctacaagttgtattatgctttgaaaactccatccctcctaagaatcttaaaaaacttgaaatgctcgccaaatgtccccatgggatttttgaccaaaagtaaggtgataactgaagaaatttttagttctttgatcacttcagtgacaatacccattaatgaatcttctccatgatttggggttttttttcgttgttgttttttacacttcttaacctgttgatctatttgaggtcttttgtgtttatcaaacttattcttaagtttaaaaaagaaattaaaagggtggtttttttaagattttaaagtttgctaacatattaaaaatcttcaaatgcttattaaatagagcagttcttgccacccagtcttgtattctgtctttagctagccaaattgtccttgaatttgggttttccacaacctcaaagggttatttgaaatcttttgttgtattttaaaatattttttggaagagctgctaattttattttaaaaaacaaagttgtgaaaacatgcctcctttttaaaaaataacccctccatccaggatatggaatccagcaccacagtgcacaggtcagggctcggagggagcctctgtgcagatgtgctttctttacagtggctgtaaaaagtttgtatttattatgtataaaatgttgaataataaaaaaaatggaatta

SEQ ID NO: 24296 - DNA, 3865 bp, Homo sapiens
gggaagcagaatgtgatttgcttgaagatatgaggacattcagtcagaagaaggctgctattgaaagagagtatgcacagtattccattgtatggatataccacagtttatccattttcctgttgatggacatggtatgcagaagttggctagtcaatacctgaagagagattggcctggagtaaaagctgatgatcggaatgattacaggagcatgtatcccgtttggaaatcttttctcgagggaacaatgcaggtagcccagtctcggatgaatatatgtgaaaactataaaaacttcatttctgagcctgcaaggacagtgagaagcttaaaagaacagcaactaaaaaggtgtgtggaccagttgacaaagatccaaactgaattacaagagacagtgaaagatttagctaaaggcaaaaagaaatactttgagactgaacagatggctcatgcagtacgagagaaagctgacatcgaggcaaaatctaaacttagtctttttcaatcaagaatcagtttacagaaggcaagtgtaaagttaaaagcccggcgatctgagtgtaattccaaagctacccacgcaaggaatgattatcttcttaccctagcggcagcaaatgcacatcaggatcgctactatcaaacagatttagttaacattatgaaggctcttgatggaaatgtgtatgatcatctcaaggattatttaatagccttcagccggactgagctagaaacatgccaagctgtgcagaacacattccagtttttattagaaaactccagcaaggtggtccgggactacaatcttcagctgtttttgcaagaaaacgctgtatttcacaaaccccagcccttccagttccagccttgtgacagtgatactagccgacagttagaatcagaaactgggaccacagaggagcacagtctaaataaggaagctcgaaaatgggccacacgtgtggcacgtgagcataaaaacattgttcaccaacaacgggttctaaatgatctggagtgtcatggagctgctgtatcagaacaaagccgagcagagctagaacagaaaatagatgaagctagagaaaatattcgtaaagcagagataattaaattgaaagctgaagcccggttggacctgctaaagcagattggtgtttctgtggacacatggctaaagagtgccatgaaccaagtaatggaagaactggaaaatgagcgatgggcccgccctcctgcagtgaccagtaatggcactttacactcgcttaatgcagataccgaaagagaagaaggcgaagagtttgaagataacatggatgttttcgatgacagcagttccagcccttctggcaccttaagaaattatccactcacctgcaaagttgtttattcctacaaggcttctcaaccagatgagttgaccattgaggaacatgaggtgttagaagtgattgaagatggagatatggaagactgggtaaaggctcgaaataaagttggccaagtgggttatgtgccagaaaagtacctacagtttcccacctcgaacagcctcctgagcatgctgcagtccctggccgctttggacagtcggtcacacacgtccagcaattccacggaagcagaactcgtttcaggcagcctcaacggagatgccagtgtatgttttgtgaaagcactttatgattatgagggccagacagatgatgagttatcttttcctgagggagcaataatccgtatcttgaacaaagaaaaccaagatgatgatggcttctgggaaggggaattcaatgggcgtattggagttttcccatcggtgctagtggaagaactttcagcctcagaaaatggtgacactccatggatgagagagattcagatctctccttcccccaagccacacgcctccctgcctccactgccgttgtacgaccagcctcccagcagcccctaccccagcccagataagaggagctccctgtactttccccggtctccttcagcaaacgaaaaaagccttcatgctgagtcaccaggattctcacaggcatcaaggcatactcctgagacctcatatggcaaactgcgacctgtccgggcagctccccctccacctacacagaatcaccgaaggccagcagagaagattgaagatgtggaaatcacactggtgtgatgatgggcttgcccatccattactgctacaatcaaggccaggcttggagtttggccagtcttgttttttaggcacctttgcatgatgatgactcttgaacagagcaaaaaacaaggaggattatgtgtgactgggtggcctggtagactcctcccacgttttgaatatttcgtgccttttttttttgttgtcattttctatgtcatttctcctaccatagcacaaatcctagcggaccctaggagcaaagaggggggcagccctcatgcctaacagtggtctgtttttatatgagactcaagaacaggcctcattccagggcacagtccctaaattactgatcatgtgcactcgtacagtatattactgtgaccacaaggatgtggcaaagattctcatctttcttcaagtggcttttgctcatctgattgagaattaatcagatcatgttggctacataaggaaacagaaggagggatttcaggagaggctggctcctccccaaggttagtccccagactgagaaagtgaaaccttattgggaaaaattggactgccctgaatttagcaccaattgcattaacgcacatctcttccacaactaacagacttaaaataacagtgtccttcgtattaatatctgtgccattcatttagaattagcagagctaatatggaggggctgaactagtagccacatcttgttcatcacatagactaatagaaaggaggctgtggctaaagcagaaatggaacttccggatctgaaattagccaatataatgttcttttgtatttgggtatttttcatcttaatttttacagcatatactcttcttaccagtatccttagaatccaaatgtctagataagttgaggacacatacctgcattgttgagcttctctactggggacgccccggcattattttattcccaagccagcagaccggcccagacagccaggctgtggctggtccagaccaactgctatggtggaaaatgcagcttccaggtcccactaccctgacatttccgtggaaggaagaacctggtggctcgtggaggaaaccagctttctatgagaaaggactgaaggattgcgcaccctgcacaagtacagattgaccaggaaaagacaagtgtcttctgtgtgtcacagggaaagccaggagtggccttctctgcaggccagcaagcctgcagcagcaggtgcccccacgtcaggtgctgactgtccgctgtccgctcctgtagaaggtagggagcacaatacctagggactaagggatgttcgccggttgtggtttgtttttttttttttttccttggttaagaaatcaaatttgcagaatttaatctacaagttgtattatgctttgaaaactccatccctcctaagaatcttaaaaaacttgaaatgctcgccaaatgtccccatgggatttttgaccaaaagtaaggtgataactgaagaaatttttagttctttgatcacttcagtgacaatacccattaatgaatcttctccatccaggatatggaatccagcaccacagtgcacaggtcagggctcggagggagcctctgtgcagatgtgctttctttacagtggctgtaaaaagtttgtatttattatgtataaaatgttgaataataaaaaaaatggaatta

SEQ ID NO: 24297 - DNA, 3320 bp, Homo sapiens
gggaagcagaatgtgatttgcttgaagatatgaggacattcagtcagaagaaggctgctattgaaagagagtatgcacagtattccattgtatggatataccacagtttatccattttcctgttgatggacatggtatgcagaagttggctagtcaatacctgaagagagattggcctggagtaaaagctgatgatcggaatgattacaggagcatgtatcccgtttggaaatcttttctcgagggaacaatgcaggtagcccagtctcggatgaatatatgtgaaaactataaaaacttcatttctgagcctgcaaggacagtgagaagcttaaaagaacagcaactaaaaaggtgtgtggaccagttgacaaagatccaaactgaattacaagagacagtgaaagatttagctaaaggcaaaaagaaatactttgagactgaacagatggctcatgcagtacgagagaaagctgacatcgaggcaaaatctaaacttagtctttttcaatcaagaatcagtttacagaaggcaagtgtaaagttaaaagcccggcgatctgagtgtaattccaaagctacccacgcaaggaatgattatcttcttaccctagcggcagcaaatgcacatcaggatcgctactatcaaacagatttagttaacattatgaaggctcttgatggaaatgtgtatgatcatctcaaggattatttaatagccttcagccggactgagctagaaacatgccaagctgtgcagaacacattccagtttttattagaaaactccagcaaggtggtccgggactacaatcttcagctgtttttgcaagaaaacgctgtatttcacaaaccccagcccttccagttccagccttgtgacagtgatactagccgacagttagaatcagaaactgggaccacagaggagcacagtctaaataaggaagctcgaaaatgggccacacgtgtggcacgtgagcataaaaacattgttcaccaacaacgggttctaaatgatctggagtgtcatggagctgctgtatcagaacaaagccgagcagagctagaacagaaaatagatgaagctagagaaaatattcgtaaagcagagataattaaattgaaagctgaagcccggttggacctgctaaagcagattggtgtttctgtggacacatggctaaagagtgccatgaaccaagtaatggaagaactggaaaatgagcgatgggcccgccctcctgcagtgaccagtaatggcactttacactcgcttaatgcagataccgaaagagaagaaggcgaagagtttgaagataacatggatgttttcgatgacagcagttccagcccttctggcaccttaagaaattatccactcacctgcaaagttgtttattcctacaaggcttctcaaccagatgagttgaccattgaggaacatgaggtgttagaagtgattgaagatggagatatggaagactgggtaaaggctcgaaataaagttggccaagtgggttatgtgccagaaaagtacctacagtttcccacctcgaacagcctcctgagcatgctgcagtccctggccgctttggacagtcggtcacacacgtccagcaattccacggaagcagaactcgtttcaggcagcctcaacggagatgccagtgtatgttttgtgaaagcactttatgattatgagggccagacagatgatgagttatcttttcctgagggagcaataatccgtatcttgaacaaagaaaaccaagatgatgatggcttctgggaaggggaattcaatgggcgtattggagttttcccatcggtgctagtggaagaactttcagcctcagaaaatggtgacactccatggatgagagagattcagatctctccttcccccaagccacacgcctccctgcctccactgccgttgtacgaccagcctcccagcagcccctaccccagcccagataagaggagctccctgtactttccccggtctccttcagcaaacgaaaaaagccttcatgctgagtcaccaggattctcacaggcatcaaggcatactcctgagacctcatatggcaaactgcgacctgtccgggcagctccccctccacctacacagaatcaccgaaggccagcagagaagattgaagatgtggaaatcacactggtgtgatgatgggcttgcccatccattactgctacaatcaaggccaggcttggagtttggccagtcttgttttttaggcacctttgcatgatgatgactcttgaacagagcaaaaaacaaggaggattatgtgtgactgggtggcctggtagactcctcccacgttttgaatatttcgtgccttttttttttgttgtcattttctatgtcatttctcctaccatagcacaaatcctagcggaccctaggagcaaagaggggggcagccctcatgcctaacagtggtctgtttttatatgagactcaagaacaggcctcattccagggcacagtccctaaattactgatcatgtgcactcgtacagtatattactgtgaccacaaggatgtggcaaagattctcatctttcttcaagtggcttttgctcatctgattgagaattaatcagatcatgttggctacataaggaaacagaaggagggatttcaggagaggctggctcctccccaaggttagtccccagactgagaaagtgaaaccttattgggaaaaattggactgccctgaatttagcaccaattgcattaacgcacatctcttccacaactaacagacttaaaataacagtgtccttcgtattaatatctgtgccattcatttagaattagcagagctaatatggaggggctgaactagtagccacatcttgttcatcacatagactaatagaaaggaggctgtggctaaagcagaaatggaacttccggatctgaaattagccaatataatgttcttttgtatttgggtatttttcatcttaatttttacagcatatactcttcttaccagtatcatttgggttttccacaacctcaaagggttatttgaaatcttttgttgtattttaaaatattttttggaagagctgctaattttattttaaaaaacaaagttgtgaaaacatgcctcctttttaaaaaataacccctccatccaggatatggaatccagcaccacagtgcacaggtcagggctcggagggagcctctgtgcagatgtgctttctttacagtggctgtaaaaagtttgtatttattatgtataaaatgttgaataataaaaaaaatggaatta

SEQ ID NO: 24298 - DNA, 2809 bp, Homo sapiens
gggaagcagaatgtgatttgcttgaagatatgaggacattcagtcagaagaaggctgctattgaaagagagtatgcacagtattccattgtatggatataccacagtttatccattttcctgttgatggacatggtatgcagaagttggctagtcaatacctgaagagagattggcctggagtaaaagctgatgatcggaatgattacaggagcatgtatcccgtttggaaatcttttctcgagggaacaatgcaggtagcccagtctcggatgaatatatgtgaaaactataaaaacttcatttctgagcctgcaaggacagtgagaagcttaaaagaacagcaactaaaaaggtgtgtggaccagttgacaaagatccaaactgaattacaagagacagtgaaagatttagctaaaggcaaaaagaaatactttgagactgaacagatggctcatgcagtacgagagaaagctgacatcgaggcaaaatctaaacttagtctttttcaatcaagaatcagtttacagaaggcaagtgtaaagttaaaagcccggcgatctgagtgtaattccaaagctacccacgcaaggaatgattatcttcttaccctagcggcagcaaatgcacatcaggatcgctactatcaaacagatttagttaacattatgaaggctcttgatggaaatgtgtatgatcatctcaaggattatttaatagccttcagccggactgagctagaaacatgccaagctgtgcagaacacattccagtttttattagaaaactccagcaaggtggtccgggactacaatcttcagctgtttttgcaagaaaacgctgtatttcacaaaccccagcccttccagttccagccttgtgacagtgatactagccgacagttagaatcagaaactgggaccacagaggagcacagtctaaataaggaagctcgaaaatgggccacacgtgtggcacgtgagcataaaaacattgttcaccaacaacgggttctaaatgatctggagtgtcatggagctgctgtatcagaacaaagccgagcagagctagaacagaaaatagatgaagctagagaaaatattcgtaaagcagagataattaaattgaaagctgaagcccggttggacctgctaaagcagattggtgtttctgtggacacatggctaaagagtgccatgaaccaagtaatggaagaactggaaaatgagcgatgggcccgccctcctgcagtgaccagtaatggcactttacactcgcttaatgcagataccgaaagagaagaaggcgaagagtttgaagataacatggatgttttcgatgacagcagttccagcccttctggcaccttaagaaattatccactcacctgcaaagttgtttattcctacaaggcttctcaaccagatgagttgaccattgaggaacatgaggtgttagaagtgattgaagatggagatatggaagactgggtaaaggctcgaaataaagttggccaagtgggttatgtgccagaaaagtacctacagtttcccacctcgaacagcctcctgagcatgctgcagtccctggccgctttggacagtcggtcacacacgtccagcaattccacggaagcagaactcgtttcaggcagcctcaacggagatgccagtgtatgttttgtgaaagcactttatgattatgagggccagacagatgatgagttatcttttcctgagggagcaataatccgtatcttgaacaaagaaaaccaagatgatgatggcttctgggaaggggaattcaatgggcgtattggagttttcccatcggtgctagtggaagaactttcagcctcagaaaatggtgacactccatggatgagagagattcagatctctccttcccccaagccacacgcctccctgcctccactgccgttgtacgaccagcctcccagcagcccctaccccagcccagataagaggagctccctgtactttccccggtctccttcagcaaacgaaaaaagccttcatgctgagtcaccaggattctcacaggcatcaaggcatactcctgagacctcatatggcaaactgcgacctgtccgggcagctccccctccacctacacagaatcaccgaaggccagcagagaagattgaagatgtggaaatcacactggtgtgatgatgggcttgcccatccattactgctacaatcaaggccaggcttggagtttggccagtcttgttttttaggcacctttgcatgatgatgactcttgaacagagcaaaaaacaaggaggattatgtgtgactgggtggcctggtagactcctcccacgttttgaatatttcgtgccttttttttttgttgtcattttctatgtcatttctcctaccatagcacaaatcctagcggaccctaggagcaaagaggggggcagccctcatgcctaacagtggtctgtttttatatgagactcaagaacaggcctcattccagggcacagtccctaaattactgatcatgtgcactcgtacagtatattactgtgaccacaaggatgtggcaaagattctcatctttcttcaagtggcttttgctcatctgattgagaattaatcagatcatgttggctacataaggaaacagaaggagggatttcaggagaggctggctcctccccaaggttagtccccagactgagaaagtgaaaccttattgggataacgaattaaataacatgccctcgattaatatcgggccttcatttgaattacaaagctattgggggggtggaa

SEQ ID NO: 24299 - DNA, 7066 bp, Homo sapiens
gcgagctgagctgacagcgcggagctggcgctgtggagcgcagggagccttgccggttcctccgaccggcgtctgcgagtacagcggcggctaacctgccccggcttcaggatttacacagacgtggggcgatgcttgtgaccctgcagctcctcaaaggcccctagaagcctgtttctccgtacagtccaggacctccagccccatggagcccccgatcccacagagcgcccccttgactcccaactcagtcatggtccagccccttcttgacagccggatgtcccacagccggctccagcacccactcaccatcctacccattgaccaggtgaagaccagccatgtggagaatgactacatagacaaccctagcctggccctgaccaccggcccaaagcggacccggggcggggccccagagctggccccgacgcccgcccgctgtgaccaggatgtcacccaccattggatctccttcagcgggcgcccctgctctgctacctgcctgccaccggctgcgtgaagctggcccagcgtggctacgaccgtctgcgccgccctggttgccgctgcaagcacacgaacagcgtcatctgcaaagcagccagcggggatgccaagaccagcaggcccgacaagcctttctgacagtttgtgtcgaagccccagtgctctgcctggaaacctggttctcttctgacatctaagaagactgcagcaaggtcagaggttttagcctcctgaggctgaccttgctagtctgcccactccctacccccagcttcggaaaatacagagaccaccaccacgtaccctgtattccccaaggtgatgaagaagcactttggggctttttttcagggtcctgaaactttgtgtcaaacagacaatgcaggggcagggtgtggtttggggggaaatttttctttttcagaagacagaacacagatgtggacacatatccggaaactgcagctgcttgaatgccttcccagcccctccttctccctccctccctccgccccccccttcctcttttccattgtctttggctctcacaggagctagctgcctgggaggaattgttaactgagtaccagggtacctttaaagaagacccttggagtcttctataccttcttctccttccccatctcactccaccccactttgtccctgatgtcttggggaaggtgtagaacaccctagcagttcctattgtatatacttgggagccactgagaacagaggacggccagtgagtccaagcctcgttcctccttctgcctccccggagccacaggatggatttaggagccactgctcagtgcacttctcccttccaactgcatcaactaactctcgggggtgttctgctcaccacaccgtccttcggttcttactgagtcacagactcgcctgcccactacgtgtcctgggttctctactcagatcccttccagaaactttatatgggtagaggaagccagggcggcaaatgcgagaccaaatatcattttgccaatgagtctgaggctgtggtctctggatccagtcattatgtttttatagaataattaaaccggatgctaacggtgttttaaaaaataataataaaacaacttgtttccttttggccacccccaggaagggctgatttcaaaatctgggggcgagcaacctcaaggaacacaatttccctccctatcaacaagaggattttaacagcaaagaagagaggcagcacctcccattggcagaatgaccgctgagccaggctgggtttgggtttcttctcttctgattctgctgctcactgtcatagccttttgtgtatagtgatgtgtctgtatctttaatgtaaatagagagatgatgaaaaaagagtctattttagtgttaggaagccccagcaggggagtcggaagagcttggaagagctggggagagggtaggggaaaggtttttccaggggccactgggtttgagccctgcttctgtgcacagccacaccaccctctcccgacagccctcaaagacgtagcaactctttctctcaaggtgctaaaggactcagaaggtgcagcacgtccagtgggtaggtacttgttgcatgcaaaagctgtagtgtatctggtccttcctccccagcttttgtgtggggttcttgctttgtgtggtattttgttttcccctctaatgagagggcatggcctgagtcagaagagctaccccaggtgaaactggaagtgcatgaggcagagcgtccgtagcatttccagtttgttctgtataggacagaggtgcctccgggaaggaggcagcgaggtaggtagctatgataggcacctaatgcttctcaaggacttattttttccttcttgaagactagtagtaacatcttatgatttagagtaagttgattgtaaccataggtatttattgattggaggaagggagggtcatattattttcggctttatttatgtaacatttgctagcttataaaaggcgaatgtgaaatattgcatctgcattttccaaggctgattcgtgtagctacccttgccacagttgtgacggatgtatggatgttcttgaacatttcagaaggagtggtagaaaaaaacacacattcagccaaccacttatatgaattgaatgtatcagaagtgtactgaagggactggagatggttttcctcagatgagggggccccaaaattgatagtgcacatctgcacgctttctgcgaggcctcagaacttttcccagggcccctccctcaaattgtctccatgggaaacttgacccagtggcaagttgcactttggtgatcttggtggtctacacacccgttctgtggagagtcgatttacataagctgtgtatacacacacacacacacacacacacacacacacacacacacccctaccccacactgactgtctaccgacaaagaccctatttcctggcaaacggcctcctgaaccctgactttttgtgtacatacttgtaaacacggatttttctgggttttggtttgctttttccttttttccccctgcccctgttctagcttgttcttcttggtttgctttcaacctgcttgatggatgtctgcagagtgctctctaagagtccacctcagtgcctcgtgtgctcagtggtcatgggaaggagcgaaggaaccatccttggttctcccagcttggttgtgtagcaatccctcagcattgtttttctcagcttcttggcaaaaattaaaacaacaacaacaacaacaacaacaacaacaaacagaaggataaactggcttgcctgtggaccctccccggctctggggccagtcgagagccactgagggacccagcactcagagacacaacacacatgtgtagctgcttctggctgagtgtgtttcctgtcaccaatggcctgtttggctggacgatgcctcggcttgaccttttttgaaaagtgctggttagttcccgcccctggtaaacctggggtaggtgggggttctgtcttaactcgaggggcacctgggatccaggacgcttctagggggctctggctgcccgtgttaatgaaggacagcgcttccgcgagcaccctgggaactgggtcttgggtagcaaagccctcccagagaaaagatgggcacaactaaggctttcctgagcaggaagggggtgaagaccaatcccttcctttggtcctttggtacgcaccccctcagagctgagatggaagacatggctagttcttttcagccttgtggagcctgtcagtcgccatcatacctcgagtgaggcccagctagataatgacttgtccaagatggcacacgtggaaagttgatctgcaccagaacccggatgactgtcaccttgaagcgtcctgttctccttctgtgctgtcccaggaagtgtctggcgggcgtgggcagcacagctctacactgtacgattcactagggcatcctgcgagcctcactagccttctggttcatgcctttgacaagcatttttgtgccccctctgcttactgtgacagtcgatgatgaatcttgcgttgccattttctgctgtgggtaactgcgtgcagtgtcttgccttgctttctcttcttactgtcccacagcttggtttcatgttacaaacagaaaagctcgaggctcccaccccgccacatcccaacttcatttccccctcactgtagcccatttccaccccaccacaaagttgccacaggttttctttgtatagaatatttattttgaagctctattttaatagtatttattttagaaagtctactattgtaagagttcttctgtttgtgaagaaaaaaacaagttaaaaactgaatgtactgatttagaaaatatatataaatatatattgttaaatatacacgggactgccgtttttgattgcgccactgcactccagccttggcgaccagactaagacgctgtctcaaaaaaaaacaaaaacgacaaaaaaaaaacaaaacagaaaaaataaactaaggcaatgacagtccctggcaaatgctgggagggaggcagcagtggtcagggaaggtaaccctgaagcaggacttgtaaagcaaataagattgggaggccaaggtgggtggatcacgaggtcaggagttcgagaccagcctggccaacatagtgaaaccccgtctttactaaaaatacaaaaaaattagccaggtgtggtggtgggtgcctgtagtcccagctacttgggaggctgaggcaggagaatctcgaacccaggaggcggaggttacagtcagctgagaccgcaccattgcactccagcctgggtgacagagcaagattccgtctcaaaaaaaaaaaaaaaaaaaaaaaccaagaagaaaaggaatgaattagaacttcttctgcttggacttaagggcatcatcaggcaggttttgggtaggatagcaggggaggcagagacatagtcggggtcagtggtcatgagtgtggctttgagcccaaaaacttggtttctgttccctactttgccactcagtagtgcatgactttggccaaatttcttaaattcatgaagcaagtttccgggtgaatgaaatggggataaaaatagtgttcaaacctatccgttggtttgtgtgaaactgaaatgaatagtatcgtgcaggtacttgtgagcaaggggagctgctgtttcctgtccctttatgatgggaaatatctagacaagttcccaaccctctgcactgcaggctgcatggcacggagggtcttgtaacacagctggggctggccttcttttaggagcttcagtggttctgaaaacttttatttgtttgtttgttttagtagatgtggggtctttctgtgttgtccggactggtctcaaacttctggactcaagtgatcctcccccgctcaacctcccaaagtgttgggattacaggtgtgagccactgtgcccagccttgaaaactttttcaggttcttccagggttactgggcaattaaatatttctatttcattataagtcagtttttcaaagttatattatcttaattaccttttttatatgtattagtgtagagtagcattttatattttgatatcctccttatgcatagtttttcactttttattcctagtttttcgtttttaataagactttcaagaaatttattttattggccttttgaaaaaagcagctttagataaagtaagcagttctgctttcattttataatttatttctacttttgtttcattaatcttttcctccggcatgccttggattttgttgtgttactctttttctagaggctcgcattgtgtgtctggttcacttatgatcacgcttgcctacttttaagaatggaagaggggaggtggagggtggctgcacagtcgagggtgtgaggcagtcttgctctagccccaccatgccctcagcccgctgtggccacgctggttcctcaattgctggggcgtgcagtgtctgtaagggaggctactgatgccatccgaggaagatgtaaggtttcgtgtgggcagcgagagcctagcaggcatgtggggtgcccagcaaagggtaacagtggacagttgttgcctcattccacagagttttgattttttttttttttttaatggtcactccatcaacatcccccatggccagagcctgagctggtccccagagacacaggcattcagctgacagcctcgccttcacgctgctgctgttctcatgggggacaggcctcaggtggcaatgcacaaatcattagttaagggcagttgtgacagttaccaaggagtgtagcccccgcccgagtgaaaacagccctaaccaggggtggggaccttggggctctgacccgaagggtaggagaagctggaaggacagcattcctgtctgcgaaggcaggagcaaagctgccaggctatgaaggaaatggctggagcctgaagtcatgcaagctggggctggcagggacagggccaacttccaggcctgggggccaccatgaggattcaggacgtgacccccagggcacatgaaggccttccatctgtatttaagaaaagactttatcagacgagtatggtgctcacgcctgtaatcttagcactttgggaggctgaggcaggtggatcacgaggtcaggagttcaagaccagcctggccaatatggtaaaccccatctctactaaactacaaaatagccaggcatggtggcgcacgcctgtagtcccagctactcgggaggctgaggcagaagaatcacttgaacccgggaggtggaggttacagtgagccaagatcgcgccactacactccagcctgggtgacagagtgagactccgtctcaaaaaaaccaaaagactttatcttatttcctatatgtttgtggtttcagtcctgatgtataatttgaccctagttagaatggttatctgaggaagtggcctgtacgatttctgcttttttaaatgtgtggctccctttcttcattgattaacgtatgattattt

SEQ ID NO: 24300 - DNA, 4496 bp, Homo sapiens
gcgagctgagctgacagcgcggagctggcgctgtggagcgcagggagccttgccggttcctccgaccggcgtctgcgagtacagcggcggctaacctgccccggcttcaggatttacacagacgtggggcgatgcttgtgaccctgcagctcctcaaaggcccctagaagcctgtttctccgtacagtccaggacctccagccccatggagcccccgatcccacagagcgcccccttgactcccaactcagtcatggtccagccccttcttgacagccggatgtcccacagccggctccagcacccactcaccatcctacccattgaccaggtgaagaccagccatgtggagaatgactacatagacaaccctagcctggccctgaccaccggcccaaagcggacccggggcggggccccagagctggccccgacgcccgcccgctgtgaccaggatgtcacccaccattggatctccttcagcgggcgcccctgctctgctacctgcctgccaccggctgcgtgaagctggcccagcgtggctacgaccgtctgcgccgccctggttgccgctgcaagcacacgaacagcgtcatctgcaaagcagccagcggggatgccaagaccagcaggcccgacaagcctttctgacagtttgtgtcgaagccccagtgctctgcctggaaacctggttctcttctgacatctaagaagactgcagcaaggtcagaggttttagcctcctgaggctgaccttgctagtctgcccactccctacccccagcttcggaaaatacagagaccaccaccacgtaccctgtattccccaaggtgatgaagaagcactttggggctttttttcagggtcctgaaactttgtgtcaaacagacaatgcaggggcagggtgtggtttggggggaaatttttctttttcagaagacagaacacagatgtggacacatatccggaaactgcagctgcttgaatgccttcccagcccctccttctccctccctccctccgccccccccttcctcttttccattgtctttggctctcacaggagctagctgcctgggaggaattgttaactgagtaccagggtacctttaaagaagacccttggagtcttctataccttcttctccttccccatctcactccaccccactttgtccctgatgtcttggggaaggtgtagaacaccctagcagttcctattgtatatacttgggagccactgagaacagaggacggccagtgagtccaagcctcgttcctccttctgcctccccggagccacaggatggatttaggagccactgctcagtgcacttctcccttccaactgcatcaactaactctcgggggtgttctgctcaccacaccgtccttcggttcttactgagtcacagactcgcctgcccactacgtgtcctgggttctctactcagatcccttccagaaactttatatgggtagaggaagccagggcggcaaatgcgagaccaaatatcattttgccaatgagtctgaggctgtggtctctggatccagtcattatgtttttatagaataattaaaccggatgctaacggtgttttaaaaaataataataaaacaacttgtttccttttggccacccccaggaagggctgatttcaaaatctgggggcgagcaacctcaaggaacacaatttccctccctatcaacaagaggattttaacagcaaagaagagaggcagcacctcccattggcagaatgaccgctgagccaggctgggtttgggtttcttctcttctgattctgctgctcactgtcatagccttttgtgtatagtgatgtgtctgtatctttaatgtaaatagagagatgatgaaaaaagagtctattttagtgttaggaagccccagcaggggagtcggaagagcttggaagagctggggagagggtaggggaaaggtttttccaggggccactgggtttgagccctgcttctgtgcacagccacaccaccctctcccgacagccctcaaagacgtagcaactctttctctcaaggtgctaaaggactcagaaggtgcagcacgtccagtgggtaggtacttgttgcatgcaaaagctgtagtgtatctggtccttcctccccagcttttgtgtggggttcttgctttgtgtggtattttgttttcccctctaatgagagggcatggcctgagtcagaagagctaccccaggtgaaactggaagtgcatgaggcagagcgtccgtagcatttccagtttgttctgtataggacagaggtgcctccgggaaggaggcagcgaggtaggtagctatgataggcacctaatgcttctcaaggacttattttttccttcttgaagactagtagtaacatcttatgatttagagtaagttgattgtaaccataggtatttattgattggaggaagggagggtcatattattttcggctttatttatgtaacatttgctagcttataaaaggcgaatgtgaaatattgcatctgcattttccaaggctgattcgtgtagctacccttgccacagttgtgacggatgtatggatgttcttgaacatttcagaaggagtggtagaaaaaaacacacattcagccaaccacttatatgaattgaatgtatcagaagtgtactgaagggactggagatggttttcctcagatgagggggccccaaaattgatagtgcacatctgcacgctttctgcgaggcctcagaacttttcccagggcccctccctcaaattgtctccatgggaaacttgacccagtggcaagttgcactttggtgatcttggtggtctacacacccgttctgtggagagtcgatttacataagctgtgtatacacacacacacacacacacacacacacacacacacacacccctaccccacactgactgtctaccgacaaagaccctatttcctggcaaacggcctcctgaaccctgactttttgtgtacatacttgtaaacacggatttttctgggttttggtttgctttttccttttttccccctgcccctgttctagcttgttcttcttggtttgctttcaacctgcttgatggatgtctgcagagtgctctctaagagtccacctcagtgcctcgtgtgctcagtggtcatgggaaggagcgaaggaaccatccttggttctcccagcttggttgtgtagcaatccctcagcattgtttttctcagcttcttggcaaaaattaaaacaacaacaacaacaacaacaacaacaacaaacagaaggataaactggcttgcctgtggaccctccccggctctggggccagtcgagagccactgagggacccagcactcagagacacaacacacatgtgtagctgcttctggctgagtgtgtttcctgtcaccaatggcctgtttggctggacgatgcctcggcttgaccttttttgaaaagtgctggttagttcccgcccctggtaaacctggggtaggtgggggttctgtcttaactcgaggggcacctgggatccaggacgcttctagggggctctggctgcccgtgttaatgaaggacagcgcttccgcgagcaccctgggaactgggtcttgggtagcaaagccctcccagagaaaagatgggcacaactaaggctttcctgagcaggaagggggtgaagaccaatcccttcctttggtcctttggtacgcaccccctcagagctgagatggtgaagaccaatcccttccttggtccttggtacgcaccccctcagagctgagatggaagacatggctagttcttttcagccttgtggagcctgtcagtcgccatcatacctcgagtgaggcccagctagataatgacttgtccaagatggcacacgtggaaagttgatctgcaccagaacccggatgactgtcaccttgaagcgtcctgttctccttctgtgctgtcccaggaagtgtctggcgggcgtgggcagcacagctctacactgtacgattcactagggcatcctgcgagcctcactagccttctggttcatgcctttgacaagcatttttgtgccccctctgcttactgtgacagtcgatgatgaatcttgcgttgccattttctgctgtgggtaactgcgtgcagtgtcttgccttgctttctcttcttactgtcccacagcttggtttcatgttacaaacagaaaagctcgaggctcccaccccgccacatcccaacttcatttccccctcactgtagcccatttccaccccaccacaaagttgccacaggttttctttgtatagaatatttattttgaagctctattttaatagtatttattttagaaagtctactattgtaagagttcttctgtttgtgaagaaaaaaacaagttaaaaactgaatgtactgatttagaaaatatatataaatatatattgttaaatatacacgggactgccgtt

SEQ ID NO: 24301 - DNA, 4178 bp, Homo sapiens
gcgagctgagctgacagcgcggagctggcgctgtggagcgcagggagccttgccggttcctccgaccggcgtctgcgagtacagcggcggctaacctgccccggcttcaggatttacacagacgtggggcgatgcttgtgaccctgcagctcctcaaaggcccctagaagcctgtttctccgtacagtccaggacctccagccccatggagcccccgatcccacagagcgcccccttgactcccaactcagtcatggtccagccccttcttgacagccggatgtcccacagccggctccagcacccactcaccatcctacccattgaccaggtgaagaccagccatgtggagaatgactacatagacaaccctagcctggccctgaccaccggcccaaagcggacccggggcggggccccagagctggccccgacgcccgcccgctgtgaccaggatgtcacccaccattggatctccttcagcgggcgcccctgctctgctacctgcctgccaccggctgcgtgaagctggcccagcgtggctacgaccgtctgcgccgccctggttgccgctgcaagcacacgaacagcgtcatctgcaaagcagccagcggggatgccaagaccagcaggcccgacaagcctttctgacagtttgtgtcgaagccccagtgctctgcctggaaacctggttctcttctgacatctaagaagactgcagcaaggtcagaggttttagcctcctgaggctgaccttgctagtctgcccactccctacccccagcttcggaaaatacagagaccaccaccacgtaccctgtattccccaaggtgatgaagaagcactttggggctttttttcagggtcctgaaactttgtgtcaaacagacaatgcaggggcagggtgtggtttggggggaaatttttctttttcagaagacagaacacagatgtggacacatatccggaaactgcagctgcttgaatgccttcccagcccctccttctccctccctccctccgccccccccttcctcttttccattgtctttggctctcacaggagctagctgcctgggaggaattgttaactgagtaccagggtacctttaaagaagacccttggagtcttctataccttcttctccttccccatctcactccaccccactttgtccctgatgtcttggggaaggtgtagaacaccctagcagttcctattgtatatacttgggagccactgagaacagaggacggccagtgagtccaagcctcgttcctccttctgcctccccggagccacaggatggatttaggagccactgctcagtgcacttctcccttccaactgcatcaactaactctcgggggtgttctgctcaccacaccgtccttcggttcttactgagtcacagactcgcctgcccactacgtgtcctgggttctctactcagatcccttccagaaactttatatgggtagaggaagccagggcggcaaatgcgagaccaaatatcattttgccaatgagtctgaggctgtggtctctggatccagtcattatgtttttatagaataattaaaccggatgctaacggtgttttaaaaaataataataaaacaacttgtttccttttggccacccccaggaagggctgatttcaaaatctgggggcgagcaacctcaaggaacacaatttccctccctatcaacaagaggattttaacagcaaagaagagaggcagcacctcccattggcagaatgaccgctgagccaggctgggtttgggtttcttctcttctgattctgctgctcactgtcatagccttttgtgtatagtgatgtgtctgtatctttaatgtaaatagagagatgatgaaaaaagagtctattttagtgttaggaagccccagcaggggagtcggaagagcttggaagagctggggagagggtaggggaaaggtttttccaggggccactgggtttgagccctgcttctgtgcacagccacaccaccctctcccgacagccctcaaagacgtagcaactctttctctcaaggtgctaaaggactcagaaggtgcagcacgtccagtgggtaggtacttgttgcatgcaaaagctgtagtgtatctggtccttcctccccagcttttgtgtggggttcttgctttgtgtggtattttgttttcccctctaatgagagggcatggcctgagtcagaagagctaccccaggtgaaactggaagtgcatgaggcagagcgtccgtagcatttccagtttgttctgtataggacagaggtgcctccgggaaggaggcagcgaggtaggtagctatgataggcacctaatgcttctcaaggacttattttttccttcttgaagactagtagtaacatcttatgatttagagtaagttgattgtaaccataggtatttattgattggaggaagggagggtcatattattttcggctttatttatgtaacatttgctagcttataaaaggcgaatgtgaaatattgcatctgcattttccaaggctgattcgtgtagctacccttgccacagttgtgacggatgtatggatgttcttgaacatttcagaaggagtggtagaaaaaaacacacattcagccaaccacttatatgaattgaatgtatcagaagtgtactgaagggactggagatggttttcctcagatgagggggccccaaaattgatagtgcacatctgcacgctttctgcgaggcctcagaacttttcccagggcccctccctcaaattgtctccatgggaaacttgacccagtggcaagttgcactttggtgatcttggtggtctacacacccgttctgtggagagtcgatttacataagctgtgtatacacacacacacacacacacacacacacacacacacacacccctaccccacactgactgtctaccgacaaagaccctatttcctggcaaacggcctcctgaaccctgactttttgtgtacatacttgtaaacacggatttttctgggttttggtttgctttttccttttttccccctgcccctgttctagcttgttcttcttggtttgctttcaacctgcttgatggatgtctgcagagtgctctctaagagtccacctcagtgcctcgtgtgctcagtggtcatgggaaggagcgaaggaaccatccttggttctcccagcttggttgtgtagcaatccctcagcattgtttttctcagcttcttggcaaaaattaaaacaacaacaacaacaacaacaacaacaacaaacagaaggataaactggcttgcctgtggaccctccccggctctggggccagtcgagagccactgagggacccagcactcagagacacaacacacatgtgtagctgcttctggctgagtgtgtttcctgtcaccaatggcctgtttggctggacgatgcctcggcttgaccttttttgaaaagtgctggttagttcccgcccctggtaaacctggggtaggtgggggttctgtcagtcgccatcatacctcgagtgaggcccagctagataatgacttgtccaagatggcacacgtggaaagttgatctgcaccagaacccggatgactgtcaccttgaagcgtcctgttctccttctgtgctgtcccaggaagtgtctggcgggcgtgggcagcacagctctacactgtacgattcactagggcatcctgcgagcctcactagccttctggttcatgcctttgacaagcatttttgtgccccctctgcttactgtgacagtcgatgatgaatcttgcgttgccattttctgctgtgggtaactgcgtgcagtgtcttgccttgctttctcttcttactgtcccacagcttggtttcatgttacaaacagaaaagctcgaggctcccaccccgccacatcccaacttcatttccccctcactgtagcccatttccaccccaccacaaagttgccacaggttttctttgtatagaatatttattttgaagctctattttaatagtatttattttagaaagtctactattgtaagagttcttctgtttgtgaagaaaaaaacaagttaaaaactgaatgtactgatttagaaaatatatataaatatatattgttaaatatacacgggactgccgtt

SEQ ID NO: 24302 - DNA, 246 bp, Homo sapiens
agcggtttgcagcctgatgctcagccccctccccacaggtacaaatgcagtgagtgtcagactggctggttctgggctcccagacccgccaagcagcaaatacagtgttgcgcgtgttctggggattttgatatcctgctgattcagtattctaggactctctgtgccctggctccctcccttcctcacagacctgggccagggaccccatcaatgaaggtaccctagggacccttaagttcaact

SEQ ID NO: 24303 - DNA, 4947 bp, Homo sapiens
gcgagctgagctgacagcgcggagctggcgctgtggagcgcagggagccttgccggttcctccgaccggcgtctgcgagtacagcggcggctaacctgccccggcttcaggatttacacagacgtggggcgatgcttgtgaccctgcagctcctcaaagccagcctgtattgagcggtttgcagcctgatgctcagccccctccccacagggcccctagaagcctgtttctccgtacagtccaggacctccagccccatggagcccccgatcccacagagcgcccccttgactcccaactcagtcatggtccagccccttcttgacagccggatgtcccacagccggctccagcacccactcaccatcctacccattgaccaggtgaagaccagccatgtggagaatgactacatagacaaccctagcctggccctgaccaccggcccaaagcggacccggggcggggccccagagctggccccgacgcccgcccgctgtgaccaggatgtcacccaccattggatctccttcagcgggcgccccagctctgtgagcagcagcagcagcacatcctctgaccaacggctcttagaccacatggcaccaccacccgtggctgaccaggcctcaccaagggctgtgcgcatccagcccaaggtggtccactgccagccgctggacctcaagggcccggcggtcccacccgagctggacaagcacttcttgctgtgcgaggcctgtgggaagtgtaaatgcaaggagtgtgcatccccccggacgttgccttcctgctgggtctgcaaccaggagtgcctgtgctcagcccagactctggtcaactatggcacgtgcatgtgtttggtgcagggcatcttctaccactgcacgaatgaggacgatgagggctcctgcgctgaccacccctgctcctgctcccgctccaactgctgcgcccgctggtccttcatgggtgctctctccgtggtgctgccctgcctgctctgctacctgcctgccaccggctgcgtgaagctggcccagcgtggctacgaccgtctgcgccgccctggttgccgctgcaagcacacgaacagcgtcatctgcaaagcagccagcggggatgccaagaccagcaggcccgacaagcctttctgacagtttgtgtcgaagccccagtgctctgcctggaaacctggttctcttctgacatctaagaagactgcagcaaggtcagaggttttagcctcctgaggctgaccttgctagtctgcccactccctacccccagcttcggaaaatacagagaccaccaccacgtaccctgtattccccaaggtgatgaagaagcactttggggctttttttcagggtcctgaaactttgtgtcaaacagacaatgcaggggcagggtgtggtttggggggaaatttttctttttcagaagacagaacacagatgtggacacatatccggaaactgcagctgcttgaatgccttcccagcccctccttctccctccctccctccgccccccccttcctcttttccattgtctttggctctcacaggagctagctgcctgggaggaattgttaactgagtaccagggtacctttaaagaagacccttggagtcttctataccttcttctccttccccatctcactccaccccactttgtccctgatgtcttggggaaggtgtagaacaccctagcagttcctattgtatatacttgggagccactgagaacagaggacggccagtgagtccaagcctcgttcctccttctgcctccccggagccacaggatggatttaggagccactgctcagtgcacttctcccttccaactgcatcaactaactctcgggggtgttctgctcaccacaccgtccttcggttcttactgagtcacagactcgcctgcccactacgtgtcctgggttctctactcagatcccttccagaaactttatatgggtagaggaagccagggcggcaaatgcgagaccaaatatcattttgccaatgagtctgaggctgtggtctctggatccagtcattatgtttttatagaataattaaaccggatgctaacggtgttttaaaaaataataataaaacaacttgtttccttttggccacccccaggaagggctgatttcaaaatctgggggcgagcaacctcaaggaacacaatttccctccctatcaacaagaggattttaacagcaaagaagagaggcagcacctcccattggcagaatgaccgctgagccaggctgggtttgggtttcttctcttctgattctgctgctcactgtcatagccttttgtgtatagtgatgtgtctgtatctttaatgtaaatagagagatgatgaaaaaagagtctattttagtgttaggaagccccagcaggggagtcggaagagcttggaagagctggggagagggtaggggaaaggtttttccaggggccactgggtttgagccctgcttctgtgcacagccacaccaccctctcccgacagccctcaaagacgtagcaactctttctctcaaggtgctaaaggactcagaaggtgcagcacgtccagtgggtaggtacttgttgcatgcaaaagctgtagtgtatctggtccttcctccccagcttttgtgtggggttcttgctttgtgtggtattttgttttcccctctaatgagagggcatggcctgagtcagaagagctaccccaggtgaaactggaagtgcatgaggcagagcgtccgtagcatttccagtttgttctgtataggacagaggtgcctccgggaaggaggcagcgaggtaggtagctatgataggcacctaatgcttctcaaggacttattttttccttcttgaagactagtagtaacatcttatgatttagagtaagttgattgtaaccataggtatttattgattggaggaagggagggtcatattattttcggctttatttatgtaacatttgctagcttataaaaggcgaatgtgaaatattgcatctgcattttccaaggctgattcgtgtagctacccttgccacagttgtgacggatgtatggatgttcttgaacatttcagaaggagtggtagaaaaaaacacacattcagccaaccacttatatgaattgaatgtatcagaagtgtactgaagggactggagatggttttcctcagatgagggggccccaaaattgatagtgcacatctgcacgctttctgcgaggcctcagaacttttcccagggcccctccctcaaattgtctccatgggaaacttgacccagtggcaagttgcactttggtgatcttggtggtctacacacccgttctgtggagagtcgatttacataagctgtgtatacacacacacacacacacacacacacacacacacacacacccctaccccacactgactgtctaccgacaaagaccctatttcctggcaaacggcctcctgaaccctgactttttgtgtacatacttgtaaacacggatttttctgggttttggtttgctttttccttttttccccctgcccctgttctagcttgttcttcttggtttgctttcaacctgcttgatggatgtctgcagagtgctctctaagagtccacctcagtgcctcgtgtgctcagtggtcatgggaaggagcgaaggaaccatccttggttctcccagcttggttgtgtagcaatccctcagcattgtttttctcagcttcttggcaaaaattaaaacaacaacaacaacaacaacaacaacaacaaacagaaggataaactggcttgcctgtggaccctccccggctctggggccagtcgagagccactgagggacccagcactcagagacacaacacacatgtgtagctgcttctggctgagtgtgtttcctgtcaccaatggcctgtttggctggacgatgcctcggcttgaccttttttgaaaagtgctggttagttcccgcccctggtaaacctggggtaggtgggggttctgtcttaactcgaggggcacctgggatccaggacgcttctagggggctctggctgcccgtgttaatgaaggacagcgcttccgcgagcaccctgggaactgggtcttgggtagcaaagccctcccagagaaaagatgggcacaactaaggctttcctgagcaggaagggggtgaagaccaatcccttcctttggtcctttggtacgcaccccctcagagctgagatggaagacatggctagttcttttcagccttgtggagcctgtcagtcgccatcatacctcgagtgaggcccagctagataatgacttgtccaagatggcacacgtggaaagttgatctgcaccagaacccggatgactgtcaccttgaagcgtcctgttctccttctgtgctgtcccaggaagtgtctggcgggcgtgggcagcacagctctacactgtacgattcactagggcatcctgcgagcctcactagccttctggttcatgcctttgacaagcatttttgtgccccctctgcttactgtgacagtcgatgatgaatcttgcgttgccattttctgctgtgggtaactgcgtgcagtgtcttgccttgctttctcttcttactgtcccacagcttggtttcatgttacaaacagaaaagctcgaggctcccaccccgccacatcccaacttcatttccccctcactgtagcccatttccaccccaccacaaagttgccacaggttttctttgtatagaatatttattttgaagctctattttaatagtatttattttagaaagtctactattgtaagagttcttctgtttgtgaagaaaaaaacaagttaaaaactgaatgtactgatttagaaaatatatataaatatatattgttaaatatacacgggactgccgtt

SEQ ID NO: 24304 - DNA, 444 bp, Homo sapiens
gtcgactgcacaaaacatttggggttccaggtctctaaagcccatccatggaaccccggtttcccttctctcacgtgatcctaacaacctgccgaggatacacctcatcatgatcctcctttcacagctgagaacacaccagcttagagaaattaagaagtgtatccaagctcacacaatcttaagtggccagatcaggaccaaaatccaggtcctctggctgggcgcagtggctcatgcatgtaatcccggctctttgggtggccaaggcgggtggatcacctgaggtcaggagttcaagaccagcttggccaacatggtgaaaccccgtctctgctaagaatacagaaattagctgggcatggtggtgggcgcctgtagtcccagctgctcgggaggctgaggcaggagaattgtttgaacctaggaggcggaggttgcagt

SEQ ID NO: 24305 - DNA, 432 bp, Homo sapiens
agctgagatcgcaccactgcattccagcctgatgacagagcgagacttcatctcaaaaaaaaacaaaattaacacaatgtgtggaaaatataaaattagttagaagatatgtcttagaaattaaacttttagaagagttaatggtaagtggagaatgttaaattttttattacatacttacagctcaacttaagttttcattcagaatcttttattttggtgtgaatgttaaatattcaaaaataatagaatgacacctgtggatttcacatgtgaagtaatctttttcatattaacattaaaatcttgaggaatttctcacacttgtataatgtacttttttattgggtgcagtttacaatttagaggtttcattctttgtcacctaactagtcaactccttggtcattttatctggaaaaattttaagga

SEQ ID NO: 24306 - DNA, 252 bp, Homo sapiens
tcaagagatgggggtctcactatgttgcctgggccagtctcaaactcctggactctagggatcctcccaccttggcctcccaaagtgctgggactacaggcatgagccactgtgcccagccaaggcttttcaactacactttgtatcctactcatcttatgcattctgatgcttttgcatctacctaatactgcctaatcttagtttatcttttataagatttctttcacaacacttacaaatatagcctgg

SEQ ID NO: 24307 - DNA, 408 bp, Homo sapiens
ggtcgacgaatatttcaaatgtcacagggagagaactacctgacttagcagattatagtgatctgatcactggggcatacagtatctcaaagtaggcaatatccctgtctacaaagagtcatatagtctggctttcattccactgctcagtcaggagatgaggaggtcgcatgttcacgctctcgtcaccagccctagctgagctcccaggcaacagccagtatcacttgccagtcatgtgaaagagccatcacggaggtccggggcagtcaaacctccggatgattcccaacctggctgccatctaactgcaatcacatgagagacgccaaacaggaatcctgtcgattcacaaaaccataagagacaatgataagttgtggtttgaaaccattaggttttggggtg

SEQ ID NO: 24308 - DNA, 403 bp, Homo sapiens
ttatacacattcctaagtctttttaaaagccacatgggcaaggcaacttcctttgtccctatcttctgaattaaatcactgcctaatcatctagttaccatataatacctcaaaaagtttccaactttaagaacctattctctttccattaataaatctcattcaatgaagtccagtttgtatccatcttcacaatatggcaagttgtatttctttgcagacattttgtataataaagtctttttttttcctgtaccatgaattgtttgttccttatttatgaaagaaaagtctcttataatttaaaaaattgtgagatgatactcctccactcaaaatattgaacctagatttttttttgagacagggtctgacaccaaggctggaatgcagtggcacttca

SEQ ID NO: 24309 - DNA, 475 bp, Homo sapiens
taaaagatactagtattcacagcaaatgtgcagacgtaactaagacatccccacacctctgttacaactagatatgttcattcgattttggtagttatacagttcccagtgaagtcaccaatgtttattggccccttccttcactgagatacgttcatgggttctgatgagaaatacttgtaattattctaagagcatgctttagcatgcaaccttggtaaaaatatggtaggatcatactcttaaaacatcttttcttttgtctgagtgcaggcattaggtaaattatgtcacacacagcactgcagtgatttatagaagttaaataaatgttcgtaagtaatcttaatacctttaaaatattttgggaggtaaggttttacattatgaaaatattctgagcattttataaaattattcaacatttatactttggttatagtttttgttaaataggaaatatctaattatataa

SEQ ID NO: 24310 - DNA, 138 bp, Homo sapiens
gattgtacattggatgggaactcagggaatcttgttgctagtaccgtcactacttttgttaccttggaaaattaacctctcagagtgtcagagtctctatctgtaaaataaacattttaaatcataaaactttatttc

SEQ ID NO: 24311 - DNA, 373 bp, Homo sapiens
ttcattctcctacaggtttgagctgaattgtgctgggttaaacattatggggagagatggtgcataatttagcttctgtagaaattttatatgataaacttacctgcatagtagagcgaggaatttagaagctacctgacattgtatagattattgaaactttttgagcctcaggttgtcttgaagtggtaagattagtaatttttacctcatctatagtttatgaggattaaataagatggtgtgtgtaatatactgagggtgttacttggcaaaaaggaaaagtcagttctcatatctacccaaacatttgagttttctgagagaaaactctgtgaaattcttcacagagcaacatccctgaatcatgacc

SEQ ID NO: 24312 - DNA, 426 bp, Homo sapiens
tgggcaatatggcaaaaccctgtctctataaaaaatacaaaaattagccaggcatgatggtgcgtgcctgcagtcccagctactcgggaggctgatgtgggaggatcgtttgagcccaggaggcagaggttgcagtgagccaagattgcgccactgccctccagtctgggtgacagagaccctgtctgcaaaaaaaataaaaaataaaggaataatgacatatttgtataaaaatatagaagcacaaaatatgaaaaaaaattttaaccctataaaaatgaatttacactagacaaattgtctttattctgtaatgcatactattttataaggtaataacattatttctaaaaagaaaattttgattttccttaaatgaaagagttatgtcattttcctccaaagatagtatagcttagatttgtg

SEQ ID NO: 24313 - DNA, 322 bp, Homo sapiens
tgtgacttctgaccactatcctgcatgttactttaaaataacagacacaaaagaaaagctatgaaaaattataagaataacagaaaacattaatattaaaattgtcgcttatttcaaagcagtcaagaattcagggcctgctgaaaatatctcatctggccttgttttacatggcactctgctaaaacatttttctctgagctaagactgtggtgtggtagttgaatgaatcaaaaaacaagtccatcagaaaacaaaattacagcgacgtcgtaggcctaagcttatgaataatttggggcctaaatttatggtatgctca

SEQ ID NO: 24314 - DNA, 363 bp, Homo sapiens
taaaatagatgtaaatgagataaaagtttataaatgaactctccacaagaaaagtttatgatatgtttacttaggtttttttcaatgctttttagtaaccacacccttagagttttgctaaactaaattaaatgatgggttagggcccagatgccatggagactttggaacaaactgtcccactttcactggagactagtccagcaagaaagctcccatagtccataatatcatattgaaggaaataaaaatgtattaccacaaacattggccagatctaggcaagattaactgagagtctgattcttctcttcacccctgcaatatcacgccaagcattttcttttctcatccaagaaaacc

SEQ ID NO: 24315 - DNA, 367 bp, Homo sapiens
tttatttgagacagcgtcttgccctctcacccaagctggagtgcagtggcgcaatcatggctcactacgtcgaactcctgagctcaagtgatcctcctgcctcagcctcgcaagtagctgagactacaggcacacaccaccatgcctagttaatttttttaattttttttggagaaatggggtcttaccacgtcgcccaagctggtctcaaactcctggccacaaactatcctcctacctcagcttcccaaagtgctgggattacaagcgtgagccaacatggccagccttaccttttacttttaaattatgttagccacatttcaagtgctcaatagccacatgtggtgtgagcagctatcacgtg

SEQ ID NO: 24316 - DNA, 723 bp, Homo sapiens
cttaccattagatctagcatgaagccctcacccatgccgtgtaactctacatttactccttccttccatcttcaggggaaaagaagcaggggctgataaaacaagcagagaaggcccagggtcggtttattgacttctaaggactattggtcttttgcagtgaaggaaaaaaaaaaaatgccttaggacctgctaggtgctaatttgacctggcaatgaggtaaagttaggctttggctgtcttcaacctcctaggatcggaatgccatctacttagcataggagtcagacaattccctgggcaatagatcgctttccacttgtggagctactgaataaatagcaaagtaattaacagtgtgctatggctagatgtatcaggtggaatttcattacagcagaaagaactgagagaatgaaggagtcattttgtgtccaccgtcaggtgaatcgtttgtgctttctttcactaggatggacaggttatctctgctttcttcaagaagagaaatttctgaattccctatcatatcttcactttgatcaaggggaaaggaagaaaagaaaactcttaagtgcctaaaattggtccaaaaataaagaattcttctcatttttccatttaatgattttgttcctgaaacctatgggtgattctcttttgttgtattttttgtttctttattttttctcaactattaaatatctaaattttgaaatgtg

SEQ ID NO: 24317 - DNA, 298 bp, Homo sapiens
gttctgctttcacataaatacagtcatacagtgcacactattttgcatctgtattccctcactgttatactcatgaaattcttcaaattattttgcaaagttgaagcatgtctgttttcatcattctgtagcattctattgcattgctctactacaatttatttatctgttctattgttgatgggcatttgtatcattttcagtctgaagctattatagataatgctgaaatgagcatttcaatacatgtcttttggtgaacaaatcgacacatttctatttggtaaattggtattcg

SEQ ID NO: 24318 - DNA, 476 bp, Homo sapiens
actcttcagcctgtcaaaaattgctgggattacaggagtaagccacccacacctggcctattttttaaattgtgaatcatttttactgattattgtacgtttacataaaaggacgtaaaatataaacagctaagctatcactaagcaaagacccctgtatcttatcactcaagactttctattaatggtttgccgtagagtttatatatctttgacttttaagaaagtctaacactggctgggcgtggtggctcacacctgtaatcccagcatcttggggggctgaggtgggtggatcgcttgaggtcaggagtttgagaccagcctggccaacatggtgaaaccctgtctctactaaaaatagaaaaattagctgagtgtggtggcacttgcctgtagtcccagctactctggaggctgaggtgggagaattgcttgaaccccagaggccgagattgccccactgcactccagcc

SEQ ID NO: 24319 - DNA, 465 bp, Homo sapiens
ctcctcggcatttatttatgagaaatgaatggaaatcatgtccacacaaaagcctttatgtgaatgtttatagtagccttattcacaattgctattctacaacccaaatgcttttacaaatgaatgggtatacaagctgtggtacatccattaatactcatcaactaaaaagaatggactcgatgtatgtacttacttggatgcctctcagaggcaatatgctgagcttacaaagggagacttagaaggctacagactgtatgattccatctatgtcacattcttgaaaagtaaaaatatgtagtgatagagaaaagggataagtactagagcctatgggtattgagaaggtgtggctataaagctgaaaagtgatagcacaagtgaattttttggtgtgatagaactgggctatattttgattgtggtggtggttatacaaatctatgtatctatttaacattc

SEQ ID NO: 24320 - DNA, 243 bp, Homo sapiens
gaaaggagtgaggaagtgtgtgatgagatgggagagcagctaggaggctactgcataaactcaggtaagaaataaaaatggcctagtgatagcattggcaatttgcaaggagaagagggctgataatggcatcattaaccaggagagatttagagcggagaataagccactatagaggaaagttatagagctgattttggaatatgtcgactatggtgaatgtggggtatccaggaagtgggc

SEQ ID NO: 24321 - DNA, 404 bp, Homo sapiens
ccacagtccttgttgacttttaaaaagttttactagggtaccacgtccagtgtcttgaccccaggctggtaaccatcgcttgcccattactctgcaccagcttctttacatgcattttcagtctcttcgttttccatgttaactatgctacaatcaactaaaagtccttaatgtgctaatttaggaaagaccttaaccattctccaaactactaatgacccccaccatttgatcccactctccctgtaaaactagcttttattattccacaacgtggagcctctgttggggttggccagtattctcatcatccctccaccatgccatgtttattaatgagtcaaggtttgtggccatgctccttttttccaattaaatactgtttgctttatcgtttaatcaaa

SEQ ID NO: 24322 - DNA, 422 bp, Homo sapiens
gacacatcttgtgcttccctatttaatattttctctactgtctgtactccccacagatcctgataaagcaagcttcataaagtaggtgccaggctgggcatagtgactcacacctgtaattccaacactttgggaggctgaggcgggagggtggcttgaggccaggagctcgagaccatcctgggcaacatagcaagaccccatctttactactactactactactactactactactactgctactactactactactactaataataataataataataaagtagatgccagttaatgcttttgactgacccaccttcatagtcctattcacgttctcaaagtttaacacaactattatcatcccataaaatcaagagacacttatgggtatacatacatgtatagtagcagtttgtttt

SEQ ID NO: 24323 - DNA, 776 bp, Homo sapiens
tttttttttgagacaaagtctcgctctgtagcccagtctggagtgcagtggcgcgattttggctcactgtaacctccatctcctgggttcaagcaattctcctgtctcagcctccctagtagctgggactgcaggtatgtgctaccacacctggctaatttttgtatttttagtagagatggagtttcaccatattggtcaggctggtcttgaactcctgacctcaggtgatccacccacctcggcctcccaaagtgctgggattgcaggcgtgataaacaaatattcttaatagggctactttgaattaatctgcctttatgtttgggagaagaaagctgagacattgcatgaaagatgatgagagataaatgttgatcttttggccccatttgttaattgtattcagtatttgaacgtcgtcctgtttattgttagttttcttcatcatttattgtatagacaatttttaaatctctgtaatatgatacattttcctatcttttaagttattgttacctaaagttaatccagattatatggtccttatatgtgtacaacattaaaatgaaaggctttgtcttgcattgtgaggtacaggcggaagttggaatcaggttttaggattctgtctctcattagctgaataatgtgaggattaacttctgccagctcagaccatttcctaatcagttgaaagggaaacaagtatttcagtctcaaaattgaataatgcacaagtcttaagtgattaaaataaaactgttcttatgtca

SEQ ID NO: 24324 - DNA, 971 bp, Homo sapiens
tttttttttgagacaaagtctcgctctgtagcccagtctggagtgcagtggcgcgattttggctcactgtaacctccatctcctgggttcaagcaattctcctgtctcagcctccctagtagctgggactgcaggtatgtgctaccacacctggctaatttttgtatttttagtagagatggagtttcaccatattggtcaggctggtcttgaactcctgacctcaggtgatccacccacctcggcctcccaaagtgctgggattgcaggcgtgataaacaaatattcttaatagggctactttgaattaatctgcctttatgtttgggagaagaaagctgagacattgcatgaaagatgatgagagataaatgttgatcttttggccccatttgttaattgtattcagtatttgaacgtcgtcctgtttattgttagttttcttcatcatttattgtatagacaatttttaaatctctgtaatatgatacattttcctatcttttaagttattgttacctaaagttaatccagattatatggtccttatatgtgtacaacattaaaatgaaaggctttgtcttgcattgtgaggtacaggcggaagttggaatcaggttttaggattctgtctctcattagctgaataatgtgaggattaacttctgccagctcagaccatttcctaatcagttgaaagggaaacaagtatttcagtctcaaaattgaataatgcacaagtcttaagtgattaaaataaaactgttcttatgtcaaaaaagcacaccaaacaccacaccaacaatcttccccgcctcgcccagaaggttcaaaccccacgctggccggggacccccgcaaggaccgggcaccccggccgggcacccggccgacaagggggctccccaaaaaacgcgggcacgacgcacaaccgggagggggaggctccagaccgggtatcaccacgcgcg

SEQ ID NO: 24325 - DNA, 1441 bp, Homo sapiens
tttttttttgagacaaagtctcgctctgtagcccagtctggagtgcagtggcgcgattttggctcactgtaacctccatctcctgggttcaagcaattctcctgtctcagcctccctagtagctgggactgcaggtatgtgctaccacacctggctaatttttgtatttttagtagagatggagtttcaccatattggtcaggctggtcttgaactcctgacctcaggtgatccacccacctcggcctcccaaagtgctgggattgcaggcgtgataaacaaatattcttaatagggctactttgaattaatctgcctttatgtttgggagaagaaagctgagacattgcatgaaagatgatgagagataaatgttgatcttttggccccatttgttaattgtattcagtatttgaacgtcgtcctgtttattgttagttttcttcatcatttattgtatagacaatttttaaatctctgtaatatgatacattttcctatcttttaagttattgttacctaaagttaatccagattatatggtccttatatgtgtacaacattaaaatgaaaggctttgtcttgcaaaaaaaaaaaaaaaaaaaaaaaaaaaaaaaaaaaaaaaaaaaaaaaaacaaaaaaaaatagaagaaaaaaaaaaaaatgaaaagagaggaggagagaggaagaagaagaaacaagaaggagacgaatcagagagagagggagagaaggaagggatgaagggaaagaacggagagaggaggggaggggcaaaggaataggagaaggaagagaggagggaaagaggagaaggggagatgatgagacaaggaggggagggaagtagagggaagaaagagcagcgggggaaggcgagggcttgcgagagaatgggaagagaggagaggagagggagaggggaggaggggtgcgacgtgggggacgagggagagcgaggcggagaggggggaggggaggagaagggaggggagggggaggggagggggagggggggtgagttggtggggaggtgggagagagggtagggacagagagacggagacgaaagaaaagacagaagaagtagtggtcgggcggagtatgtagggagaggggagacaggagggagagagagaggaagagaagcgcgggtagtgacaacagcggagaggggacaaggtggcgagagcgtgaaacattaagaagatagaagataaaaagagggagatgaagaaagaataggagaggggtatggggagcgcgaggagcagatgagtgtagaataaatgggtggaagggaggagctagtagagagacggtaaggataggcggagtataatgtatgggatatagttagatgtggagaggatatctactataaatgctagtgggagggttaggaatagttgaagtagaagtaggagatagaggagaagaa

SEQ ID NO: 24326 - DNA, 394 bp, Homo sapiens
cagtatttgaacgtcgtcctgtctatacaataaatgatgaagaaaactaacaataaacaggacgacgttcaaatactgaaacaatttttaaatctctgtaatatgatacattttcctatcttttaagttattgttacctaaagttaatccagattatatggtccttatatgtgtacaacattaaaatgaaaggctttgtcttgcattgtgaggtacaggcggaagttggaatcaggttttaggattctgtctctcattagctgaataatgtgaggattaacttctgccagctcagaccatttcctaatcagttgaaagggaaacaagtatttcagtctcaaaattgaataatgcacaagtcttaagtgattaaaataaaactgttcttatgtca

SEQ ID NO: 24327 - DNA, 388 bp, Homo sapiens
acttcagatgaactgtggacccctaaaactgtatacaaaaatgtgggctatctacatttgttaattttttgagagttattatatcatttcttagattctcaaaagagtttgtgaccaaaaaaagttaaaaataactgttctaagattccacaggaatcatctgtctcagggggactttgtagacttctgaaacactagagctaaggaacttcatgtggcccagccaccacaggagccaaccctagaaatgtaggtgcagccttcaaaacccccagaaagacatcctgcatccagctcagccatttctccctgtgattaaggctgtgaaccagatgctaagcaaggttttctgttctacaaaaaaggcaacaacaacaagaaaacacca

SEQ ID NO: 24328 - DNA, 239 bp, Homo sapiens
cacatcttggaaaatctgttgaatgtaaaaagagaatgcttccagttttatagagctcagaaataagcaaaagtacttgttatgtataataactgaactatcttttaaaaagcaagggaacagcctgggctcagtggcttatgcctgtaatcctagcactttgggaggccaagggggaacagatcacctcaggtcaggagttcgagaccagcctgaccaacatggtgaaacctcgtctc

SEQ ID NO: 24329 - DNA, 384 bp, Homo sapiens
caaatgatgaggtgctggggaaaatatttggcttccttttcaggtgtcgagaccacattgtctctcgacaattggtcgagagattatacctgtcctttggggagaagacagagaaacaagatagaataaaaaaaggggtgattacaactctcactgatatggtaatcacaaaggcccctctcttcaccacatcctccactgttttgcagggtctggaatcccaaaggacaatactgactagcctaacagggagttagggtgggaaaactgggatgaaggaagaatgtgggaaggcagtacttttctatattgacgaacacccaaaaataaagggttaatatcttgagatgggaacaactcttgtggatgaaagaatgaggtttc

SEQ ID NO: 24330 - DNA, 933 bp, Homo sapiens
cagaactgagcagacggtgaggttgcactgtgacttagtctcaatgggaactccagccaatcccatgggagttctggagctagtataacctttcagtgttgtcctaaggcaaggtgaggaagggaagggggtctttacagtcacaggtggatcaggtatagatgtgtaggctgccctgggaaggagtgtgaccttggacaagacagctgtctctggctgaggcaatcctcatattggtctggcagtggggtgggacttctttgtccctggaggaggatctcagctgcatatcagagtccaccacatggacttgcagcctctgagagtgaggcagcatagcacagtctcaggaatcagactgttgggttcaacgttcacctccaccagttactcaataacctctgtgatcctcagtttccttatttgcaaaatgagaataatgctgaatgtttaagtataactgaatattgtagaaggctgagtcaaggagtcctaccacacagtgtgcagtgtcttactcaaatatctcaatagatgtgtctctttctgcaagtctctcctctagaattctcaaggcagcggattatttgcaccttccccctccttccaccaactacatccagtcctttctacttctctcttcatgacaagcagagtagcttccttcttagcattaaatctggatacctcctgtggctttcatccactctctatctacccttcggggcccaaatagtaaatattttaggctatgtggtctttgttgcaactactcaactttgcccatgcaatgctaaaggttgacagtttctaaatgcatgggtatgagtgtttcaatgaaactttattgataaaaacaggaagtgggctgtattttgcctgcaggccatagtttgctgacctctcctccatttcattgtgttttgaacaaac

SEQ ID NO: 24331 - DNA, 605 bp, Homo sapiens
ctcccaaagtcctaggattacaggtgtgaggcactgtgcctacccacctcctgcttcctattcattgtcaagtcctgttgggtcggtcccctctgtgtccctgccatccactcgattccctctgcgtccactgcccctgcccaggccatcggcaccactcacctccatccctgtggtagcctccacctcagtccatcctctcacactgctggccagagacctttccagagcagctctgtcccatcttgggtgccatccttgaatggttgcccagggcctgcagagtaaagtacacacagcccctcagggtggcttctgggacccctaaaatctgcttcctttgtccctccctggactcatttctcacttccccaggaattcaattcgtttgggttccttagctgagccaggcacactccccactttgggttcgggttttgacctatttcttctgggagccttctgttgacaccctggggtgggagatgctgcttgcttttccctgcagcctgcacttggcctgttgtacctgctcatttaatcatgtcttcccacctgagcttcgagagggggactcaggcctgctgccttatacaacacctagc

SEQ ID NO: 24332 - DNA, 399 bp, Homo sapiens
aagaaggggaagaagatcaaaacccaccatgccccaggctcaacagcgtgctgatggaagtggaagagcctgaagtcttacaggactcactggatagatgttattcgactccatcaatgtactgtgaactacgtgactcattccagcactacagaagtgtgttttagtcatttgaggaacagcacatcagctttgcccttgacatggacaataggttctttactttgacggtgacaagtctctatctggtcttccagatgggagtcatattcccacaataagcagcccttactaagccgagaggtgtcattcctgcaggcaggacctataggcgcctgaagatttgaatgaaactatagttccatttggaagcccagacataggatgggtcagtgggca

SEQ ID NO: 24333 - DNA, 2170 bp, Homo sapiens
gctgcttttccggctttgttggagattgacgcggcagtgcacacctgctggtacgtgcaaaagtagccgacaggccagagtttccagtttcggtggcttcgtaggcttttagcttctgaaatccgctaaaagcggcggttcattcatcttcaagtacctagcctgactggtagggctgctcagcattccgaaacatttcgacctggggaggggggcggcggtgaaagaatactttctgtagagagtgcccctcgcgtcgcccctgctttgaaggctttatgtattaacggaatgccgaacatttgtgtcctacttgctgacagcgcacaggatccttctaacagtatttctcaagtacttaacaaaaagatgaaaacttgaagtccaagccgtgctgctgattccgtctcacagtttaaagactgtccagaaactttaagctttcaaaactgtacattttaaaatcctgtgcgtttatcttcattttgctgggcagaaagccaaagtactggactgcctggttcagggctgaacgcctagtacacctgctaacttggagcttcagagccatggcaaccaaggagtcaagagacgccaaagcacagttggccctctcctcatcggccaatcagagcaaggaagtgcctgaaaacccaaactatgctctcaaatgtactcttgtgggacacacggaagcagtgtcatcagttaagtttagtcctaatggagaatggctagcaagttcttctgctgataggctaatcataatttggggagcatatgatggaaaatatgagaaaacactctatggtcataatttggaaatatcggatgttgcctggtcatcagattccagtcgtcttgtttctgcctcagatgataaaactctaaaattatgggatgtgagatctggaaaatgtttgaaaacactgaaggggcacagtaattatgtcttttgttgtaacttcaatccgccatccaaccttataatctcgggatcttttgatgagactgtaaaaatatgggaggtgaaaacaggaaagtgtctcaagactttgtctgctcattctgacccagtttctgctgttcattttaattgtagtgggtccttgatagtgtcaggtagctatgatggcctctgtagaatctgggatgctgcatcaggtcagtgtttaaaaacgctcgttgatgacgataaccctcctgtctcttttgtaaaattttctccaaatggtaaatacattctcactgcaactttggacaacactcttaaactatgggattatagcagaggcaggtgcctgaaaacatacactggtcataagaatgagaaatattgcatatttgccaatttttcagttactggtggaaagtggattgtgtctggttccgaggataacctggtttacatttggaaccttcagactaaagagattgtgcagaaattacaaggccatacagatgttgtgatctcagcagcttgtcatcctacagaaaacctcatcgcatcagcagcattagaaaatgacaaaacaattaaactgtggatgagtaaccactaatccctttgaaaatcaagtagtagagccaagttggccaaaaaacttggatatttaaaaagacggtttcttttaattttggcagtttggtattttaaaaattgtctattgttaaattttgagattcatacactacatttacaaaatgagatagttgaaaaagcacatctagaattcagcttctgactaccaatcttttttgagcaactttttgtaatttttatggatttatgtcacttttattacagggatatattgcatagtggtgaaatctgggcttagtataccctcacccaaatagtatacattgtacctagtaaatactttcccatctctcaccccactcccacctttgaaggctctagtgtctatgattctgctctccacgtccaggtgtacacattgtttatctcccacttacgagaacatgtggtttttgactttctgtatcattacttcacttaatggcctccaggtccatccatgttgttgcaaaagataagatttcattatttttttttttttttttttttttttttttttttttttttttttttttttttttgggggggggggggggggacaacagacaaggggggggaagggggggg

SEQ ID NO: 24334 - DNA, 2116 bp, Homo sapiens
gctgcttttccggctttgttggagattgacgcggcagtgcacacctgctggtacgtgcaaaagtagccgacaggccagagtttccagtttcggtggcttcgtaggcttttagcttctgaaatccgctaaaagcggcggttcattcatcttcaagtacctagcctgactggtagggctgctcagcattccgaaacatttcgacctggggaggggggcggcggtgaaagaatactttctgtagagagtgcccctcgcgtcgcccctgctttgaaggctttatgtattaacggaatgccgaacatttgtgtcctacttgctgacagcgcacaggatccttctaacagtatttctcaagtacttaacaaaaagatgaaaacttgaagtccaagccgtgctgctgattccgtctcacagtttaaagactgtccagaaactttaagctttcaaaactgtacattttaaaatcctgtgcgtttatcttcattttgctgggcagaaagccaaagtactggactgcctggttcagggctgaacgcctagtacacctgctaacttggagcttcagagccatggcaaccaaggagtcaagagacgccaaagcacagttggccctctcctcatcggccaatcagagcaaggaagtgcctgaaaacccaaactatgctctcaaatgtactcttgtgggacacacggaagcagtgtcatcagttaagtttagtcctaatggagaatggctagcaagttcttctgctgataggctaatcataatttggggagcatatgatggaaaatatgagaaaacactctatggtcataatttggaaatatcggatgttgcctggtcatcagattccagtcgtcttgtttctgcctcagatgataaaactctaaaattatgggatgtgagatctggaaaatgtttgaaaacactgaaggggcacagtaattatgtcttttgttgtaacttcaatccgccatccaaccttataatctcgggatcttttgatgagactgtaaaaatatgggaggtgaaaacaggaaagtgtctcaagactttgtctgctcattctgacccagtttctgctgttcattttaattgtagtgggtccttgatagtgtcaggtagctatgatggcctctgtagaatctgggatgctgcatcaggtcagtgtttaaaaacgctcgttgatgacgataaccctcctgtctcttttgtaaaattttctccaaatggtaaatacattctcactgcaactttggacaacactcttaaactatgggattatagcagaggcaggtgcctgattactggtggaaagtggattgtgtctggttccgaggataacctggtttacatttggaaccttcagactaaagagattgtgcagaaattacaaggccatacagatgttgtgatctcagcagcttgtcatcctacagaaaacctcatcgcatcagcagcattagaaaatgacaaaacaattaaactgtggatgagtaaccactaatccctttgaaaatcaagtagtagagccaagttggccaaaaaacttggatatttaaaaagacggtttcttttaattttggcagtttggtattttaaaaattgtctattgttaaattttgagattcatacactacatttacaaaatgagatagttgaaaaagcacatctagaattcagcttctgactaccaatcttttttgagcaactttttgtaatttttatggatttatgtcacttttattacagggatatattgcatagtggtgaaatctgggcttagtataccctcacccaaatagtatacattgtacctagtaaatactttcccatctctcaccccactcccacctttgaaggctctagtgtctatgattctgctctccacgtccaggtgtacacattgtttatctcccacttacgagaacatgtggtttttgactttctgtatcattacttcacttaatggcctccaggtccatccatgttgttgcaaaagataagatttcattatttttttttttttttttttttttttttttttttttttttttttttttttttttgggggggggggggggggacaacagacaaggggggggaagggggggg

SEQ ID NO: 24335 - DNA, 2128 bp, Homo sapiens
  misc_feature (33)..(33): n is a, c, g, or t
gtggtgaagtagagagggttggctttggggtgnggaaaggtgatgtttcggtggcttcgtaggcttttagcttctgaaatccgctaaaagcggcggttcattcatcttcaagtacctagcctgactggtagggctgctcagcattccgaaacatttcgacctggggaggggggcggcggtgaaagaatactttctgtagagagtgcccctcgcgtcgcccctgctttgaaggctttatgtattaacggaatgccgaacatttgtgtcctacttgctgacagcgcacaggatccttctaacagtatttctcaagtacttaacaaaaagatgaaaacttgaagtccaagccgtgctgctgattccgtctcacagtttaaagactgtccagaaactttaagctttcaaaactgtacattttaaaatcctgtgcgtttatcttcattttgctgggcagaaagccaaagtactggactgcctggttcagggctgaacgcctagtacacctgctaacttggagcttcagagccatggcaaccaaggagtcaagagacgccaaagcacagttggccctctcctcatcggccaatcagagcaaggaagtgcctgaaaacccaaactatgctctcaaatgtactcttgtgggacacacggaagcagtgtcatcagttaagtttagtcctaatggagaatggctagcaagttcttctgctgataggctaatcataatttggggagcatatgatggaaaatatgagaaaacactctatggtcataatttggaaatatcggatgttgcctggtcatcagattccagtcgtcttgtttctgcctcagatgataaaactctaaaattatgggatgtgagatctggaaaatgtttgaaaacactgaaggggcacagtaattatgtcttttgttgtaacttcaatccgccatccaaccttataatctcgggatcttttgatgagactgtaaaaatatgggaggtgaaaacaggaaagtgtctcaagactttgtctgctcattctgacccagtttctgctgttcattttaattgtagtgggtccttgatagtgtcaggtagctatgatggcctctgtagaatctgggatgctgcatcaggtcagtgtttaaaaacgctcgttgatgacgataaccctcctgtctcttttgtaaaattttctccaaatggtaaatacattctcactgcaactttggacaacactcttaaactatgggattatagcagaggcaggtgcctgaaaacatacactggtcataagaatgagaaatattgcatatttgccaatttttcagttactggtggaaagtggattgtgtctggttccgaggataacctggtttacatttggaaccttcagactaaagagattgtgcagaaattacaaggccatacagatgttgtgatctcagcagcttgtcatcctacagaaaacctcatcgcatcagcagcattagaaaatgacaaaacaattaaactgtggatgagtaaccactaatccctttgaaaatcaagtagtagagccaagttggccaaaaaacttggatatttaaaaagacggtttcttttaattttggcagtttggtattttaaaaattgtctattgttaaattttgagattcatacactacatttacaaaatgagatagttgaaaaagcacatctagaattcagcttctgactaccaatcttttttgagcaactttttgtaatttttatggatttatgtcacttttattacagggatatattgcatagtggtgaaatctgggcttagtataccctcacccaaatagtatacattgtacctagtaaatactttcccatctctcaccccactcccacctttgaaggctctagtgtctatgattctgctctccacgtccaggtgtacacattgtttatctcccacttacgagaacatgtggtttttgactttctgtatcattacttcacttaatggcctccaggtccatccatgttgttgcaaaagataagatttcattatttttttttttttttttttttttttttttttttttttttttttttttttttttgggggggggggggggggacaacagacaaggggggggaagggggggg

SEQ ID NO: 24336 - DNA, 3985 bp, Homo sapiens
tgttcggtttggtggttggccggtgggccggagacgcaccgtagaaaccgaaccctcttacccaattggacgccgtccccaagagacacatctcaattcaaaggcagcttgctgatctagagaatttagcttttgtaactgatggaaattttgactctgccagctcattgaactcagataatcttgatgcaggcaacagacaggcttgtccattgtgccctaaggaaaaattcagagcttgtaatagccataagcttcgtcgtcacctccagaatttacactggaaagtctcagttgaatttgaaggttacaggatgtgcatctgtcacttaccttgtcgaccagtgaaaccaaacattattggagaacagataaccagtaaaatgggagcccattatcattgtatcatttgttcagcaacaatcaccagaagaactgatatgctaggacatgttaggcgccacatgaataaaggagagactaaatctagttatattgcagcttccactgctaaaccacctaaggaaattttgaaagaggcagacacggatgtacaagtttgtcccaactattctatacctcagaaaacagattcctattttaaccccaaaatgaaactaaatcggcagctaatattctgtacattggctgctttggctgaggaacgaaaacctttggaatgtctagatgcttttggagccactgggataatgggattacagtgggcaaaacatcttggaaatgcagtcaaagttacaatcaatgacttgaatgaaaattctgtgacactgattcaggaaaactgccatttaaacaaattgaaagtggtggtggacagtaaggaaaaggaaaagagtgatgatattcttgaagaaggagagaaaaatcttggtaatattaaggtgaccaaaatggatgccaatgtactgatgcatttgagatcttttgatttcatacatctagacccttttggaacatcagtgaattatctagattctgcattcagaaatataagaaaccttggcatagtgtcagtgacttctacagatatcagttctttatatgccaaggcacagcatgttgcccggcgtcactacggatgtaacattgtccgaactgaatattacaaggaactagcagccagaattgttgtagctgcagtggcaagagctgcagcccgatgcaacaaaggcatagaagtactgtttgcagtggctctggaacattttgtgttggtagttgtgagagttttgaggggacctacttcagcagatgaaacagccaagaagattcaatacctgatccattgtcagtggtgtgaagagagaatttttcagaaggatggtaatatggtagaagaaaacccatatagacagctgccttgtaactgtcatggaagcatgcctggaaagacagcaatagaacttggacctctgtggtcaagttcccttttcaatactggattcctcaaaagaatgctatttgaatctcttcaccatggtttggatgacattcagaccctaataaagacattaatctttgaatcagagtgtacgcctcaaagtcagttttcaattcatgcatcttcaaatgtcaacaagcaagaagaaaatggtgtatttattaaaactacagatgacaccacaacagataattacattgcacaaggaaagagaaaaagtaatgaaatgatcacaaatttaggcaagaagcaaaagactgatgtcagtactgaacatcctcccttttattacaacattcacagacacagcattaaaggaatgaatatgccaaagttaaaaaagtttttgtgctatttatctcaagcaggctttcgagtaagccgaactcattttgacccaatgggtgtacgcacagatgcacctctgatgcagtttaaatctatccttttaaagtacagcacccccacctacactggaggacagtcagaaagccatgtccagtcagcatctgaagatacagtaactgaaagagttgaaatgtcagtgaatgacaaagcagaagcaagtggctgcagaagatggtaaacgtagagaagaattggttctcaggtgtctgtatagatggcctaatagttctctataccaactgtagttctttttctgttctttcaattcagtagagtaaaaataaaaaacagtgtcattttcattcagaaactgagcagtttctaacttagctggtttgggagctttgctttccaagtttttttttgttttaaggcaaacttaaaattttaatggaaacatttcatatgaagccaagtctcactgagatcaccctactgcttaataattcagaaaattttcacatgcaaagtgtttggaattttatgtatgttatgaaagccatcttttacaattcttaatcacatctctgcctaaactgattcatgatgtttatgttttcctgtttgtagtgtacaaaatgaagctgaaggctcacatgttaaaatgaccctgaatagaataggaagaacagtgttcttacaggtcataatgtatttcacaattaaaaaactaaaatatgtacccatttttaagaaatcatacttctctccacattgatcttttcatttcttactagcttttaagaaattaaatacttgcctgagatagaaatactttatttttgtaactttaaggtctaaatgactaaacttcaaagtaagattttgtcagaataaattgagaccattaatctaatataatacttgttcatgagcactgaaatcctgaagaggagagatttggttataaattaaaaaggttgggtgatcttaagtgcctcagttaatgcacgtacagtattcatttggttggttgtactacctctcagaagtaaaatttgtcaccttatggaatgagagtttttgggtttgggggttgtttttttgttgttgcttggtttggtatttttggttttgtgtgtatttgtataaattttctgtataattagcccaggctgatgtaactataaaaattagttgaaaaaaaaaatattgtttccttaatggaattctcacttcatttgaatataagattttggatgaaaggatttggtataaagtttgggtttttgtctcaaggatttgatccatatttatccctaaatatttcttaagggatgtaactttttataaccattaagtggggggaagggggtggagggggtggtaataattataactgaaaggtttaaatatactacctaagaaaaaagtacttctgtgacatatacaaaaaaatctagtggataggcattagatgaatagagaatattaattttgcagaaatgaaggaaaatctcttcgtgctagtacagcgtattcccaagagagtttattttcctttctccaattaatgtggtcataaatttcggtaaaatcaagaaataggtgaagtgcaagctagtttctataatgaccattaaaaaaattctgctgtgtaattcttgccagttaaaattataacttgcaaatgagcagaataaatgaggtttttttcaattaaaaattactataaatccaggaggcaaactattttagcactcagattatctgatttaatacatattattgaatatcagtctcaaattttgctaaatgcttatcagcatgaaatatgttgatcagtgatgagttgggcttaatgcaaagatcctaatttaataaagaaacctgtaaattactgttacctaaaatatatgtgtatattaatttcacatataaaggtagatttttcaaagaaaaatttggtaggcggtagtttagaactctgatcaggtactacatcaaccaaaagaggaaatactttaaaaattccttttagcaacctgagcaatcttattctcgtaacaatagtagtaatttgggacattgcaaatgtttatcatgttgtaaagtagcatcagttgtatcctttcattaaaacttgataaacaaaagaacgagttaaggaaacca

SEQ ID NO: 24337 - DNA, 314 bp, Homo sapiens
atgtaacattgtccgaactgaatattacaaggaactagcagccagaattgttgtagctgcagtggcaaggtaccaaattgccaacagtgtacttagtgtgtttcagtatttgataaaaagagataatattacaagaagtacttaccttattcaaaatatgcacaaaatataaattctgtattccttatctgtaatactggtttttaatcttacgtggtatctgttgtaattttatttaaaagtttatacctgaaatattcagtttactctccaattaaaatgttactgaaataaagtataagaaagaaaaggta

SEQ ID NO: 24338 - DNA, 4491 bp, Homo sapiens
tgttcggtttggtggttggccggtgggccggagacgcaccgtagaaaccgaaccctcttacccaattggacgccgtccccagtacgcttctgcgcagtttgtggtggcgtcgtaacgcctcggggaaagggaagcggacgggcatctggaatcgctgcctctggctttctgttttctactaacaggatttggtcactggttcttcatcttttgtctgttgcacgcatcccgccctccccacttgcttccccactccttggatccagccctgtgggcattcacgtcagttctctgaccccgccgtgagccccgctccgggtccccgggcgggcttggcacggaggcggtaactatggagaatatggcggaggaggagctgctgcccctggagaaggaggaggtggaggtggcccaggtccaggtcccgaccccggcccgggactcggctggggtcccagctccggccccggattcggctctggactcggctccgactccggcctcggctccagccccagcccctgccctggcccaggctccggccctgtccccgtccctagcctctgcccctgaggaggctaaaagcaagagacacatctcaattcaaaggcagcttgctgatctagagaatttagcttttgtaactgatggaaattttgactctgccagctcattgaactcagataatcttgatgcaggcaacagacaggcttgtccattgtgccctaaggaaaaattcagagcttgtaatagccataagcttcgtcgtcacctccagaatttacactggaaagtctcagttgaatttgaaggttacaggatgtgcatctgtcacttaccttgtcgaccagtgaaaccaaacattattggagaacagataaccagtaaaatgggagcccattatcattgtatcatttgttcagcaacaatcaccagaagaactgatatgctaggacatgttaggcgccacatgaataaaggagagactaaatctagttatattgcagcttccactgctaaaccacctaaggaaattttgaaagaggcagacacggatgtacaagtttgtcccaactattctatacctcagaaaacagattcctattttaaccccaaaatgaaactaaatcggcagctaatattctgtacattggctgctttggctgaggaacgaaaacctttggaatgtctagatgcttttggagccactgggataatgggattacagtgggcaaaacatcttggaaatgcagtcaaagttacaatcaatgacttgaatgaaaattctgtgacactgattcaggaaaactgccatttaaacaaattgaaagtggtggtggacagtaaggaaaaggaaaagagtgatgatattcttgaagaaggagagaaaaatcttggtaatattaaggtgaccaaaatggatgccaatgtactgatgcatttgagatcttttgatttcatacatctagacccttttggaacatcagtgaattatctagattctgcattcagaaatataagaaaccttggcatagtgtcagtgacttctacagatatcagttctttatatgccaaggcacagcatgttgcccggcgtcactacggatgtaacattgtccgaactgaatattacaaggaactagcagccagaattgttgtagctgcagtggcaagagctgcagcccgatgcaacaaaggcatagaagtactgtttgcagtggctctggaacattttgtgttggtagttgtgagagttttgaggggacctacttcagcagatgaaacagccaagaagattcaatacctgatccattgtcagtggtgtgaagagagaatttttcagaaggatggtaatatggtagaagaaaacccatatagacagctgccttgtaactgtcatggaagcatgcctggaaagacagcaatagaacttggacctctgtggtcaagttcccttttcaatactggattcctcaaaagaatgctatttgaatctcttcaccatggtttggatgacattcagaccctaataaagacattaatctttgaatcagagtgtacgcctcaaagtcagttttcaattcatgcatcttcaaatgtcaacaagcaagaagaaaatggtgtatttattaaaactacagatgacaccacaacagataattacattgcacaaggaaagagaaaaagtaatgaaatgatcacaaatttaggcaagaagcaaaagactgatgtcagtactgaacatcctcccttttattacaacattcacagacacagcattaaaggaatgaatatgccaaagttaaaaaagtttttgtgctatttatctcaagcaggctttcgagtaagccgaactcattttgacccaatgggtgtacgcacagatgcacctctgatgcagtttaaatctatccttttaaagtacagcacccccacctacactggaggacagtcagaaagccatgtccagtcagcatctgaagatacagtaactgaaagagttgaaatgtcagtgaatgacaaagcagaagcaagtggctgcagaagatggtaaacgtagagaagaattggttctcaggtgtctgtatagatggcctaatagttctctataccaactgtagttctttttctgttctttcaattcagtagagtaaaaataaaaaacagtgtcattttcattcagaaactgagcagtttctaacttagctggtttgggagctttgctttccaagtttttttttgttttaaggcaaacttaaaattttaatggaaacatttcatatgaagccaagtctcactgagatcaccctactgcttaataattcagaaaattttcacatgcaaagtgtttggaattttatgtatgttatgaaagccatcttttacaattcttaatcacatctctgcctaaactgattcatgatgtttatgttttcctgtttgtagtgtacaaaatgaagctgaaggctcacatgttaaaatgaccctgaatagaataggaagaacagtgttcttacaggtcataatgtatttcacaattaaaaaactaaaatatgtacccatttttaagaaatcatacttctctccacattgatcttttcatttcttactagcttttaagaaattaaatacttgcctgagatagaaatactttatttttgtaactttaaggtctaaatgactaaacttcaaagtaagattttgtcagaataaattgagaccattaatctaatataatacttgttcatgagcactgaaatcctgaagaggagagatttggttataaattaaaaaggttgggtgatcttaagtgcctcagttaatgcacgtacagtattcatttggttggttgtactacctctcagaagtaaaatttgtcaccttatggaatgagagtttttgggtttgggggttgtttttttgttgttgcttggtttggtatttttggttttgtgtgtatttgtataaattttctgtataattagcccaggctgatgtaactataaaaattagttgaaaaaaaaaatattgtttccttaatggaattctcacttcatttgaatataagattttggatgaaaggatttggtataaagtttgggtttttgtctcaaggatttgatccatatttatccctaaatatttcttaagggatgtaactttttataaccattaagtggggggaagggggtggagggggtggtaataattataactgaaaggtttaaatatactacctaagaaaaaagtacttctgtgacatatacaaaaaaatctagtggataggcattagatgaatagagaatattaattttgcagaaatgaaggaaaatctcttcgtgctagtacagcgtattcccaagagagtttattttcctttctccaattaatgtggtcataaatttcggtaaaatcaagaaataggtgaagtgcaagctagtttctataatgaccattaaaaaaattctgctgtgtaattcttgccagttaaaattataacttgcaaatgagcagaataaatgaggtttttttcaattaaaaattactataaatccaggaggcaaactattttagcactcagattatctgatttaatacatattattgaatatcagtctcaaattttgctaaatgcttatcagcatgaaatatgttgatcagtgatgagttgggcttaatgcaaagatcctaatttaataaagaaacctgtaaattactgttacctaaaatatatgtgtatattaatttcacatataaaggtagatttttcaaagaaaaatttggtaggcggtagtttagaactctgatcaggtactacatcaaccaaaagaggaaatactttaaaaattccttttagcaacctgagcaatcttattctcgtaacaatagtagtaatttgggacattgcaaatgtttatcatgttgtaaagtagcatcagttgtatcctttcattaaaacttgataaacaaaagaacgagttaaggaaacca

SEQ ID NO: 24339 - DNA, 2213 bp, Homo sapiens
tgttcggtttggtggttggccggtgggccggagacgcaccgtagaaaccgaaccctcttacccaattggacgccgtccccagtacgcttctgcgcagtttgtggtggcgtcgtaacgcctcggggaaagggaagcggacgggcatctggaatcgctgcctctggctttctgttttctactaacaggatttggtcactggttcttcatcttttgtctgttgcacgcatcccgccctccccacttgcttccccactccttggatccagccctgtgggcattcacgtcagttctctgaccccgccgtgagccccgctccgggtccccgggcgggcttggcacggaggcggtaactatggagaatatggcggaggaggagctgctgcccctggagaaggaggaggtggaggtggcccaggtccaggtcccgaccccggcccgggactcggctggggtcccagctccggccccggattcggctctggactcggctccgactccggcctcggctccagccccagcccctgccctggcccaggctccggccctgtccccgtccctagcctctgcccctgaggaggctaaaagcaagagacacatctcaattcaaaggcagcttgctgatctagagaatttagcttttgtaactgatggaaattttgactctgccagctcattgaactcagataatcttgatgcaggcaacagacaggcttgtccattgtgccctaaggaaaaattcagagcttgtaatagccataagcttcgtcgtcacctccagaatttacactggaaagtctcagttgaatttgaaggttacaggatgtgcatctgtcacttaccttgtcgaccagtgaaaccaaacattattggagaacagataaccagtaaaatgggagcccattatcattgtatcatttgttcagcaacaatcaccagaagaactgatatgctaggacatgttaggcgccacatgaataaaggagagactaaatctagttatattgcagcttccactgctaaaccacctaaggaaattttgaaagaggcagacacggatgtacaagtttgtcccaactattctatacctcagaaaacagattcctattttaaccccaaaatgaaactaaatcggcagctaatattctgtacattggctgctttggctgaggaacgaaaacctttggaatgtctagatgcttttggagccactgggataatgggattacagtgggcaaaacatcttggaaatgcagtcaaagttacaatcaatgacttgaatgaaaattctgtgacactgattcaggaaaactgccatttaaacaaattgaaagtggtggtggacagtaaggaaaaggaaaagagtgatgatattcttgaagaaggagagaaaaatcttggtaatattaaggtgaccaaaatggatgccaatgtactgatgcatttgagatcttttgatttcatacatctagacccttttggaacatcagtgaattatctagattctgcattcagaaatataagaaaccttggcatagtgtcagtgacttctacagatatcagttctttatatgccaaggcacagcatgttgcccggcgtcactacggatgtaacattgtccgaactgaatattacaaggaactagcagccagaattgttgtagctgcagtggcaagagctgcagcccgatgcaacaaaggcatagaagtactgtttgcagtggctctggaacattttgtgttggtagttgtgagagttttgaggggacctacttcagcagatgaaacagccaagaagattcaatacctgatccattgtcagtggtgtgaagagagaatttttcagaaggatggtaatatggtagaagaaaacccatatagacagctgccttgtaactgtcatggaagcatgcctggaaagacagcaatagaacttggacctctgtggtcaagttcccttttcaatactggattcctcaaaagaatgctatttgaatctcttcaccatggtttggatgacattcagaccctaataaagacattaatctttgaatcagagtgtacgcctcaaagtcagttttcaattcatgcatcttcaaatgtcaacaagcaaggtgactaactgaacgctagcttactagctttaaactgcttaccaaaaatactgtatctttttcaattgtatttgatgttataataaaaccaatataattata

SEQ ID NO: 24340 - DNA, 274 bp, Homo sapiens
ttctgtgcaatggaatttaactacccaatgttccagtccctaagtccaagtaaaattgagaccattattttcataaaatttatcatgtatgaatacaagagtgattaggaaagtagtataggcttctctcaaggccctccttccatattcaaatgtaaaactatgtttgaacaatggctttctatttcagactgaagggaattcccctaaaattcacaggttgaagccataacccccaatgtgactggtcttggagacagggcctttaaataag

SEQ ID NO: 24341 - DNA, 343 bp, Homo sapiens
gtgagagagagacctcagagcttcatctctgacatctcaagggaaaaattaaaaagttcctgttggctatttttcttttgctgctgtgtttttctagggtagctgttcttacctggttttctgctgtcccacgtgactctcacatgcactcgttgggacagtggtttatgcccttgttctgtgcactgtccagtaccctcattctgggattcttaacctggactccagagggatttttgcactctctggaatgatatgcaagatgatgtgtccattgtacatgcagaaaggagccccagaatctaagaaagagggagaactgtgggaacttagatgtcaactc

SEQ ID NO: 24342 - DNA, 429 bp, Homo sapiens
agatggagtttcactcttgttgcccaggctggagtgcaatggcacgatcttggctcactgcaacctcctcctcccgggttcaagtgattctcctgtctcagcctcccaagtagctgggattacaggcgcccaccaccacgctcagctaattttttgtatttttagtagagacggggtttcagtatgtcggccaggctgatctcaaacccctgacctcaggcaatccacccaccctggcctcccaaagtgctgggattatgggcgtgagccaccgtgcccagcccccacttctatttatgttcacacacacaccaccacctaaagggctctgcagcactgtattaatagtgattatttccttttttgagatggagtctcgctctgtcgtccaggttggagtgcagtggtgcagtctcggctcactgcaac

SEQ ID NO: 24343 - DNA, 414 bp, Homo sapiens
ttttccacagctttcattcaagcttttgttaattttcacatgaacagtaaccacctttctctctgcctccagccttgccttctcctaaaatcgaaaaaagcctaaaactaatcttcatattttatcaaatgtagatccccaagcccaaaacatttaattcagtgcagggtgtggagagaatttgtctttaacaactgcactcctggggcagcaatacaggtcagaccaggagaactgacctaatctgttctctaccataagaggataactcttctgatacgcaaatctgattaaccatgccacttccctgcttttaactcttcagtgactgctatttccatttaggataaagtccaaagtccttgacatagacattcgccacctgtcctctgcctccctttagagacttgtctt

SEQ ID NO: 24344 - DNA, 1083 bp, Homo sapiens
ccactgagggacttagtacttcccatgcccacaactccaggttctacagcatcagaagtcctagttctcagagactgtataccttctctaggcaatattgcaagaatcccattgaactacagtctgctgctactatgtgggcactttggactctgtgttcagggaccagtaggcaagaagtcaccatctagtcaagggtaattgaccctgaactgcaggaggaggcaagcctgctgtcagaggatagtggcgagagcaatgtgtgtggaacttagcggacccactggaggcaccctctgtactccttgcccagttgtaactgaatggactagtgcagcaaccctggtctgagaagggtttggctcccaggagctcaggaccctcaggaatgagagcttggtttatactatcaaaaaagccaccaagaccagcaaagatgacagttgtgggtgaggggaatttagaatgaagcagggagtaatgaggaccagttgtggttccaaaaccatttgcaggaaggtgctatagttggtcctaccaaactcctctttcaacatttatcctcaggaagagaggtccattggcgccctgaaacagtcactctctgcgtgtttttgggaaaatggatccacataggcaaggggtggaccatggcaggcatagagcggtgccacttagatcccccttcaagacaagatatgccatccagctgcaaggagtgtgggtagctggcagccaccagctgctacttcaccaggatccaccttagctttcaagctgaggtcacgctattctcaagacaggaggggttggtggccaatgatttcactaaattatggaaattgagagcatgcttttctgagggggccctcttgccaaagaccaagcaaggccatggtacaaggacctaactgtttcagtccaacacaggactcctccaatgagtgacctttttcccagagttcccctgggatggcagctcgcctgctctccctgcctcgtcctgcttcctcttttcctttcaaaggtgcttactccaataataaatcctttggtattctaaatgtctacttcttgaagaat

SEQ ID NO: 24345 - DNA, 652 bp, Homo sapiens
ccactgagggacttagtacttcccatgcccacaactccaggttctacagcatcagaagtcctagttctcagagactgtataccttctctaggcaatattgcaagaatcccattgaactacagtctgctgctactatgtgggcactttggactctgtgttcagggaccagtaggcaagaagtcaccatctagtcaagggtaattgaccctgaactgcaggaggaggcaagcctgctgtcagaggatagtggcgagagcaatgtgtgtggaacttagcggacccactggaggcaccctctgtactccttgcccagttgtaactgaatggactagtgcagcaaccctggtctgagaagggtttggctcccaggagctcaggaccctcaggaatgatttcactaaattatggaaattgagagcatgcttttctgagggggccctcttgccaaagaccaagcaaggccatggtacaaggacctaactgtttcagtccaacacaggactcctccaatgagtgacctttttcccagagttcccctgggatggcagctcgcctgctctccctgcctcgtcctgcttcctcttttcctttcaaaggtgcttactccaataataaatcctttggtattctaaatgtctacttcttgaagaat

SEQ ID NO: 24346 - DNA, 382 bp, Homo sapiens
acgtagattcactgattaacattttgccatattctctcctcacccctgctgtatgtatgtgcgcgcgcgcgcacacacacacacacacacacacacacacacacacacacacaggaaaacaaatgtttttcagaactctttgaaaggaacctatagatatcatgactcctcacacataaatagttcagcacgtgttccctaaggctaagaatgctcttggccgggcgcggtggctcacgcctgtaatcccagcactttgggaggccgaggcgggtggatcacgaggtcaggagatcgcgaacatcctagctaacacggtgaaaccctgtctctactaaaaatgcaaaaaattagccgggcgtggtggcgggcgcctgtagtc

SEQ ID NO: 24347 - DNA, 536 bp, Homo sapiens
tcaccaataagcacgaatacttactgaatatgttttgtgtgccaggcactttttaaagcactttaataacaataactaatgtttattaagcatctactgtgtgccaggcactgcttttggtacaaaagatgtgaaataaaccacacaaagaccatccctcttggaacctatgttttattgagatccagccaggtggtagaacacatcagtaaacaaacatagacttcagcaggtggtgacatgtgctctgaaggagaaatggagtccgagtagagagtgactatgcatgatgaactggtcaaggaaagtctgtctgataagggggtatttgagaagagcacttctccaaggaagtggaggagcaagcccagtttgcttccaatttcttcctccttgtgtcttgccaactgggaccaagcatgcctggcgtggaacaaactctttctgttctctgctgatggagccattttctcccagagcccaggctctaggtctgaaccctgatccttctcttcacttttcttttctaatggcca

SEQ ID NO: 24348 - DNA, 665 bp, Homo sapiens
ctgtgtgcagtaaactggaatgctctccctcgctcactcctcagtgtaggagtgatctgaagcaggacaagctcagcctgcagctgccgtgggctttgtgtggactggacgcagagcttgggagacgggggagggctattactccaattcactgtcaatggaattacagctatagcggcagtgtatataggattgctttttctcgtcttcctggagatgctcagtcccagtatattttaaggaagagaaatataaaggaaatttagtatgcctccttttctttaaatgaagaatttagtttcctttacttcttaaaagagaatacctgttcttgtataacgtgactgcaccagacattctgaaaaatcagcaagaagcaaaagctggaaatagctatttcacagcaggtaatcatacctcaggatgtagctactgtacaaagtttatacttggataatcctggatgggaataaaggtagggggtaactgcctgaaaaacctattactatacaggccttagcatcatgaatgactttcttcatgaggatctgaagttactatctctgaccacattgcacagaagagccaataagaatttcaaagagggcaatttccactaagggaattaagctacacaaaaggaactttcacacagaaactctatc

SEQ ID NO: 24349 - DNA, 4977 bp, Homo sapiens
  misc_feature (4834)..(4834): n is a, c, g, or t
ctgtgtgcagtaaactggaatgctctccctcgctcactcctcagtgtaggagtgatctgaagcaggacaagctcagcctgcagctgccgtgggctttgtgtggactggacgcagagcttgggagacgggggagggctattactccaattcactgtcaatggaattacagctatagcggcagtgtatataggattgctttttctcgtcttcctggagatgctcagtcccagtatattttaaggaagagaaatataaaggaaatttagtatgcctccttttctttaaatgaagaatttagtttcctttacttcttaaaagagaatacctgttcttgtataacgtgactgcaccagacattctgaaaaatcagcaagaagcaaaagctggaaatagctatttcacagcagggttctgaagtaacggaagctaccttgtataaagacctcaacactgctgaccatgatcagcgcagcctggagcatcttcctcatcgggactaaaattgggctgttccttcaagtagcacctctatcagttatggctaaatcctgtccatctgtgtgtcgctgcgatgcgggtttcatttactgtaatgatcgctttctgacatccattccaacaggaataccagaggatgctacaactctctaccttcagaacaaccaaataaataatgctgggattccttcagatttgaaaaacttgctgaaagtagaaagaatatacctataccacaacagtttagatgaatttcctaccaacctcccaaagtatgtaaaagagttacatttgcaagaaaataacataaggactatcacttatgattcactttcaaaaattccctatctggaagaattacatttagatgacaactctgtctctgcagttagcatagaagagggagcattccgagacagcaactatctccgactgcttttcctgtcccgtaatcaccttagcacaattccctggggtttgcccaggactatagaagaactacgcttggatgataatcgcatatccactatttcatcaccatctcttcaaggtctcactagtctaaaacgcctggttctagatggaaacctgttgaacaatcatggtttaggtgacaaagttttcttcaacctagttaatttgacagagctgtccctggtgcggaattccctgactgctgcaccagtaaaccttccaggcacaaacctgaggaagctttatcttcaagataaccacatcaatcgggtgcccccaaatgctttttcttatctaaggcagctctatcgactggatatgtccaataataacctaagtaatttacctcagggtatctttgatgatttggacaatataacacaactgattcttcgcaacaatccctggtattgcgggtgcaagatgaaatgggtacgtgactggttacaatcactacctgtgaaggtcaacgtgcgtgggctcatgtgccaagccccagaaaaggttcgtgggatggctattaaggatctcaatgcagaactgtttgattgtaaggacagtgggattgtaagcaccattcagataaccactgcaatacccaacacagtgtatcctgcccaaggacagtggccagctccagtgaccaaacagccagatattaagaaccccaagctcactaaggatcaccaaaccacagggagtccctcaagaaaaacaattacaattactgtgaagtctgtcacctctgataccattcatatctcttggaaacttgctctacctatgactgctttgagactcagctggcttaaactgggccatagcccggcatttggatctataacagaaacaattgtaacaggggaacgcagtgagtacttggtcacagccctggagcctgattcaccctataaagtatgcatggttcccatggaaaccagcaacctctacctatttgatgaaactcctgtttgtattgagactgaaactgcaccccttcgaatgtacaaccctacaaccaccctcaatcgagagcaagagaaagaaccttacaaaaaccccaatttacctttggctgccatcattggtggggctgtggccctggttaccattgcccttcttgctttagtgtgttggtatgttcataggaatggatcgctcttctcaaggaactgtgcatatagcaaagggaggagaagaaaggatgactatgcagaagctggcactaagaaggacaactctatcctggaaatcagggaaacttcttttcagatgttaccaataagcaatgaacccatctcgaaggaggagtttgtaatacacaccatatttcctcctaatggaatgaatctgtacaaaaacaatcacagtgaaagcagtagtaaccgaagctacagagacagtggtattccagactcagatcactcacactcatgatgctgaaggactcacagcagacttgtgttttgggttttttaaacctaagggaggtgatggtaggaaccctgttctactgcaaaacactggaaaaagagactgaaaaaaagcaatgtactgtacatttgccatataatttatatttaagaactttttattaaaagtttcaaatttcaggttactgctgcgattgatgtagtggagatgcctgaacacaattctatattttagtattttttagtaatttgtactgtattttccttgcaaatattggagttataaaccatttactttgtgttctactgagtaagatgacttgttgactgtgaaagtgaattttcttgctgtgtcgaacaatcaggactgcattcatatgagatccttgtagtataagcacaggccatttttcactttggtattaataaaatgtaaaaaaaaaaaactggctgaatggctgaatgagataaaatttaattttaaaaaatggttatgaaataatgttccaattattaaatttgtattatcccagtggtattcaataaatcaaaatgtgtgaagtaatgggcaatatcaaacttcctgcatatctccatttttgctctaggcaaattaattatccttaaaaaagttaagcatatcttctgaactgaatacatcagctggcataaaaggagcatgaagtctgttaaagccattgtcagcaaagctttgaaaataaaggacttcacaaaaacggtaatgtaaatgtgcttccaagttggggggaaaatgtgtacttaggaaaacatggaaacttagacttgtatagtgtaatgaacacaaataccaaaactgcattttggttttgcctataccatcctgatttttgaaaagtgaattataaacacaaaattgttagtgtttatgatgtttttatcataaaggatgtcagagaaactttatgcatattaaaaatgtaatgtaattataagcgattcccctcaacaatccagagaaagtagttctttaaataagagataatttaaagaaaaataaatactagacatcaaatttagatctggtttatgtcaaaggttttaacactgtacataaatgttcaatttacttttacaaagatcaagaatactgcccattactgtcacaattttccagatattatataatgaactcgtaatgtaacatttccttctagcttcctactgaattgtgagctgttacttgttgaaaaaccatatcacttttctgttgccatgatttttttttttcaacaaaaaaccaaagtgcattgtacgccctttggccagtcttgtatgtgccttgatccaacgctacatgtattcagcttttaaaactccacaaatttttcatactccttaaatatgaaaaattatggtcttattgctgaataaaacttttaaaaagtacagaataattgtgcttgctttttcaggattgtgttactatcactaagtagcaaattgcccagcacattagtcctaaacgtcccatgtatttttctaggcataaaaataaaagttggctaaaaattttaaaaaatcaacatcttgaggttgtgtatcattttacttcaaagagttcagtgtttcatgtataaatgtatttcctcttacttatacactgtatagatggaaaatttaagaaatggtttcaaagcctttctctcttaggcgcactgctgccactgtcctgatactttttaaggtggtctttgaaaaactgtttttttaaaatagccttttagtagagtgagttggcatttgtgatactgtgaaatacacactttctctttgtccctgtttctggcatacaactcctaaaatccttgcaatcttcaaagtgatatattttcatatgctaatgagttcactgatagctggcaggccctaggtagcttcaagataaagtctgatcattgaaaagaccaagacatgattatagggttgggacttacaaccccaaaccctaacctccagagagggcgaagtggatgaagattaagttgatcaccagtgaccagtggtttaatcaagcatgcctatgtaatcaagcctccataaaaaaacaaaaggtcaagatttggagagcttccagattgctgaacatgtggtggttcctgcaggatggcatgcctggagagggcatggaagctctgtgcccacctagacctcaccttatgtttcctgccatctggatcctttgtaacatcctttataatacgtcagtaaatctgtttccttgcattttgtgagctgttgtagcaaattaatagaacacaaaaaggggatcctgggaaaccaaacttgaagctgactagtcttgcaactggtgtctgaagaggaggcagttttgtgggaataagccctcaacctgtgggatatgacacaatttccaggtagacagtgtngggattaaactgaattggaggacacccagctggtatctgctgaagaactgattgcttgcgtggtgtatggggcaaaacttgttaagacaagtcttctatgttgattattgttgaatgagagaattaaacacacatacacactt

SEQ ID NO: 24350 - DNA, 4729 bp, Homo sapiens
  misc_feature (4586)..(4586): n is a, c, g, or t
ctgtgtgcagtaaactggaatgctctccctcgctcactcctcagtgtaggagtgatctgaagcaggacaagctcagcctgcagctgccgtgggctttgtgtggactggacgcagagcttgggagacgggggagggctattactccaattcactgtcaatggaattacagctatagcggcagtgtatataggattgctttttctcgtcttcctgggttctgaagtaacggaagctaccttgtataaagacctcaacactgctgaccatgatcagcgcagcctggagcatcttcctcatcgggagtccatctgtgtgtcgctgcgatgcgggtttcatttactgtaatgatcgctttctgacatccattccaacaggaataccagaggatgctacaactctctaccttcagaacaaccaaataaataatgctgggattccttcagatttgaaaaacttgctgaaagtagaaagaatatacctataccacaacagtttagatgaatttcctaccaacctcccaaagtatgtaaaagagttacatttgcaagaaaataacataaggactatcacttatgattcactttcaaaaattccctatctggaagaattacatttagatgacaactctgtctctgcagttagcatagaagagggagcattccgagacagcaactatctccgactgcttttcctgtcccgtaatcaccttagcacaattccctggggtttgcccaggactatagaagaactacgcttggatgataatcgcatatccactatttcatcaccatctcttcaaggtctcactagtctaaaacgcctggttctagatggaaacctgttgaacaatcatggtttaggtgacaaagttttcttcaacctagttaatttgacagagctgtccctggtgcggaattccctgactgctgcaccagtaaaccttccaggcacaaacctgaggaagctttatcttcaagataaccacatcaatcgggtgcccccaaatgctttttcttatctaaggcagctctatcgactggatatgtccaataataacctaagtaatttacctcagggtatctttgatgatttggacaatataacacaactgattcttcgcaacaatccctggtattgcgggtgcaagatgaaatgggtacgtgactggttacaatcactacctgtgaaggtcaacgtgcgtgggctcatgtgccaagccccagaaaaggttcgtgggatggctattaaggatctcaatgcagaactgtttgattgtaaggacagtgggattgtaagcaccattcagataaccactgcaatacccaacacagtgtatcctgcccaaggacagtggccagctccagtgaccaaacagccagatattaagaaccccaagctcactaaggatcaccaaaccacagggagtccctcaagaaaaacaattacaattactgtgaagtctgtcacctctgataccattcatatctcttggaaacttgctctacctatgactgctttgagactcagctggcttaaactgggccatagcccggcatttggatctataacagaaacaattgtaacaggggaacgcagtgagtacttggtcacagccctggagcctgattcaccctataaagtatgcatggttcccatggaaaccagcaacctctacctatttgatgaaactcctgtttgtattgagactgaaactgcaccccttcgaatgtacaaccctacaaccaccctcaatcgagagcaagagaaagaaccttacaaaaaccccaatttacctttggctgccatcattggtggggctgtggccctggttaccattgcccttcttgctttagtgtgttggtatgttcataggaatggatcgctcttctcaaggaactgtgcatatagcaaagggaggagaagaaaggatgactatgcagaagctggcactaagaaggacaactctatcctggaaatcagggaaacttcttttcagatgttaccaataagcaatgaacccatctcgaaggaggagtttgtaatacacaccatatttcctcctaatggaatgaatctgtacaaaaacaatcacagtgaaagcagtagtaaccgaagctacagagacagtggtattccagactcagatcactcacactcatgatgctgaaggactcacagcagacttgtgttttgggttttttaaacctaagggaggtgatggtaggaaccctgttctactgcaaaacactggaaaaagagactgaaaaaaagcaatgtactgtacatttgccatataatttatatttaagaactttttattaaaagtttcaaatttcaggttactgctgcgattgatgtagtggagatgcctgaacacaattctatattttagtattttttagtaatttgtactgtattttccttgcaaatattggagttataaaccatttactttgtgttctactgagtaagatgacttgttgactgtgaaagtgaattttcttgctgtgtcgaacaatcaggactgcattcatatgagatccttgtagtataagcacaggccatttttcactttggtattaataaaatgtaaaaaaaaaaaactggctgaatggctgaatgagataaaatttaattttaaaaaatggttatgaaataatgttccaattattaaatttgtattatcccagtggtattcaataaatcaaaatgtgtgaagtaatgggcaatatcaaacttcctgcatatctccatttttgctctaggcaaattaattatccttaaaaaagttaagcatatcttctgaactgaatacatcagctggcataaaaggagcatgaagtctgttaaagccattgtcagcaaagctttgaaaataaaggacttcacaaaaacggtaatgtaaatgtgcttccaagttggggggaaaatgtgtacttaggaaaacatggaaacttagacttgtatagtgtaatgaacacaaataccaaaactgcattttggttttgcctataccatcctgatttttgaaaagtgaattataaacacaaaattgttagtgtttatgatgtttttatcataaaggatgtcagagaaactttatgcatattaaaaatgtaatgtaattataagcgattcccctcaacaatccagagaaagtagttctttaaataagagataatttaaagaaaaataaatactagacatcaaatttagatctggtttatgtcaaaggttttaacactgtacataaatgttcaatttacttttacaaagatcaagaatactgcccattactgtcacaattttccagatattatataatgaactcgtaatgtaacatttccttctagcttcctactgaattgtgagctgttacttgttgaaaaaccatatcacttttctgttgccatgatttttttttttcaacaaaaaaccaaagtgcattgtacgccctttggccagtcttgtatgtgccttgatccaacgctacatgtattcagcttttaaaactccacaaatttttcatactccttaaatatgaaaaattatggtcttattgctgaataaaacttttaaaaagtacagaataattgtgcttgctttttcaggattgtgttactatcactaagtagcaaattgcccagcacattagtcctaaacgtcccatgtatttttctaggcataaaaataaaagttggctaaaaattttaaaaaatcaacatcttgaggttgtgtatcattttacttcaaagagttcagtgtttcatgtataaatgtatttcctcttacttatacactgtatagatggaaaatttaagaaatggtttcaaagcctttctctcttaggcgcactgctgccactgtcctgatactttttaaggtggtctttgaaaaactgtttttttaaaatagccttttagtagagtgagttggcatttgtgatactgtgaaatacacactttctctttgtccctgtttctggcatacaactcctaaaatccttgcaatcttcaaagtgatatattttcatatgctaatgagttcactgatagctggcaggccctaggtagcttcaagataaagtctgatcattgaaaagaccaagacatgattatagggttgggacttacaaccccaaaccctaacctccagagagggcgaagtggatgaagattaagttgatcaccagtgaccagtggtttaatcaagcatgcctatgtaatcaagcctccataaaaaaacaaaaggtcaagatttggagagcttccagattgctgaacatgtggtggttcctgcaggatggcatgcctggagagggcatggaagctctgtgcccacctagacctcaccttatgtttcctgccatctggatcctttgtaacatcctttataatacgtcagtaaatctgtttccttgcattttgtgagctgttgtagcaaattaatagaacacaaaaaggggatcctgggaaaccaaacttgaagctgactagtcttgcaactggtgtctgaagaggaggcagttttgtgggaataagccctcaacctgtgggatatgacacaatttccaggtagacagtgtngggattaaactgaattggaggacacccagctggtatctgctgaagaactgattgcttgcgtggtgtatggggcaaaacttgttaagacaagtcttctatgttgattattgttgaatgagagaattaaacacacatacacactt

SEQ ID NO: 24351 - DNA, 842 bp, Homo sapiens
agacttggaggtgggctgtgtgcagtaaactggaatgctctccctcgctcactcctcagtgtaggagtgatctgaagcaggacaagctcagcctgcagctgccgtgggctttgtgtggactggacgcagagcttgggagacgggggagggctattactccaattcactgtcaatggaattacagctatagcggcagtgtatataggattgctttttctcgtcttcctggtaagtgttttccatgttttttcttatgattgtcccagaaagtttgcttggttttactctctagaaagaaacgacttgatactatgagaaatccaaataggaacgtttgctctgtcaccacaacaagcaatatatgtgcgtgcaagccagcaatgaaaaatttcactatcatggctgaatgtaagaagtttcttagaaccttctttcatttataaaagatagtaagtggctattttctgtcttgagtaattgctatgtgaaaagagccttatggaaaacagcaagttggaaagttcaatgttaaatattaaagaatacaaggagattcttcacagataggaaagcaacttggtgtgtactgtacgtgtgggatgatcaccaattgctgtttttacaactgtgaaagaaaatcaataatccctcagcccatgagtacgcagtacatgaaaagcatacatcttgctcacagctagccgagctactcctggagacttatgtgcctctgtaaaggattaacagctacacctagattttaaagcttgcactgctatcgtgcctgagctgcttcaagcatttcaggcttgcaaatctcaactagtaaattgaactcagag

SEQ ID NO: 24352 - DNA, 4783 bp, Homo sapiens
  misc_feature (4640)..(4640): n is a, c, g, or t
ctgtgtgcagtaaactggaatgctctccctcgctcactcctcagtgtaggagtgatctgaagcaggacaagctcagcctgcagctgccgtgggctttgtgtggactggacgcagagcttgggagacgggggagggctattactccaattcactgtcaatggaattacagctatagcggcagtgtatataggattgctttttctcgtcttcctgggttctgaagtaacggaagctaccttgtataaagacctcaacactgctgaccatgatcagcgcagcctggagcatcttcctcatcgggactaaaattgggctgttccttcaagtagcacctctatcagttatggctaaatcctgtccatctgtgtgtcgctgcgatgcgggtttcatttactgtaatgatcgctttctgacatccattccaacaggaataccagaggatgctacaactctctaccttcagaacaaccaaataaataatgctgggattccttcagatttgaaaaacttgctgaaagtagaaagaatatacctataccacaacagtttagatgaatttcctaccaacctcccaaagtatgtaaaagagttacatttgcaagaaaataacataaggactatcacttatgattcactttcaaaaattccctatctggaagaattacatttagatgacaactctgtctctgcagttagcatagaagagggagcattccgagacagcaactatctccgactgcttttcctgtcccgtaatcaccttagcacaattccctggggtttgcccaggactatagaagaactacgcttggatgataatcgcatatccactatttcatcaccatctcttcaaggtctcactagtctaaaacgcctggttctagatggaaacctgttgaacaatcatggtttaggtgacaaagttttcttcaacctagttaatttgacagagctgtccctggtgcggaattccctgactgctgcaccagtaaaccttccaggcacaaacctgaggaagctttatcttcaagataaccacatcaatcgggtgcccccaaatgctttttcttatctaaggcagctctatcgactggatatgtccaataataacctaagtaatttacctcagggtatctttgatgatttggacaatataacacaactgattcttcgcaacaatccctggtattgcgggtgcaagatgaaatgggtacgtgactggttacaatcactacctgtgaaggtcaacgtgcgtgggctcatgtgccaagccccagaaaaggttcgtgggatggctattaaggatctcaatgcagaactgtttgattgtaaggacagtgggattgtaagcaccattcagataaccactgcaatacccaacacagtgtatcctgcccaaggacagtggccagctccagtgaccaaacagccagatattaagaaccccaagctcactaaggatcaccaaaccacagggagtccctcaagaaaaacaattacaattactgtgaagtctgtcacctctgataccattcatatctcttggaaacttgctctacctatgactgctttgagactcagctggcttaaactgggccatagcccggcatttggatctataacagaaacaattgtaacaggggaacgcagtgagtacttggtcacagccctggagcctgattcaccctataaagtatgcatggttcccatggaaaccagcaacctctacctatttgatgaaactcctgtttgtattgagactgaaactgcaccccttcgaatgtacaaccctacaaccaccctcaatcgagagcaagagaaagaaccttacaaaaaccccaatttacctttggctgccatcattggtggggctgtggccctggttaccattgcccttcttgctttagtgtgttggtatgttcataggaatggatcgctcttctcaaggaactgtgcatatagcaaagggaggagaagaaaggatgactatgcagaagctggcactaagaaggacaactctatcctggaaatcagggaaacttcttttcagatgttaccaataagcaatgaacccatctcgaaggaggagtttgtaatacacaccatatttcctcctaatggaatgaatctgtacaaaaacaatcacagtgaaagcagtagtaaccgaagctacagagacagtggtattccagactcagatcactcacactcatgatgctgaaggactcacagcagacttgtgttttgggttttttaaacctaagggaggtgatggtaggaaccctgttctactgcaaaacactggaaaaagagactgaaaaaaagcaatgtactgtacatttgccatataatttatatttaagaactttttattaaaagtttcaaatttcaggttactgctgcgattgatgtagtggagatgcctgaacacaattctatattttagtattttttagtaatttgtactgtattttccttgcaaatattggagttataaaccatttactttgtgttctactgagtaagatgacttgttgactgtgaaagtgaattttcttgctgtgtcgaacaatcaggactgcattcatatgagatccttgtagtataagcacaggccatttttcactttggtattaataaaatgtaaaaaaaaaaaactggctgaatggctgaatgagataaaatttaattttaaaaaatggttatgaaataatgttccaattattaaatttgtattatcccagtggtattcaataaatcaaaatgtgtgaagtaatgggcaatatcaaacttcctgcatatctccatttttgctctaggcaaattaattatccttaaaaaagttaagcatatcttctgaactgaatacatcagctggcataaaaggagcatgaagtctgttaaagccattgtcagcaaagctttgaaaataaaggacttcacaaaaacggtaatgtaaatgtgcttccaagttggggggaaaatgtgtacttaggaaaacatggaaacttagacttgtatagtgtaatgaacacaaataccaaaactgcattttggttttgcctataccatcctgatttttgaaaagtgaattataaacacaaaattgttagtgtttatgatgtttttatcataaaggatgtcagagaaactttatgcatattaaaaatgtaatgtaattataagcgattcccctcaacaatccagagaaagtagttctttaaataagagataatttaaagaaaaataaatactagacatcaaatttagatctggtttatgtcaaaggttttaacactgtacataaatgttcaatttacttttacaaagatcaagaatactgcccattactgtcacaattttccagatattatataatgaactcgtaatgtaacatttccttctagcttcctactgaattgtgagctgttacttgttgaaaaaccatatcacttttctgttgccatgatttttttttttcaacaaaaaaccaaagtgcattgtacgccctttggccagtcttgtatgtgccttgatccaacgctacatgtattcagcttttaaaactccacaaatttttcatactccttaaatatgaaaaattatggtcttattgctgaataaaacttttaaaaagtacagaataattgtgcttgctttttcaggattgtgttactatcactaagtagcaaattgcccagcacattagtcctaaacgtcccatgtatttttctaggcataaaaataaaagttggctaaaaattttaaaaaatcaacatcttgaggttgtgtatcattttacttcaaagagttcagtgtttcatgtataaatgtatttcctcttacttatacactgtatagatggaaaatttaagaaatggtttcaaagcctttctctcttaggcgcactgctgccactgtcctgatactttttaaggtggtctttgaaaaactgtttttttaaaatagccttttagtagagtgagttggcatttgtgatactgtgaaatacacactttctctttgtccctgtttctggcatacaactcctaaaatccttgcaatcttcaaagtgatatattttcatatgctaatgagttcactgatagctggcaggccctaggtagcttcaagataaagtctgatcattgaaaagaccaagacatgattatagggttgggacttacaaccccaaaccctaacctccagagagggcgaagtggatgaagattaagttgatcaccagtgaccagtggtttaatcaagcatgcctatgtaatcaagcctccataaaaaaacaaaaggtcaagatttggagagcttccagattgctgaacatgtggtggttcctgcaggatggcatgcctggagagggcatggaagctctgtgcccacctagacctcaccttatgtttcctgccatctggatcctttgtaacatcctttataatacgtcagtaaatctgtttccttgcattttgtgagctgttgtagcaaattaatagaacacaaaaaggggatcctgggaaaccaaacttgaagctgactagtcttgcaactggtgtctgaagaggaggcagttttgtgggaataagccctcaacctgtgggatatgacacaatttccaggtagacagtgtngggattaaactgaattggaggacacccagctggtatctgctgaagaactgattgcttgcgtggtgtatggggcaaaacttgttaagacaagtcttctatgttgattattgttgaatgagagaattaaacacacatacacactt

SEQ ID NO: 24353 - DNA, 2948 bp, Homo sapiens
gtcgcaggaacctcttgtgagccacgagcagatgcaggtgttccagatgatcaccaagtcccagcggatcttctcccatgcccaggtggcagcagtctcctcccagctccctgcgcccgagggcaaaccagccgccctgaggccgctgcaggggccgtggccgcagcagcccccaccactggctcctgctgtggactctctccacgccggccctggaaaccccgaggcagagggctccccagcccgcaggagaaaaaccacacccggggttcccagagaggcctcccccggcagcacgagacgagacgcaaaggggggactgaaagtggccgcggttccaacgccccttgcagcaccgtctctggacccttccaggaatccagacatctcttctctggccaagcagctgcgatcctctaaagggaccttggacctggaggacatcttcccctccacaggccaacggcagacccagttaggtggggaggagccaccaggagcctcgctgccagggaagcaggccccagccgagaatggcgcggcttcaaggatcacaaaaggtgaaaagggcccagcctgctcccggggtggaggctaccggctcttgggcaaccccagggccccgcgattctccggcttccggaaagagaaggcgaagatggatatgtgctgtgcggcttctccgagccaggtagccatggcctccttctcatcggccgggcccccggcagatccctccaagtccaagctgacaatattcagcagaatccagggtggaaacatctacaggctcccccatccggtgaaggaagagaatgtggcaggcagaggtaaccagcaaaacggcagtcccacagactggacgaagcccaggagcacttttgtctgcaagaactgcagccagatgttttatacggagaaagggctgagcagccacatgtgttttcacagcgaccagtggccgtcacctcgagggaagcaggaaccgcaggtgtttggcacagagttttgcaagccgctaagacaggtgctgaggccagaaggggacaggcatagtcccccaggaaccaagaagcccttggaccccacagctgcagcccctttggtggtcccccaatcgatccccgtggttccagtgacccgacacatagggagcatggccatgggacaagagaaagacggggaggagcgagacagcaaggagagcagccagcagagaaagcggaagaagcggcccccaccctccacggctggggagcctggccctgcaggatgccaccagagccgcctgcggtcacccatgttcctggtggactgcctcctgaagggcttattccagtgctccccctacacaccacccccaatgctcagccccatccgggagggctctggggtgtacttcaacaccctctgttccacgtccactcaggccagccctgaccagctcatcagctccatgctcgatcaagtggatgggtcctttggcatctgtgtggtgaaggatgacaccaaaatcagcattgagccacatatcaatataggaagccggtttcaggcagagatcccggaactccaggagagatccctggctggaactgacgagcatgtagcttctctggtctggaagccatggggagatatgatgatcagctcagagacacaggatagagtgaccgagctctgcaatgtggcatgctccagcgtgatgccaggagggggcaccaacctggagctcgctctgcactgcctgcacgaggctcagggcaacgttcaggtcgccctggagactcttctgctccgagggccccacaagccacggacacacctgctcgctgactatcgctacacaggttcagacgtctggacccctatagagaagaggctttttaagaaggcgttctatgcccacaagaaggacttctacttgatacacaagatgatccagacaaagacggtagctcagtgcgttgagtattattacatctggaaaaaaatgatcaagtttgactgtggccgagccccagggctagaaaagagggtcaagagagagccggaggaagtggaaaggacagaggaaaaggtcccatgcagccctcgggagagacccagccaccatccaactcccaagttaaagaccaagagttataggagggagtccatcctcagctccagcccaaatgcaggctccaagcggacccccgagctgttgggaagtgcagagagccagggcatttttccatgcagagagtgtgaaagggtgtttgacaagatcaagagtcgaaatgcccatatgaagcggcaccgccttcaggaccacgtggagcccatcatcagggtgaagtggccagtgaagcccttccagctaaaggaagaggagctgggagctgacatcggccccctgcagtggtgactcccgtggcagcaagtccgaatggggcctccagtgctgcccctcctcccttcggcctctccagggcgtttggggcacccctctgcctccccccaccctccctgtcccctgttggccaacctgcctgcaaacatggagggcatttggccacagataggcaggaggagctcagttgtcggacagctatgcagtccctgtccggtggtgctggaggctccactctccttaggttcatagtctctccccttctttcccttccacttctagagcagggaggcttggggaggggaaaatttagctctgggtagctcttaaatcttagcctcagttgtggggtttggtttcatgtgttagataaggccaagacttagagaatcagtgggaaaaaaccttgagatctccaacacgctgggcccctccctggggcggggactctaccttccagattcagtccctagtcttgcgatgaattctgcattgttcggtgttttttgtacatgtcaactcgtaaatctgattaaattgggttcttgaactg

SEQ ID NO: 24354 - DNA, 452 bp, Homo sapiens
tctaacccccaatgtgactgtatttggagatggaaccaattagtcccaaggaactaattaaatttaaatgaggttgcaaaagtggagccttgatttgataagattattttctttatgagaagagacactggagaattcttgctctctttctccttgcacgcacatagagaaaaggccaggtgagaacataatgagaaagtagccctctgaaagccaggaagagacactagatactgaatcagccagcaccttcctctttgacttttagctttcagaaatgagaaaataaatttatgttgtttaaaccaaccactctatggtatttggttatggcagcctgagcaaatggtcatgacaagtttgcaacaagaaattactagccatagaaataagaaatatgaaataaaatggaaagtgtgatgcatatgcaggaagaaacccatccagcaatg

SEQ ID NO: 24355 - DNA, 785 bp, Homo sapiens
cttgtacccagcatttcagaagccatgtggggaagaaggctgggcctagcttctggtatatctaatatacttacctgaaggattcatatatcagaaagaacatcaatcagagaagagaaactttcattttttaccttccatccaaatgtagtaggtttgtactacagaaagtgccagttaatttccaaggaagatgttactcatgatacgaggcttttctgtttgatgctgccaccaagcactcatcttcaagtgcccattgggcaacatgtttacctcaagctacctattacaggtacagaaatagtaaagccatatacacctgtatctggttccttactctcagagttcaaggaaccagttcttcccaacaataaatacatctactttttgataaaaatctatcccactggactcttcacaccagagcttgatcgtcttcagattggagattttgtttctgtaagcagtcctgagggcaattttaaaatatccaagttccaagaattagaagatctctttttgttggcagctggaacaggcttcacaccaatggttaaaatactgaattatgctttgactgatatacccagtctcaggaaaagtgaagctgaatgttctttcataaaaccaggaagatggttatatttggagaacccattgcgggaattagctttagggataaagactggttgtgactttgtctcccagccctatttctgaatgggaaggacccgggacaaattacaagcctttctcgatttgcagccacttgccaccaatcc

SEQ ID NO: 24356 - DNA, 210 bp, Homo sapiens
cccaacctcttcttccatcaaagcttcataatatatagtaattaataaggaatgttcatctcattgtagcttttgatcttcattctctgtaactgagtgaaagtaaataatatatgtgatcaaaagccaagcagcaagacaaaaagggaagactagaacacaaataaggcaagactaatagttgaagcatggatcatgaaaaatcagtgg

SEQ ID NO: 24357 - DNA, 2225 bp, Homo sapiens
tgctgcgtcagaatgcgcctcacccctggcgaccccggaagtgggtcgggggcttggcctctgcccggccacagagccggagctggaggtgctgtcccgtctggcggcgatccccgggcagggcccggggccggggtttgaagatgctgaacgtcccttcccagtctttcccggcccccaggtcgcagcagcgtgtcgcctccggggggcgtagcaaggtacctttaaaacagggcagaagccttatggattggattcgactgaccaaaagtggaaaggatctaacgggattaaaaggcaggttaattgaagtaactgaagaagaacttaagaaacacaacaaaaaagatgattgttggatatgcataagaggtttcgtttataatgtcagcccttatatggagtatcatcctggtggagaagatgaactaatgagagcagcaggatcagatggtactgaactttttgatcaggttcatcgttgggtcaattatgaatccatgctgaaagaatgcctggttggcagaatggccattaaacctgctgttctgaaaggcatgcttcccaagagccaagtgacagatacacttgccaaagaaggtcctagttatccaagctatgattggttccaaacagactctttagtcaccattgccatatatactaaacagaaggatatcaatttagactcaataatagttgatcatcagaatgattcctttagagcagaaacaattattaaggattgtttatatcttatacatattgggctaagccatgaggttcaggaagatttttctgtgcgggttgttgagagtgtgggaaaaatagagattgttctacaaaaaaaagagaatacttcttgggactttcttggccatcccctgaagaatcataattcacttattccaaggaaagatacaggtttgtactacagaaagtgccagttaatttccaaggaagatgttactcatgatacgaggcttttctgtttgatgctgccaccaagcactcatcttcaagtgcccattgggcaacatgtttacctcaagctacctattacaggtacagaaatagtaaagccatatacacctgtatctggttccttactctcagagttcaaggaaccagttcttcccaacaataaatacatctactttttgataaaaatctatcccactggactcttcacaccagagcttgatcgtcttcagattggagattttgtttctgtaagcagtcctgagggcaattttaaaatatccaagttccaagaattagaagatctctttttgttggcagctggaacaggcttcacaccaatggttaaaatactgaattatgctttgactgatatacccagtctcaggaaagtgaagctgatgttcttcaataaaacagaagatgatataatttggagaagccaattggagaaattagcatttaaagataaaagactggatgttgaatttgttctctcagcacctatttctgaatggaatggcaaacagggacatatttcaccagctcttctttctgaatttttgaaaagaaatttggacaaatccaaagttctcgtctgcatttgtggaccagtgccatttacagaacaaggagtaaggttgctgcatgatctcaacttttccaaaaatgagatccatagttttacagcataatgaagagctgtcattgtcctttattcaactagtttatctaaatttgtgattgcttagggttttttaagagaacatttttgtacataacaaaaggttaactagaatccagccttcagtttcttaaatgaaatcaaatgttccttcagtacaggtaacttcttggctttcttttgtaccacaacttattttactactgatatttgacctggaaagttaatcatggcaacaaatacatacaggattctttgttatgaatcacaaatttccttgccatttaaattatatcactgttctacaataagcacttgtgttttatgacatgataaagtaaatgatcacttcgatcatgtttctatgctgtaaaatgtcttattagcaatacagattaaattttaccttgcactgttaactcaggaaatgatcatttatgtccttgttattaatgttaaaacatagaatgttataacttattaagtgatccaaacatttttttgtgtgtgtatggcattgatgcagaatagaataaaattatacttaagttctttttaa

SEQ ID NO: 24358 - DNA, 455 bp, Homo sapiens
ggctaagccatgaggttcaggaagatttttctggtaagctaccaaaaaccaaaaattatgtatgtacgtacatatacacatacctacagagagagagatacgaaaaaattgaaaaattagcatttgttttatttttcatgtctatattttcacattgcaaaacaaagatgtgatgttttctcttttttttttaaacttttaagttctgggatacatgtgcaagatgtgcacgtttgttacataggtaaatgtgtgtcatgggggtttgttgtacagatacaaacaaatacattaatttttaaatatacccctccctctggttttgggttttttcctattttttcttccccttattccttttttgtgtgtgagatggggtctcactctgtcacccaggttggactgcagcagtgtgatcttggttcactgcaacctctgcctctcaggctgaagtg

SEQ ID NO: 24359 - DNA, 798 bp, Homo sapiens
actttaaaaagctgtttttcttttccctagactggatgttgaatttgttctctcagcacctatttctgaatggaatggcaaacagggacatatttcaccagctcttctttctgaatttttgaaaagaaatttggacaaatccaaagttctcgtctgcatttgtggaccagtgccatttacagaacaaggagtaaggtgagtaacagtgtagtaggaaacagactgcccaacactgaagtgaagatctttcataacaagcatctctcagttcttcctgtttatatgaaactgcactttaataatcttacagttttagaaaataacaaagtctttaaatcttcgtatagtttgagttggaggccaggattatgcatattgttagataaaacataaaagtaagttacagccagcagtcagtgttctctgctcgtgatggctgccaatattgttacactcacaagattggtgccacaattcttatttgggacattaggcccaacctcttcttccatcaaagcttcataatatatagtaattaataaggaatgttcatctcattgtagcttttgatcttcattctctgtaactgagtgaaagtaaataatatatgtgatcaaaagccaagcagcaagacaaaaagggaagactagaacacaaataaggcaagactaatagttgaagcatggatcatgaaaaatcagtggtagtggcgatcctgtttgaaattcatcttgatgtgatttagctttaaaatggcactttaaaatatttggttaaatatagcccctattggatttc

SEQ ID NO: 24360 - DNA, 790 bp, Homo sapiens
tgctgcgtcagaatgcgcctcacccctggcgaccccggaagtgggtcgggggcttggcctctgcccggccacagagccggagctggaggtgctgtcccgtctggcggcgatccccgggcagggcccggggccggggtttgaagatgctgaacgtcccttcccagtctttcccggcccccaggtcgcagcagcgtgtcgcctccggggggcgtagcaaggtacctttaaaacagggcagaagccttatggattggattcgactgaccaaaagtggaaaggatctaacgggattaaaaggcaggttaattgaagtaactgaagaagaacttaagaaacacaacaaaaaagatgattgttggatatgcataagaggtttcgtttataatgtcagcccttatatggagtatcatcctggtggagaagatgaactaatgagagcagcaggatcagatggtactgaactttttgatcaggttcatcgttgggtcaattatgaatccatgctgaaagaatgcctggttggcagaatggccattaaacctgctgttctgaaaggcaaactctggcacctgtagagctgaggatggagatagacaccaggacctatagtgggctgagacattactttcaaagatttcttttactgtcacagcactgtgagcaaggacaagacatctattgaatgggctgcctgccagttggaagttcaacttttgtaaagtcagtcaaagttctttcttctagaagcctcagtttcctcattggtaaaatggagacaatttaggtagac

SEQ ID NO: 24361 - DNA, 2258 bp, Homo sapiens
tgctgcgtcagaatgcgcctcacccctggcgaccccggaagtgggtcgggggcttggcctctgcccggccacagagccggagctggaggtgctgtcccgtctggcggcgatccccgggcagggcccggggccggggtttgaagatgctgaacgtcccttcccagtctttcccggcccccaggtcgcagcagcgtgtcgcctccggggggcgtagcaaggtacctttaaaacagggcagaagccttatggattggattcgactgaccaaaagtggaaaggatctaacgggattaaaaggcaggttaattgaagtaactgaagaagaacttaagaaacacaacaaaaaagatgattgttggatatgcataagaggtttcgtttataatgtcagcccttatatggagtatcatcctggtggagaagatgaactaatgagagcagcaggatcagatggtactgaactttttgatcaggttcatcgttgggtcaattatgaatccatgctgaaagaatgcctggttggcagaatggccattaaacctgctgttctgaaagactatcgtgaggaggaaaagaaagtcttaaatggcatgcttcccaagagccaagtgacagatacacttgccaaagaaggtcctagttatccaagctatgattggttccaaacagactctttagtcaccattgccatatatactaaacagaaggatatcaatttagactcaataatagttgatcatcagaatgattcctttagagcagaaacaattattaaggattgtttatatcttatacatattgggctaagccatgaggttcaggaagatttttctgtgcgggttgttgagagtgtgggaaaaatagagattgttctacaaaaaaaagagaatacttcttgggactttcttggccatcccctgaagaatcataattcacttattccaaggaaagatacaggtttgtactacagaaagtgccagttaatttccaaggaagatgttactcatgatacgaggcttttctgtttgatgctgccaccaagcactcatcttcaagtgcccattgggcaacatgtttacctcaagctacctattacaggtacagaaatagtaaagccatatacacctgtatctggttccttactctcagagttcaaggaaccagttcttcccaacaataaatacatctactttttgataaaaatctatcccactggactcttcacaccagagcttgatcgtcttcagattggagattttgtttctgtaagcagtcctgagggcaattttaaaatatccaagttccaagaattagaagatctctttttgttggcagctggaacaggcttcacaccaatggttaaaatactgaattatgctttgactgatatacccagtctcaggaaagtgaagctgatgttcttcaataaaacagaagatgatataatttggagaagccaattggagaaattagcatttaaagataaaagactggatgttgaatttgttctctcagcacctatttctgaatggaatggcaaacagggacatatttcaccagctcttctttctgaatttttgaaaagaaatttggacaaatccaaagttctcgtctgcatttgtggaccagtgccatttacagaacaaggagtaaggttgctgcatgatctcaacttttccaaaaatgagatccatagttttacagcataatgaagagctgtcattgtcctttattcaactagtttatctaaatttgtgattgcttagggttttttaagagaacatttttgtacataacaaaaggttaactagaatccagccttcagtttcttaaatgaaatcaaatgttccttcagtacaggtaacttcttggctttcttttgtaccacaacttattttactactgatatttgacctggaaagttaatcatggcaacaaatacatacaggattctttgttatgaatcacaaatttccttgccatttaaattatatcactgttctacaataagcacttgtgttttatgacatgataaagtaaatgatcacttcgatcatgtttctatgctgtaaaatgtcttattagcaatacagattaaattttaccttgcactgttaactcaggaaatgatcatttatgtccttgttattaatgttaaaacatagaatgttataacttattaagtgatccaaacatttttttgtgtgtgtatggcattgatgcagaatagaataaaattatacttaagttctttttaa

SEQ ID NO: 24362 - DNA, 730 bp, Homo sapiens
tgctgcgtcagaatgcgcctcacccctggcgaccccggaagtgggtcgggggcttggcctctgcccggccacagagccggagctggaggtgctgtcccgtctggcggcgatccccgggcagggcccggggccggggtttgaagatgctgaacgtcccttcccagtctttcccggcccccaggtcgcagcagcgtgtcgcctccggggggcgtagcaaggtacctttaaaacagggcagaagccttatggattggattcgactgaccaaaagtggaaaggatctaacgggattaaaaggcaggttaattgaagtaactgaagaagaacttaagaaacacaacaaaaaagatgattgttggatatgcataagaggtttcgtttataatgtcagcccttatatggagtatcatcctggtggagaagatgaactaatgagagcagcaggatcagatggtactgaactttttgatcaggttcatcgttgggtcaattatgaatccatgctgaaagaatgcctggttggcagaatggccattaaacctgctgttctgaaagactatcgtgaggaggaaaagaaagtcttaaatggcatgcttcccaagagccaagtgacagatacacttgccaaagaaggtcctagttatccaagctatgattggttccaaacagactctttagtcaccattgccatatatactaaacagaaggtaaatatgtctttaaaatcaga

SEQ ID NO: 24363 - DNA, 6103 bp, Homo sapiens
ctatgatgtggtgcttgatgctatagacacaatgcagcgagtcgcctggcatatcaatgacatgaagcggaaacacgagcacgcggtccggttacaggagatacagagtttgctcactaactggaaggggccagacctgaccagctacggggaactggtgcttgagggaaccttccgcatccagcgagccaagaatgagcggacgctcttcctcttcgacaagctgctgctcatcacgaagaagagagatgacacgtttacatacaaagctcacatcctgtgtggcaacctcatgcttgtggaggtgattccaaaagagccgctcagcttcagcgtcttccactacaagaatcccaagctgcagcacacagtccaggccaaatcccagcaagacaaacgcctctgggttctgcacctaaagagactgattctggagaaccatgcagccaagattccagctaaggccaagcaagcaatccttgaaatggatgccattcatcatccaggcttctgttacagtcctgagggagggacgaaagcactgttcggctctaaagaaggttctgctccatatcggctgagaagaaaatctgaaccttcctcacggtcacataaagttttgaagaccagtgaaacagcacaagacatccaaaaggtttctagagaggaaggatctccccagctgtcttcagcaaggccgtctcctgcccagagaaatagtcagcctagcagttctaccatgatcagcgtgcttcgagcgggtggagctctcagaaacatctggaccgatcaccagatcaggcaagccttgtttcccagccgacggtccccgcaggagaatgaggatgatgaagatgattatcagatgttcgtgccgtcattttcctcctcagatctgaactctaccagactatgtgaagatagcacttctagtcgcccttgcagctggcatatgggacagatggagtccacagagacctccagctctggtcacaggattgtcaggcgggccagcagtgctggggagagcaacacatgccctcctgaaataggaactagtgacagaactagggaactgcagaacagccccaaaacagaagggcaggaggagatgactccctttgggtcatccatagagttgactattgatgacatagaccatgtctatgataacatcagttatgaggacttaaaactaatggttgctaagcgggaagaagctgaatccactccctctaaatcagccagggactccgttcgccccaagagcaccccagagttagccttcacaaagaggcaagctggccacagtaagggctctctttacgcacaaacagatggcaccctctcaggtggagaggcatccagccaaagcacgcatgaactccaagcggttgaggagaacatctatgacaccatagggctcccagatcctccgtcgctgggttttaagtgcagcagcctaaagcgtgcaaagcggagcacctttttgggtctggaggccgacttcgtgtgctgtgacagcctgaggccatttgtttcccaagacagcctccagctcagtgaggacgaagccccttaccatcaggccactcccgatcatggttatctgagtttgctgtatgactctcccagtggtaacttgtctatgcctcataagcctgtatctgataaactgtccgaagaagtagatgaaatctggaatgacctggaaaattacatcaagaaaaatgaagacaaggccagagaccgtctcctggcagcgtttcctgtgagcaaggatgatgtgccagacaggctgcacgcagagagcacccctgagctgagccgggacgtggggcgctctgtgtccacgctgtccctgcctgagagccaggctctcctcacgcccgtgaagagcagggctggcagagccagccgcgccaactgcccctttgaggaagacctgatttctaaagaaggctcctttatgagccttaaccggctttctctggctagtgaaatgcccctcatggacaatccctacgacctggccaacagtggcctgtctcaaacagacccagaaaaccctgacctggggatggaggccacagataagacaaaaagcagggtgtttatgatggctcggcagtacagtcagaagattaagaaggcgaatcaacttttaaaagtgaaaagtctggagctggagcagccgccggccagtcagcatcagaaatccatgcacaaagacctggctgccatcttggaagagaagaagcaaggagggcccgccattggtgccaggattgctgagtattcccagttgtatgaccagattgtattcagggagtctcccttgaaaattcagaaggatggctgggccagccctcaagaatcctccctcctgaggtctgtgtcaccttcccaggtccaccatggtagtggagactggcttctgcattcaacctatagtaatggagagttagcagatttctgtctcccaccagagcaagacttgaggtcaagatatcccacgtttgagatcaatacaaaaagtactcccaggcaattgtccgcagcttgctctgtgccttctcttcaaacctctgaccctctgccaggctctgtgcagagatgcagcgtggtagtaagtcagcccaacaaagagaactggtgtcaggaccatctttacaactccttgggtcggaaagggatcagcgctaaatctcagccttatcacaggtcccagtcatcttcctccgtcttgatcaacaaatcaatggattccatcaactaccctagtgatgtgggaaagcagcagctgctgtctttacacagaagttcaaggtgtgagagtcaccaggacttgctgccagatattgctgactcgcatcaacagggcactgaaaaactctcagatctcacactccaagactcacagaaagttgtggtggtcaatagaaatttacccttaaatgcccaaattgcaacacagaattatttttccaatttcaaagagactgatggagatgaagatgactatgtggaaatcaagtcagaagaagatgagtcggagttggagctatctcacaatcgtagaaggaaatctgactcaaagtttgtggatgctgacttttctgataatgtctgcagcggcaacacattgcattctttgaatagtccgcgcactccaaaaaagccggttaacagcaaacttggcctttcaccatatctgacaccatataatgattctgacaaactgaatgactatctttggagggggccatctcccaatcaacaaaatattgtccagtctctaagggaaaaatttcagtgtctcagttcaagcagctttgcttaaggttcttcataataactgcttgaatcaacttcttattttgctcataaaacgttacagatactgatgaggtgttttatgtataccagattaaaacaattttgtaagaaccagaggtgtaaaatatactttcttttacagcacaacttttggaaatggctgacgatgcagcccggattgtactgtagcacatgttggcatcaacagtatattttctcatgctgagtgtcttcatgtttcatgtaagtcaatcttacttgaaagtttttagacttttaacacgatggccataacctgacaatagtgcccacaccttaagaaatgcaataatcctttcctgttatccagaaggcccaggtagttttatcctgtgactcaaaggcagcaaggagactttttcacattttaaaaggcaacgaaagctgttgaaagaattatgcttatatctcacattttggttatatttgtggtaacaccttaggataacgtaagccagagatctgtaaattggactgcagtctgaggtgcccattttagggtttttgtgctagtattcttttatgtcattttgatgcagaaattgtgtgactgttgaaaattaaaatgtagcgggacccattttctgtacgcagaaccctttacctgtattcctggacaaggcctagagaacgagctgctcatcatgtttctaatataatttctggggtgaaatgaatgatttccttactggcttagagaaaaccaaggtcaataaaatgcagattgacttaactattagaaaagatgggatgacttctgggaaccacttaactcttcaaatgactgttgaaagagaaaaagcaaaactgaaatcccaccagaccattttgtgtgcctgtttctaatcgatacaaagttaagcatgagctaaaatcagacaaagcactttaaatttatcctttccagagcgctttgcacatgcaccctcctgagtttgggattctgccaaatgaccaacttgatcctggccctgaggagtcattggctgcaggaatagggcaagaatctatttcctaaactacacataacatgggagcctttttttcgttgttttcaggtatattaaagaatgaaatctttggttactaggtgctgactaataaataacaccttttatattctgaccatttgtcacatttcattgtgatactgtatactgatctaactccttatgaaaggcaacaaacaaaaataagacattgaataaaaagcaaaatcaaagaagctaaagagaaaaatgaaggcagatatattgcaactttataacatattctattttattgaagactgcaattaatgcagcaagaatgctttctcaagcggtggcctttgtattctcattttaatcaggtgtacattctatggcctctcccccatgctgttagtttctattttaaaagatacaataatatatgtagggaaaggggcctgggctcttcatttaaaggtaagcagtaatattgagtaagtgacataattctttttctctttgttaagtcctatgcctctttttcttaactgtaaaacatagaatatgagcgtttttatcttacaaataggtacctaaggcatgtgattttatttttaaataacaaaaaataacccaagtttcttgcttctccaaagtattcttctcatagcttataaaagaaagtccacattgaatagcatggtctgggaacattccttctttattgtgtttatttgaacatgatatgagtttccaagatgaaatgatcaaaaaagataagtaccacaagaaagtttttttgtttggttggtttttttgtttgtttgtttttttcttgagactgagtctctccctgttgcccaagttggagtgcaatcttggctcactgcagcctccacctccccggttccagcgattctcctgcctcagcctcttgaatagctgggattacaggcgcccgccaccacacctggctaatttttgtgttgttagtagaggcggggtttcatcatgttggccaggctggtctcgaactcctgatctcatgatccgtctgcctcggcctcccagagtgctgggattacaggcatgagccactgcgcccggccaagaaagtatgtttttagaggtgtgtgtaagtgcatttgtattacctatgaacaaaattacctgactcttgtcccaggaaagctgtttcgcattttcgctttttgattggtattatccagttctatgtagttcatattattgttctgtctgactctcagaaattacttcttcacgccagtgtcttgttgcatgactttgatgtcacctataggaatacacctcactgcacgtaagtgggtatcttactgtataaaaggtctacatggctttaggttttaggacaaatgtgtagatttatagaccatttctgttggccaggacacagattttgagagctgtgtgtatatatatataatcatgtttgtatttttttcctgaaagttatcaattgcttttgtttaaaacagtttgttttagaggtggggtggggatgtatataacgaggaaaagttatatgtactttaaagtatgtcaagttcttactagtttcctgtactgaaggttcaattttttttatataagtttacttttcacctgctctattctttgtggggaaaaaatgcatctagaaaaacatagtttaaatactgtatataagataatgaaagttagtaacgtccattatttaataaagtttgtaaagt

SEQ ID NO: 24364 - DNA, 5400 bp, Homo sapiens
ctatgatgtggtgcttgatgctatagacacaatgcagcgagtcgcctggcatatcaatgacatgaagcggaaacacgagcacgcggtccggttacaggagatacagagtttgctcactaactggaaggggccagacctgaccagctacggggaactggtgcttgagggaaccttccgcatccagcgagccaagaatgagcggacgctcttcctcttcgacaagctgctgctcatcacgaagaagagagatgacacgtttacatacaaagctcacatcctgtgtggcaacctcatgcttgtggaggtgattccaaaagagccgctcagcttcagcgtcttccactacaagaatcccaagctgcagcacacagtccaggccaaatcccagcaagacaaacgcctctgggttctgcacctaaagagactgattctggagaaccatgcagccaagattccagctaaggccaagcaagcaatccttgaaatggatgccattcatcatccaggcttctgttacagtcctgagggagggacgaaagcactgttcggctctaaagaaggttctgctccatatcggctgagaagaaaatctgaaccttcctcacggtcacataaagttttgaagaccagtgaaacagcacaagacatccaaaaggtttctagagaggaaggatctccccagctgtcttcagcaaggccgtctcctgcccagagaaatagtcagcctagcagttctaccatgatcagcgtgcttcgagcgggtggagctctcagaaacatctggaccgatcaccagatcaggcaagccttgtttcccagccgacggtccccgcaggagaatgaggatgatgaagatgattatcagatgttcgtgccgtcattttcctcctcagatctgaactctaccagactatgtgaagatagcacttctagtcgcccttgcagctggcatatgggacagatggagtccacagagacctccagctctggtcacaggattgtcaggcgggccagcagtgctggggagagcaacacatgccctcctgaaataggaactagtgacagaactagggaactgcagaacagccccaaaacagaagggcaggaggagatgactccctttgggtcatccatagagttgactattgatgacatagaccatgtctatgataacatcagttatgaggacttaaaactaatggttgctaagcgggaagaagctgaatccactccctctaaatcagccagggactccgttcgccccaagagcaccccagagttagccttcacaaagaggcaagctggccacagtaagggctctctttacgcacaaacagatggcaccctctcaggtggagaggcatccagccaaagcacgcatgaactccaagcggttgaggagaacatctatgacaccatagggctcccagatcctccgtcgctgggttttaagtgcagcagcctaaagcgtgcaaagcggagcacctttttgggtctggaggccgacttcgtgtgctgtgacagcctgaggccatttgtttcccaagacagcctccagctcagtgaggacgaagccccttaccatcaggccactcccgatcatggttatctgagtttgctgtatgactctcccagtggtaacttgtctatgcctcataagcctgtatctgataaactgtccgaagaagtagatgaaatctggaatgacctggaaaattacatcaagaaaaatgaagacaaggccagagaccgtctcctggcagcgtttcctgtgagcaaggatgatgtgccagacaggctgcacgcagagagcacccctgagctgagccgggacgtggggcgctctgtgtccacgctgtccctgcctgagagccaggctctcctcacgcccgtgaagagcagggctggcagagccagccgcgccaactgcccctttgaggaagacctgatttctaaagaaggctcctttatgagccttaaccggctttctctggctagtgaaatgcccctcatggacaatccctacgacctggccaacagtggcctgtctcaaacagacccagaaaaccctgacctggggatggaggccacagataagacaaaaagcagggtgtttatgatggctcggcagtacagtcagaagattaagaaggcgaatcaacttttaaaagtgaaaagtctggagctggagcagccgccggccagtcagcatcagaaatccatgcacaaagacctggctgccatcttggaagagaagaagcaaggagggcccgccattggtgccaggattgctgagtattcccagttgtatgaccagattgtattcagggagtctcccttgaaaattcagaaggatggctgggccagccctcaagaatcctccctcctgaggtctgtgtcaccttcccaggtccaccatggtagtggagactggcttctgcattcaacctatagtaatggagagttagcagatttctgtctcccaccagagcaagacttgaggtcaagatatcccacgtttgagatcaatacaaaaagtactcccaggcaattgtccgcagcttgctctgtgccttctcttcaaacctctgaccctctgccaggctctgtgcagagatgcagcgtggtagtaagtcagcccaacaaagagaactggtgtcaggaccatctttacaactccttgggtcggaaagggatcagcgctaaatctcagccttatcacaggtcccagtcatcttcctccgtcttgatcaacaaatcaatggattccatcaactaccctagtgatgtgggaaagcagcagctgctgtctttacacagaagttcaaggtgtgagagtcaccaggacttgctgccagatattgctgactcgcatcaacagggcactgaaaaactctcagatctcacactccaagactcacagaaagttgtggtggtcaatagaaatttacccttaaatgcccaaattgcaacacagaattatttttccaatttcaaagagactgatggagatgaagatgactatgtggaaatcaagtcagaagaagatgagtcggagttggagctatctcacaatcgtagaaggaaatctgactcaaagtttgtggatgctgacttttctgataatgtctgcagcggcaacacattgcattctttgaatagtccgcgcactccaaaaaagccggttaacagcaaacttggcctttcaccatatctgacaccatataatgattctgacaaactgaatgactatctttggagggggccatctcccaatcaacaaaatattgtccagtctctaagggaaaaatttcagtgtctcagttcaagcagctttgcttaaggttcttcataataactgcttgaatcaacttcttattttgctcataaaacgttacagatactgatgaggtgttttatgtataccagattaaaacaattttgtaagaaccagaggtgtaaaatatactttcttttacagcacaacttttggaaatggctgacgatgcagcccggattgtactgtagcacatgttggcatcaacagtatattttctcatgctgagtgtcttcatgtttcatagcgctttgcacatgcaccctcctgagtttgggattctgccaaatgaccaacttgatcctggccctgaggagtcattggctgcaggaatagggcaagaatctatttcctaaactacacataacatgggagcctttttttcgttgttttcaggtatattaaagaatgaaatctttggttactaggtgctgactaataaataacaccttttatattctgaccatttgtcacatttcattgtgatactgtatactgatctaactccttatgaaaggcaacaaacaaaaataagacattgaataaaaagcaaaatcaaagaagctaaagagaaaaatgaaggcagatatattgcaactttataacatattctattttattgaagactgcaattaatgcagcaagaatgctttctcaagcggtggcctttgtattctcattttaatcaggtgtacattctatggcctctcccccatgctgttagtttctattttaaaagatacaataatatatgtagggaaaggggcctgggctcttcatttaaaggtaagcagtaatattgagtaagtgacataattctttttctctttgttaagtcctatgcctctttttcttaactgtaaaacatagaatatgagcgtttttatcttacaaataggtacctaaggcatgtgattttatttttaaataacaaaaaataacccaagtttcttgcttctccaaagtattcttctcatagcttataaaagaaagtccacattgaatagcatggtctgggaacattccttctttattgtgtttatttgaacatgatatgagtttccaagatgaaatgatcaaaaaagataagtaccacaagaaagtttttttgtttggttggtttttttgtttgtttgtttttttcttgagactgagtctctccctgttgcccaagttggagtgcaatcttggctcactgcagcctccacctccccggttccagcgattctcctgcctcagcctcttgaatagctgggattacaggcgcccgccaccacacctggctaatttttgtgttgttagtagaggcggggtttcatcatgttggccaggctggtctcgaactcctgatctcatgatccgtctgcctcggcctcccagagtgctgggattacaggcatgagccactgcgcccggccaagaaagtatgtttttagaggtgtgtgtaagtgcatttgtattacctatgaacaaaattacctgactcttgtcccaggaaagctgtttcgcattttcgctttttgattggtattatccagttctatgtagttcatattattgttctgtctgactctcagaaattacttcttcacgccagtgtcttgttgcatgactttgatgtcacctataggaatacacctcactgcacgtaagtgggtatcttactgtataaaaggtctacatggctttaggttttaggacaaatgtgtagatttatagaccatttctgttggccaggacacagattttgagagctgtgtgtatatatatataatcatgtttgtatttttttcctgaaagttatcaattgcttttgtttaaaacagtttgttttagaggtggggtggggatgtatataacgaggaaaagttatatgtactttaaagtatgtcaagttcttactagtttcctgtactgaaggttcaattttttttatataagtttacttttcacctgctctattctttgtggggaaaaaatgcatctagaaaaacatagtttaaatactgtatataagataatgaaagttagtaacgtccattatttaataaagtttgtaaagt

SEQ ID NO: 24365 - DNA, 6273 bp, Homo sapiens
ctatgatgtggtgcttgatgctatagacacaatgcagcgagtcgcctggcatatcaatgacatgaagcggaaacacgagcacgcggtccggttacaggagatacagagtttgctcactaactggaaggggccagacctgaccagctacggggaactggtgcttgagggaaccttccgcatccagcgagccaagaatgagcggacgctcttcctcttcgacaagctgctgctcatcacgaagaagagagatgacacgtttacatacaaagctcacatcctgtgtggcaacctcatgcttgtggaggtgattccaaaagagccgctcagcttcagcgtcttccactacaagaatcccaagctgcagcacacagtccaggccaaatcccagcaagacaaacgcctctgggttctgcacctaaagagactgattctggagaaccatgcagccaagattccagctaaggccaagcaagcaatccttgaaatggatgccattcatcatccaggcttctgttacagtcctgagggagggacgaaagcactgttcggctctaaagaaggttctgctccatatcggctgagaagaaaatctgaaccttcctcacggtcacataaagttttgaagaccagtgaaacagcacaagacatccaaaaggtttctagagaggaaggatctccccagctgtcttcagcaaggccgtctcctgcccagagaaatagtcagcctagcagttctaccatgatcagcgtgcttcgagcgggtggagctctcagaaacatctggaccgatcaccagatcaggcaagccttgtttcccagccgacggtccccgcaggagaatgaggatgatgaagatgattatcagatgttcgtgccgtcattttcctcctcagatctgaactctaccagactatgtgaagatagcacttctagtcgcccttgcagctggcatatgggacagatggagtccacagagacctccagctctggtcacaggattgtcaggcgggccagcagtgctggggagagcaacacatgccctcctgaaataggaactagtgacagaactagggaactgcagaacagccccaaaacagaagggcaggaggagatgactccctttgggtcatccatagagttgactattgatgacatagaccatgtctatgataacatcagttatgaggacttaaaactaatggttgctaagcgggaagaagctgaatccactccctctaaatcagccagggactccgttcgccccaagagcaccccagagttagccttcacaaagaggcaagctggccacagtaagggctctctttacgcacaaacagatggcaccctctcaggtggagaggcatccagccaaagcacgcatgaactccaagcggttgaggagaacatctatgacaccatagggctcccagatcctccgtcgctgggttttaagtgcagcagcctaaagcgtgcaaagcggagcacctttttgggtctggaggccgacttcgtgtgctgtgacagcctgaggccatttgtttcccaagacagcctccagctcagtgaggacgaagccccttaccatcaggccactcccgatcatggttatctgagtttgctgtatgactctcccagtggtaacttgtctatgcctcataagcctgtatctgataaactgtccgaagaagtagatgaaatctggaatgacctggaaaattacatcaagaaaaatgaagacaaggccagagaccgtctcctggcagcgtttcctgtgagcaaggatgatgtgccagacaggctgcacgcagagagcacccctgagctgagccgggacgtggggcgctctgtgtccacgctgtccctgcctgagagccaggctctcctcacgcccgtgaagagcagggctggcagagccagccgcgccaactgcccctttgaggaagacctgatttctaaagaaggctcctttatgagccttaaccggctttctctggctagtgaaatgcccctcatggacaatccctacgacctggccaacagtggcctgtctcaaacagacccagaaaaccctgacctggggatggaggccacagataagacaaaaagcagggtgtttatgatggctcggcagtacagtcagaagattaagaaggcgaatcaacttttaaaagtgaaaagtctggagctggagcagccgccggccagtcagcatcagaaatccatgcacaaagacctggctgccatcttggaagagaagaagcaaggagggcccgccattggtgccaggattgctgagtattcccagttgtatgaccagattgtattcagggagtctcccttgaaaattcagaaggatggctgggccagccctcaagaatcctccctcctgaggtctgtgtcaccttcccaggtccaccatggtagtggagactggcttctgcattcaacctatagtaatggagagttagcagatttctgtctcccaccagagcaagacttgaggtcaagatatcccacgtttgagatcaatacaaaaagtactcccaggcaattgtccgcagcttgctctgtgccttctcttcaaacctctgaccctctgccaggctctgtgcagagatgcagcgtggtagtaagtcagcccaacaaagagaactggtgtcaggaccatctttacaactccttgggtcggaaagggatcagcgctaaatctcagccttatcacaggtcccagtcatcttcctccgtcttgatcaacaaatcaatggattccatcaactaccctagtgatgtgggaaagcagcagctgctgtctttacacagaagttcaaggtgtgagagtcaccaggacttgctgccagatattgctgactcgcatcaacagggcactgaaaaactctcagatctcacactccaagactcacagaaagttgtggtggtcaatagaaatttacccttaaatgcccaaattgcaacacagaattatttttccaatttcaaagagactgatggagatgaagatgactatgtggaaatcaagtcagaagaagatgagtcggagttggagctatctcacaatcgtagaaggaaatctgactcaaagtttgtggatgctgacttttctgataatgtctgcagcggcaacacattgcattctttgaatagtccgcgcactccaaaaaagccggttaacagcaaacttggcctttcaccatatctgacaccatataatgattctgacaaactgaatgactatctttggagggggccatctcccaatcaacaaaatattgtccagtctctaagggaaaaatttcagtgtctcagttcaagcagctttgcttaaggttcttcataataactgcttgaatcaacttcttattttgctcataaaacgttacagatactgatgaggtgttttatgtataccagattaaaacaattttgtaagaaccagaggtgtaaaatatactttcttttacagcacaacttttggaaatggctgacgatgcagcccggattgtactgtagcacatgttggcatcaacagtatattttctcatgctgagtgtcttcatgtttcatgtaagtcaatcttacttgaaagtttttagacttttaacacgatggccataacctgacaatagtgcccacaccttaagaaatgcaataatcctttcctgttatccagaaggcccaggtagttttatcctgtgactcaaaggcagcaaggagactttttcacattttaaaaggcaacgaaagctgttgaaagaattatgcttatatctcacattttggttatatttgtggtaacaccttaggataacgtaagccagagatctgtaaattggactgcagtctgaggtgcccattttagggtttttgtgctagtattcttttatgtcattttgatgcagaaattgtgtgactgttgaaaattaaaatgtagcgggacccattttctgtacgcagaaccctttacctgtattcctggacaaggcctagagaacgagctgctcatcatgtttctaatataatttctggggtgaaatgaatgatttccttactggcttagagaaaaccaaggtcaataaaatgcagattgacttaactattagaaaagatgggatgacttctgggaaccacttaactcttcaaatgactgttgaaagagaaaaagcaaaactgaaatcccaccagaccattttgtgtgcctgtttctaatcgatacaaagttaagcatgagctaaaatcagacaaagcactttaaatttatcctttccagagcgctttgcacatgcaccctcctgagtttgggattctgccaaatgaccaacttgatcctggccctgaggagtcattggctgcaggaatagggcaagaatctatttcctaaactacacataacatgggagcctttttttcgttgttttcaggtatattaaagaatgaaatctttggttactaggtgctgactaataaataacaccttttatattctgaccatttgtcacatttcattgtgatactgtatactgatctaactccttatgaaaggcaacaaacaaaaataagacattgaataaaaagcaaaatcaaagaagctaaagagaaaaatgaaggcagatatattgcaactttataacatattctattttattgaagactgcaattaatgcagcaagaatgctttctcaagcggtggcctttgtattctcattttaatcaggtgtacattctatggcctctcccccatgctgttagtttctattttaaaagatacaataatatatgtagggaaaggggcctgggctcttcatttaaaggtaagcagtaatattgagtaagtgacataattctttttctctttgttaagtcctatgcctctttttcttaactgtaaaacatagaatatgagcgtttttatcttacaaataggtacctaaggcatgtgattttatttttaaataacaaaaaataacccaagtttcttgcttctccaaagtattcttctcatagcttataaaagaaagtccacattgaatagcatggtctgggaacattccttctttattgtgtttatttgaacatgatatgagtttccaagatgaaatgatcaaaaaagataagtaccacaagaaagtttttttgtttggttggtttttttgtttgtttgtttttttcttgagactgagtctctccctgttgcccaagttggagtgcaatcttggctcactgcagcctccacctccccggttccagcgattctcctgcctcagcctcttgaatagctgggattacaggcgcccgccaccacacctggctaatttttgtgttgttagtagaggcggggtttcatcatgttggccaggctggtctcgaactcctgatctcatgatccgtctgcctcggcctcccagagtgctgggattacaggcatgagccactgcgcccggccaagaaagtatgtttttagaggtgtgtgtaagtgcatttgtattacctatgaacaaaattacctgactcttgtcccaggaaagctgtttcgcattttcgctttttgattggtattatccagttctatgtagttcatattattgttctgtctgactctcagaaattacttcttcacgccagtgtcttgttgcatgactttgatgtcacctataggaatacacctcactgcacgtaagtgggtatcttactgtataaaaggtctacatggctttaggttttaggacaaatgtgtagatttatagaccatttctgttggccaggacacagattttgagagctgtgtgtatatatatataatcatgtttgtatttttttcctgaaagttatcaattgcttttgtttaaaacagtttgttttagaggtggggtggggatgtatataacgaggaaaagttatatgtactttaaagtatgtcaagttcttactagtttcctgtactgaaggttcaattttttttatataagtttacttttcacctgctctattctttgtggggaaaaaatgcatctagaaaaacatagtttaaatactgtatataagataatgaaagttagtaacgtccattatttaataaagtttgtaaagtccaccacacacaggcacatggacacaaatctgtgggccccgcccgagaaactcttaaacccgcgtggcgcggcgccacggtagaccgcacaggtgcagaacacgcgacaacggcgatccataaaccgggccgcgtgaacacggccgccaggtaaggcagagaatcccgca

SEQ ID NO: 24366 - DNA, 5280 bp, Homo sapiens
ctatgatgtggtgcttgatgctatagacacaatgcagcgagtcgcctggcatatcaatgacatgaagcggaaacacgagcacgcggtccggttacaggagatacagagtttgctcactaactggaaggggccagacctgaccagctacggggaactggtgcttgagggaaccttccgcatccagcgagccaagaatgagcggacgctcttcctcttcgacaagctgctgctcatcacgaagaagagagatgacacgtttacatacaaagctcacatcctgtgtggcaacctcatgcttgtggaggtgattccaaaagagccgctcagcttcagcgtcttccactacaagaatcccaagctgcagcacacagtccaggccaaatcccagcaagacaaacgcctctgggttctgcacctaaagagactgattctggagaaccatgcagccaagattccagctaaggccaagcaagcaatccttgaaatggatgccattcatcatccaggcttctgttacagtcctgagggagggacgaaagcactgttcggctctaaagaaggttctgctccatatcggctgagaagaaaatctgaaccttcctcacggtcacataaagttttgaagaccagtgaaacagcacaagacatccaaaaggtttctagagaggaaggatctccccagctgtcttcagcaaggccgtctcctgcccagagaaatagtcagcctagcagttctaccatgatcagcgtgcttcgagcgggtggagctctcagaaacatctggaccgatcaccagatcaggcaagccttgtttcccagccgacggtccccgcaggagaatgaggatgatgaagatgattatcagatgttcgtgccgtcattttcctcctcagatctgaactctaccagactatgtgaagatagcacttctagtcgcccttgcagctggcatatgggacagatggagtccacagagacctccagctctggtcacaggattgtcaggcgggccagcagtgctggggagagcaacacatgccctcctgaaataggaactagtgacagaactagggaactgcagaacagccccaaaacagaagggcaggaggagatgactccctttgggtcatccatagagttgactattgatgacatagaccatgtctatgataacatcagttatgaggacttaaaactaatggttgctaagcgggaagaagctgaatccactccctctaaatcagccagggactccgttcgccccaagagcaccccagagttagccttcacaaagaggcaagctggccacagtaagggctctctttacgcacaaacagatggcaccctctcaggtggagaggcatccagccaaagcacgcatgaactccaagcggttgaggagaacatctatgacaccatagggctcccagatcctccgtcgctgggttttaagtgcagcagcctaaagcgtgcaaagcggagcacctttttgggtctggaggccgacttcgtgtgctgtgacagcctgaggccatttgtttcccaagacagcctccagctcagtgaggacgaagccccttaccatcaggccactcccgatcatggttatctgagtttgctgtatgactctcccagtggtaacttgtctatgcctcataagcctgtatctgataaactgtccgaagaagtagatgaaatctggaatgacctggaaaattacatcaagaaaaatgaagacaaggccagagaccgtctcctggcagcgtttcctgtgagcaaggatgatgtgccagacaggctgcacgcagagagcacccctgagctgagccgggacgtggggcgctctgtgtccacgctgtccctgcctgagagccaggctctcctcacgcccgtgaagagcagggctggcagagccagccgcgccaactgcccctttgaggaagacctgatttctaaagaaggctcctttatgagccttaaccggctttctctggctagtgaaatgcccctcatggacaatccctacgacctggccaacagtggcctgtctcaaacagacccagaaaaccctgacctggggatggaggccacagataagacaaaaagcagggtgtttatgatggctcggcagtacagtcagaagattaagaaggcgaatcaacttttaaaagtgaaaagtctggagctggagcagccgccggccagtcagcatcagaaatccatgcacaaagacctggctgccatcttggaagagaagaagcaaggagggcccgccattggtgccaggattgctgagtattcccagttgtatgaccagattgtattcagggagtctcccttgaaaattcagaaggatggctgggccagccctcaagaatcctccctcctgaggtctgtgtcaccttcccaggtccaccatggtagtggagactggcttctgcattcaacctatagtaatggagagttagcagatttctgtctcccaccagagcaagacttgaggtcaagatatcccacgtttgagatcaatacaaaaagtactcccaggcaattgtccgcagcttgctctgtgccttctcttcaaacctctgaccctctgccaggctctgtgcagagatgcagcgtggtagtaagtcagcccaacaaagagaactggtgtcaggaccatctttacaactccttgggtcggaaagggatcagcgctaaatctcagccttatcacaggtcccagtcatcttcctccgtcttgatcaacaaatcaatggattccatcaactaccctagtgatgtgggaaagcagcagctgctgtctttacacagaagttcaaggtgtgagagtcaccaggacttgctgccagatattgctgactcgcatcaacagggcactgaaaaactctcagatctcacactccaagactcacagaaagttgtggtggtcaatagaaatttacccttaaatgcccaaattgcaacacagaattatttttccaatttcaaagagactgatggagatgaagatgactatgtggaaatcaagtcagaagaagatgagtcggagttggagctatctcacaatcgtagaaggaaatctgactcaaagtttgtggatgctgacttttctgataatgtctgcagcggcaacacattgcattctttgaatagtccgcgcactccaaaaaagccggttaacagcaaacttggcctttcaccatatctgacaccatataatgattctgacaaactgaatgactatctttggagggggccatctcccaatcaacaaaatattgtccagtctctaagggaaaaatttcagtgtctcagttcaagcagctttgcttaaggttcttcataataactgcttgaatcaacttcttattttgctcataaaacgttacagatactgatgaggtgttttatgtataccagattaaaacaattttgtaagaaccagaggtgtaaaatatactttcttttacagcacaacttttggaaatggctgacgatgcagcccggattgtactgtagcacatgttggcatcaacagtatattttctcatgctgagtgtcttcatgtttcatgtaagtcaatcttacttgaaagtttttagacttttaacacgatggccataacctgacaatagtgcccacaccttaagaaatgcaataatcctttcctgttatccagaaggcccaggtagttttatcctgtgactcaaaggcagcaaggagactttttcacattttaaaaggcaacgaaagctgttgaaagaattatgcttatatctcacattttggttatatttgtggtaacaccttaggataacgtaagccagagatctgtaaattggactgcagtctgaggtgcccattttagggtttttgtgctagtattcttttatgtcattttgatgcagaaattgtgtgactgttgaaaattaaaatgtagcgggacccattttctgtacgcagaaccctttacctgtattcctggacaaggcctagagaacgagctgctcatcatgtttctaatataatttctggggtgaaatgaatgatttccttactggcttagagaaaaccaaggtcaataaaatgcagattgacttaactattagaaaagatgggatgacttctgggaaccacttaactcttcaaatgactgttgaaagagaaaaagcaaaactgaaatcccaccagaccattttgtgtgcctgtttctaatcgatacaaagttaagcatgagctaaaatcagacaaagcactttaaatttatcctttccagagcgctttgcacatgcaccctcctgagtttgggattctgccaaatgaccaacttgatcctggccctgaggagtcattggctgcaggaatagggcaagaatctatttcctaaactacacataacatgggagcctttttttcgttgttttcaggtatattaaagaatgaaatctttggttactaggtgctgactaataaataacaccttttatattctgaccatttgtcacatttcattgtgatactgtatactgatctaactccttatgaaaggcaacaaacaaaaataagacattgaataaaaagcaaaatcaaagaagctaaagagaaaaatgaaggcagatatattgcaactttataacatattctattttattgaagactgcaattaatgcagcaagaatgctttctcaagcggtggcctttgtattctcattttaatcaggtgtacattctatggcctctcccccatgctgttagtttctattttaaaagatacaataatatatgtagggaaaggggcctgggctcttcatttaaaggtaagcagtaatattgagtaagtgacataattctttttctctttgttaagtcctatgcctctttttcttaactgtaaaacatagaatatgagcgtttttatcttacaaataggtacctaaggcatgtgattttatttttaaataacaaaaaataacccaagtttcttgcttctccaaagtattcttctcatagcttataaaagaaagtccacattgaatagcatggtctgggaacattccttctttattgtgtttatttgaacatgatatgagtttccaagatgaaatgatcaaaaaagataagtaccacaagaaagtttttttgtttggttggtttttttgtttgtttgtttttttcttgagactgagtctctccctgttgcccaagattgcgcccctgtactccagcctgggcaacagagcaagactccatctcaaataaaaaataaaaata

SEQ ID NO: 24367 - DNA, 415 bp, Homo sapiens
gtagcagccgggccctggcctctccgcaaggcccctttgtgtaatgatgagtgctgtgtaccatgtggctttttgagagcgttctggccacatggtcatttcccatctcatcagagggtcctgtgggtggtggaatcaagttgtctgactgtctacatctcgtcttggcaggccaaatcccagcaagacaaacgcctctgggttctgcacctaaagagactgattctggagaaccatgcagccaagattccagctaaggtaggacactgaataatgcacagtgaaatgggagagagatacaagaatcatttgaacctgggaggtggaggttactgtgagccgagatcacatcattgaactccagactgggcgacagagtgagactgtctcaaaataaaaacaaagagactgggtc

SEQ ID NO: 24368 - DNA, 400 bp, Homo sapiens
catcatcctatgtgatttacttttatggtgtttagtaagaaatattgctttattttcttgtaaaaaatttccagtggtaaaaataaatcaacatagtagaataaacgtcaatagtttgaaaatgaaatctaaacccataaacaaattattgacaaatgccttttatctcaattatacacctattggaaaatttctttataagacacagccatttccaatatatttgtgaaaagagttgtttaaaacctatttatcactttgaataagttccacgttttttgacacataccaataacataggaataatatattttttcttgtttatgttatagcttttcactgagtaccttgtaaaggcatgagacacagtgtgattggcatatgtggtggtgttagtggt

SEQ ID NO: 24369 - DNA, 393 bp, Homo sapiens
ctttaataattaaataacttaaggaaataattatgtatggaataaattcaggaatctacaagttttgcattcaaaactttctgggaatagttttggcttctggctgtgccaagggggagatttccagcagtctgcaccatgcctccttctttggctcagagcccatgagccttgatccctaccagtgtccctcacccaaaggcctggacaagaactgaacaaggacccactgggctgtgggcataggcactcttcacagggattacatgaaactgcatttcctcccatctcctcttctaggggaggaatatccactctagctcatgccctggagcctcctcaccctcctcccttggaggatcacctgggcatggaccttcctgttttctgatc

SEQ ID NO: 24370 - DNA, 545 bp, Homo sapiens
tctgtctgaggaagtttggactatgtggtgtgagatccgtagacattggactaatgtcattaacatattttaatatttaaatttcttattaaaaaatagataatgcagtagttactttttgaaggacgaccgaagcaggatatttccctgaccccttcatgggacccacgtcagaggtgtttactcagcctgctgcccacaactcctcacaggagggagcgcacaagtgaacgagggtgaggactggagagcaccagcactggaacaacccggccacttcggcgctactgggatcaaactccatcacttggacacactgtgttccacccctcgtgggagggagcatgcaggtgagaggatgcaggagtcagggtgagcacttttgggctccagcaggagcaaactctgtgcagggccctgcagcagtgactgaggggcggcctgtgactcccaaagccccagaggacatgctacagtgctcttttagctctaccatccgtaggtggcttaagtgtaaacagctcagtgggccctttgcctttttg

SEQ ID NO: 24371 - DNA, 312 bp, Homo sapiens
gaacgcatgcctcgaataacccaaatatgaaagacagaaaacatgttctaggatttaaggctcctaaaggtaacataactgtgatatttggcaccagtgccaaatggagatttgaagctgaagccaataatgtcactcaccaaactttgagccttttaaaagatattgttaacgtcagcctttgaggttcatgtcaggtatagcaaaaatgtatggatggctgcccacatttgcatttatatttttacttagttcttctctgttaaagaggatgaatgccccaaaacattaaaaaaaaaaaaaaacttaact

SEQ ID NO: 24372 - DNA, 203 bp, Homo sapiens
tctctgtgctccctgtgcctccatagcagattctgggatagcagattctgggggcaacaatctcaatttcgttggtgctggaggagtggcctcagggcatctgctgtcacctctgctggggccccagtccagcccgtgccctcactgtccccgcggtggccgcctgccttcccagcctcttcccctctgcagtgcgcgctctt

SEQ ID NO: 24373 - DNA, 194 bp, Homo sapiens
ttagagacagggtcttactctgtcacacaagctggagtgcagtggcacaatgacagcacactgaagcctcaaactcctgagcttgagcaatccgcctgccttagcctcctgagtgaccaggactatggttgcttaccatcatgcccagctaaatatatatatatatatatatatatatatatatatatatatat

SEQ ID NO: 24374 - DNA, 741 bp, Homo sapiens
cacacgggggctgaaaggcccggctccagcactcctgtggtcatcatcctgctgaatcgctttgaactacccttggcctaaccgcgactcccatcccgcttccctcctgcctcgccactgcaggcctgtccctttgctttcttaaaactgcgcaccgtctgaggccacttcgagcctactggatccctggttccaacccagtaggatcacagaagcagggccagctgccaggcttctgcaaaagacttgagacagctcacaatgaagtactctgtattaggcagggtaatattgattgcaagtgacagaaacccaatcagaaactcactggagtcatgaggaacacttattggctcagagtaaaggcaaaatagaccttcagagaaataaagtctgggaaattgactagatcctcactgaaagaactactaaaggatgtacttatggaagaagaaaattacaaagtgaaagaactgggatgcaagaagtaatggtgagcatggaatttggcaaagattcaagtaaaacaaagcaaggactgagtatataaaatcataatcataacaaattttgactattatatgtaacagccaatctcttaactgggtcataataagaaagtgaaaggcagaaaaaatgacaaaaagaataattagaatgttaataagaagagtaacaagattttgaaaaatttgtgctggttgatatcaacttttggcacttttctctttttctatactg

SEQ ID NO: 24375 - DNA, 392 bp, Homo sapiens
atccaggctggtgttcagtggcgcaatctgggctaactgcaaactccgcctcctgggttctagcaattctcctgcctcagcctctcaagtagctgggattctaggcatgcaccaccacactcaactaatttttgtaatttttagtagagacaagatttccctatattggccaggctggtcttgaactcctggcctcaagtaatctgcctgccttggcctcccaaagtgccgaaattacaggtgtgagccaccacacttggctaagactactaatttctaatgctgcttctgtcatataccacatgtgtatgtattaaagttgttaagtttctagacttgtctttggtgttctgaagtttcactatatgtctagctatgatcttttttttttt

SEQ ID NO: 24376 - DNA, 547 bp, Homo sapiens
tgagttaatgctgaaatgagttaagaccttgggggggaactgttgggaaggcataattgcttttgaaatgtgaggacatgagatttgggatgggccaggggtagagtaatatggtttgtctgtgtccccactcaaatgtcatcttgaattctcacatgttgtgagaggggtccagtgggaggtaaccgaatatgagggtaggtctttcccatgctgtcctagtgatagtgaataagtctcacaagatctgatggttttataaggcagaatttccctgcacaagctctctttttgcctgacatcatccatgtaagatatgacttgctcctctttgctcctgccatgattgtgatgcttccccagccacatggaactgtgagttctccattagacctttttcctttgtaaattgcccagtctctagtctgtctttatcagcagtgtgaaaatggactaatacatcctcctaaacagatttccaaagagtattttattccacttccttattttgcaatggacacagtaaaaataaagcattatcataatg

SEQ ID NO: 24377 - DNA, 443 bp, Homo sapiens
atgccaagtacttttccaggatctagagcatggagcagttaactgggtatcagcttctaggaattggcattctagtgcaggaggtcgacaataaacagaccaataaacataaataatctaagttagtataggtctagtgtgttcagcaaaggaaagtgtttgctaatgactggaccagcatagtcaaggaggaggtgacgttgagtttgaaaaataaggaaacagccgtgcaaagaagatatgggggcaggttgagggaggggcacattgtatggaggaggaacaggtgccaggtctccagaagggaacaaagtggcatttcctcaggcagagagatgccaagcatgagcagggtacctgtagtcccagctacctgggaggctgaggcaggagaatcacttgaacttgggttgtagtgagccaaaattgcaccactgcactcc

SEQ ID NO: 24378 - DNA, 220 bp, Homo sapiens
cttgacatagggaaaaaacacaagttgtgcatctaaaaattctgccccagaaacattatatctgccatttatgtgaccttttgatttataataagcagatgctgaaattctaaaatttcaaaatatttttaaagaattgcttaaagattttttttgaatttaaaatgtttattttttaagcttttcaaatacaagaagaatataaagaaaaaaattaccc

SEQ ID NO: 24379 - DNA, 721 bp, Homo sapiens
gagacggagtctccaatctgtcgccaggctggagtgaagtggtgggatctcagctcactgcaacctccgcctcccgggttcaagtgattgccctgcctcagcctcccgagtagctgagactacaggtgcgtgccaccaacgcctggctaattttttgtatttagtagagacagggttttaccatgttggccaggatggtctcgatctcctgaccttgtgatctgcctcggcctcccaaagggttgggattacaggtgtgagccaccacacctggcctattcattcttaagaaatacttctgttaaagagatcaaccaggcctccttagtctacaggggtcatgaagtcctacgcagtagctggctccaggaggttactgccagcagaacccttgtcaataacaatactaaaaatgtcaataagacgatacaggcttatagagcatttaccagtctcaagcactattctaagtgctttttatatattgccacactgcaacctccaatgatcctatgagatcagcattcctataattcccatttgacagatgaggcaaccgaggctcagtgaggttaaataacttggtcaatgaccacgcaactgctaaatggcagagctgggatttcattaggaaaaggcccagagaccttcttgtgtaggtgctcaaaagtggtacctgcctggcaagacagagggctcagatggagcacgacattttctt

SEQ ID NO: 24380 - DNA, 494 bp, Homo sapiens
aggggggttccccacgcattaagcaaataagcaattttgcagcagacaccagctgggtgtcctctaattcaattcacttcttacactacctggagatagcatcagataccataggttgaaggctcagtgccacaagatggctcccacttcagatgacaatcagaagccccagatggtgaccaagggtcctaaccaactagctataagttagggttcccataaccccttcttgagctccattagtttgctagagagcctcacagaactcggaaacactatacagtcatgctgtacataatgacatttcaatgtcagcctgcatagacaatggtgatcccataagattataatactgtatttttactgtaccttttctatgtttaggtatgtttagatagacaaatagtcaatccttgaacaacttgggtttgaactgtgtgggtccacttatacatggattttttttcaataaatgtattggaaaattaaaaaaa

SEQ ID NO: 24381 - DNA, 696 bp, Homo sapiens
caaatatatgctttctacccgtaactcactgtaaataaaaagaaagggataatatattgtgcaaactctagtcaaaaaaaagttggaatgacaatattaatataaacaaaagtggacttcaaaagaagcaatattatcagagagaaagagggcactgcttggtgaattgccccctgataaagacataacaataccggaagtaaaaattgacataactgcaaggggaaattgacaaatccacaattatatttgggatttaaatgctttactcttaataattaataaaagttagctaaaaaattaattttagctaaataaattagctaaaaagttaacaaggatagatctgaacaacactaggataaacttgtcctaatggacatttatagaccactataaccaaaagtggtagaattcacaatttttgcaagtacacatggaatattcaccaaaataaaccatatcctgatttataaaataaactaacaaactggcttctctcacttagcaatatgaatttaaatttcccccatatctcttcatggctttatacctcatttccttttattgctgaataatgtttcattttatggatgggccataaaatgtttatctatgcacctatagagggacatcttggttgcttccaagttttggccaatattaataaagctgttataaacattcatttgcagg

SEQ ID NO: 24382 - DNA, 434 bp, Homo sapiens
gttcaaaaatagtggatttgtaatcattgtttaatgtgctttaaatattttttgtagctgatcacagactgtggccacaaaaaagatagaaattttattatgacgggtaatgataaaatatttgtatgaaaactatttatcttattggccaggcacggtggctcatgcctgtaatcccagcactttgggaggctgtggtgtgtggatcgcttgagcacaggagttcaagaccagacggggcaacatggtgaaaccccatctctacaaaaaatacaaaaactagctgggcatggtggtgtgcacctgtagccccagctactggggaggctgaggtgcgagattacttgagcccaggaggtcgaggctgcagtgagctaagatcgtaccactgcaatccagcttgagtgatggagtgagaccttgtctcaaaaaaa

SEQ ID NO: 24383 - DNA, 489 bp, Homo sapiens
aagtgagcagaagtcactatacttatttcagataaaatgtactttaaatcaaaagctgtgagaaaagtcaaggaagatcacatataatgacaaagggattgatttagtaaaaggatatgacaattgtaaagatacattcacccaacaccagaaaaccaaactatagaaatcaaatattattagagctaaagggagaggcagactccaatacaataattgttggggacttcaacagttcactctcagtattgatagatcgcttagacacaaaatcaacaaagaaacactggatttaatctgtgctccagaacaaatggacctaacagacacttgaagaacatttcatctgacagttacagaatactcattcttttcatcagcacatagaacattctccaggatagaccatatattaggccacaaagcaagtctcaatgaattttaaaacatcacaatcatttcaattaccttttatgaacacaatggaat

SEQ ID NO: 24384 - DNA, 445 bp, Homo sapiens
cagaatctgtttcttccccatctcttccgttgagttttctcacttcagccttgttgtttactctcactgcatctaagctttcaccctttcctgtccttgtactctacctttccttaggctcctctgctcctctctcaacctggaccccataatgtaacccctctgttaccggtggaagagataggagttaccctgagttaccggcgtcgaacccctacaggtccacagcaacttcagtccttgccgcctcagaagaaagaattcgactgaggggcatgaagcagaaaaacagactaaggcaagtttcagaacaggaatggaagttcattttaaaaggctttagaacaggaacgaaaggaacattcacttgaaagagacccaagtgggtacctgagggtccaagagagaaaagagagcaaaagaagacaggaatgaaaaaaaagaa

SEQ ID NO: 24385 - DNA, 1480 bp, Homo sapiens
ggaacagcaagtggcacatagtaggcacaccttttattcctctctcatcctgttctctactcattaagctgtccactctcttttttgaccttagcacattcctaatgctctaaccttctcagcctctttttttaaagtgtcagagccctataaaatattgttaataaataattttaacataaaaagaggtacagatttacagatgtacatgcagtataaaatgataacctcaagcatacctttctccaaagaaaaatgttacaaaactaaacacagttggctgagcttgagttgcattactgcatacttaggacgtgccagcacataacaaacgtttaaggaaagtgattacaagaagaaaagttaatattttagacaagttgattcagtttttcttgggttgtatgatgttagaagttgactactgtctcaaattggagcctgtaggccactggtgttttataggcacttgattggagaactaatgctttaaccacaccagaataattgcattctgcaaattaaatgcaatgccatatgctgccaatcccccctgcgtgtcccccggcattatcttctttctcgaccaccactgatgagcatctaattgcccttcaaggccttattcagatggcccttattgtagctgtttctgatctttttagactcatttggcccctcacttaagattccatggcatctgatacatacctctaatataacacactgttatggttacccttgttcgtctgtcttccccaccactctgcaagtgtctccatgcttgacgttttgtgcatgtctgtgttgctcacattgtacacattgcattgtattcaggagacatttaaaagcagccttttgaatttaagttaaggtacttcaattggaagtacctctatgtcctgtggagttaattcaaagtatttctatatcttgtggagttaactcacccaaggacacttaatggtgatgttataaagaggaataaactctaagacctaattcctttaacactgaagcttcaaggcagagtgcaacttttaattctgcttcttggaacaagaggagagagcagtgggtttgtttgctttttccaactcagaaataacactaggtaaggaagggatttatagaggcatgatgtggacctcgaatgaatggcttagtgaactgacccaggaagttgatgtagacttacattttgttcattaaaatcaagcagttgccagcactttgggaggccaaggtgggtgggtcacgaggtcaggagtttgagaccaacctggccaagatggtgaaaccctttctctactaaaaatacaaaaattagccaggtgcggtggcgggcacctgtaatcccagctacttgggaggctgaggcaggagaatcacttgaacccgggaggcggaagttgcagtgagctaagatcatgaccctgcactccagcctgggcgacaaagcaagactccgtcaaag

SEQ ID NO: 24386 - DNA, 96 bp, Homo sapiens
ctgtgggaaaccacaggtgcctggaactttgaagagactgtaccacttctctgagccttggctttcccatctgcccaatgaagggtgccatgcagt

SEQ ID NO: 24387 - DNA, 349 bp, Homo sapiens
cagtctacactagcaaaccttacacagcccctaactgttgaggtcagagaagggaactgattctaggtatagcatattgcaaatactagaatccaccttgacctgcccactcaggtgccctggagtatttgaagaagatgacttcaggtttgtttgaacttaaagtgctatagcaccaaatgctattacaatttaggacataagcaatttttgtatgaaacatatcattctcactcttagttctccggagtcagaaggaactaagaaaggtttacctggaggtcagcaagagcagatggatgaacgggagccagggaaagagggagttgggctaccaagccttggtaca

SEQ ID NO: 24388 - DNA, 356 bp, Homo sapiens
taggtgcttctacagcacatggcaccaacctctaataatcacaccacttgctattacatttgatttttgaaagagtagcctgcgcagtaatgggaggaaactagattgtatatgttgatgagcaactagaaacaaagaagtgcagggccctagttgtagactaatgttttgaaacatttggctgtgggctgggcatggtggctcatgcctatagtcccagcacttggggaggccaaagtagaggatcacttgaggccaagagttcaagacccctgggcaacatagcaagcccctgtgtctatttaaataaataaataaaataaaatcagaaaaccacaggctcatatccctttaca

SEQ ID NO: 24389 - DNA, 381 bp, Homo sapiens
catatgaataagattccctatattcatatattttatagtatgatgcaaaaatataaacaatattttcaattaaatttcagtgatggcttcaaaaatattgattaaaaggccaggcttcatttctcatgcctgtaataccagcactttgggaggccaaggcaggagaattacttgaacccaggagtttgagaccaacctgggcaacataatgagactttgaatctacaaaaaatattaaaaattagccaggcatggtggcgtgtgcctgtagtcccagttacttgggaagctgagataggaggatcacctgagcccagggaggttgaggctgcactgagctgtgattgtgccactgcactccagcctgagtgagagtaagac

SEQ ID NO: 24390 - DNA, 367 bp, Homo sapiens
cttttcaaaaattaagacaattcattgatctcttgtcaaatgattctaaattttatcacaaaattacccatttttatagtctcttaaatatttgacttacaagcagcatttatgtattagatttattgtattgagctttataattttcttaaaaagttattatgtagacctatacttgaagacacgttcaagtcatatgcaaattaaaaaatgataaaacttgcataccaaaaatttttttggctgcttagttagagagtctttctgcacctgagtaaaccaggattcttggatgccagtattaaaaataaactatgttaattataaaacacacaagcaacaacaaaaaaccctgacttttaaaaac

SEQ ID NO: 24391 - DNA, 407 bp, Homo sapiens
tgaagatagcagtcacttggtattatgttccaggcattctactaaattcatttgatcctcatagcaatttcatgagattagcactattatctccgttttactgaagaggaaaaagcactattatccccaggttactgatgaaaccggtgctcagagaagtgaaacaatttgcccaaagtaggaagtggcaaaccaggagttaaacctgggtctgtccaattccaaagcttgtgttcaaaatctctacactatagataaaacagatgaacaaaatatttgctctatctgaatgaacagaatcatattttcaaagaaagtattgggacccatagtctgataaaaagctctatttttaaaatttatttacatgaaatatttcataaaggtataaacatcagctagacatt

SEQ ID NO: 24392 - DNA, 360 bp, Homo sapiens
ttttttgccattgaaggtaatgcatctgcaaaaacaaaaacaaaaacaaacaaacaaacaaaaaccctattccaaataaggcaacattctgaaattctgggtagacatgaattttggtggatgtatcaccactcagcacagtatacagagcatgtgtgaaggtacacagtaagtgacaggctcatgtgaacatcctcctttctttctacaaaggtagaagagtagcagaggcccctttcccaggaggataacctgggcttatggagggctttgtacttagacacttaccaaccaagtaggagcaactggaaggaaaatgagagacagaagtggatgataactgttttccttctcagccat

SEQ ID NO: 24393 - DNA, 933 bp, Homo sapiens
cccattgatcctcttgatgataattacatacttgttcagtacatatgagcaaatattttctcctagtcttccacttccttttaaataaactttttattttggactaattttaggtttagagataagttgcaaagtggtagagagtttccagatattactcactcagtaagccctattttaacgtcttacattacaatgtacacttgtgaaaactttttataccacattggcacatagtattaactaggacttcattcagatttcaccagcttttccagtaatgttttttttgtgttccaggattcagtgtaggatactatattgcatttagctgtcatatctccttagtgtcttctggtctgtgacagtttctcagtctttctttctttcccatgaccttaacagtttttaggagtgataggtattttgtagaatgtccctcactttgtgttgaagtttttctcttgattagattgggcctatggattttttgaaagaatacaccaaaggcaaagtgacttccttatcatatatcagtgtatacatgacattcacatgacatcactggtgatgttaaccttcatcactagttaaggcagcatttgccaggtttctccactataaaattactacttttccctttccagattctatttattagaagcaaatcactaactgcagcctatactgaaggggcagggaagggcaggagggttaagctttacctcccacaaagactctctcaataaattatttggaattcttctgtaagaaagaattgtctcttcaatactgtttgtttatttgaccaataatttaagtcacttatttatattagtatgaacttatatggatttttggcacttattttgggctttctttttgtatttattgagacgtaactcacaacataaaactcaccatttcaaagca

SEQ ID NO: 24394 - DNA, 305 bp, Homo sapiens
ggtcatgagatgataccctgccatttatacttatcccaatattagtttaaaacctattcctgagaagccgaggcgggcggatcacctgaggtgaggagttcgtagaccatcctggccaacatggtgaaactccgtctctactaaaaatacaaaaattagccaggcgtggtggcaggtgcctgtaatcccagcactcgggaggctgagacaggagaatcacttgaacctgggaggtggaggttgcagtgagccgagatcgcgccattgcactgcagctggggaacaagacaagactaaatctcaaa

SEQ ID NO: 24395 - DNA, 970 bp, Homo sapiens
cctccgcacatgacgtatattttctgcgcttgcagcactccggaagtgagaagtttagcgccagtggtgatgccttggtggttacttgcttccgtcacgctggcatcctgaaggcgttaagcattaaaacaatgtgcaaaagcgccttcttggtggagtaacgggcttttgtttttgtttgagacagggtctcacgctgtcgcccatactggagtccagtggcgcattcttagctcactgcagcctggaactcctgctgcccgagctcaagcaactttcccatctcagcctctcaagtagctgggaccgcaggtgcgcaccactatgcttggcgaattatttttgtagaaatgaggtctccctgtgttgcccaggctgggaactattttctacacgcttttttagtatcggtttctacctttgcgccgccgtgtgtgaagatacttaacacaaagtgttgttttacacgtgaagagacaaccaaaaggtggatgccttcttggttttgtactatttatttatatgctagcacgtagtaactaaagaataataaaatttaaagcctgtgaaaatgttagggtcccaaaattactaagcaaaagggaaaagtcaagctgggaactgctcagggcaaaacctgcctcccattctagtcagtcatccttctgctcactgagatagatgcatattctgattgtctcctttggaaaggcttatcagaaactcgtatgtagccttttgtctctcatctacctgtgacctagaagcccttcctgcttccgagttgtccccacctttctggaaggaaccagtgtacttacatatgttgattgatgtctcctgtctccctaaaatgtataaaaccaatctgtgccccaaccaccttgggcacatgtcatctggacttcctggggctgtgtcacacgctgcgcgtccttaacgttggcaaaataaactttctaaaaaaaaa

SEQ ID NO: 24396 - DNA, 470 bp, Homo sapiens
atggacaaggcccttctgcatctgtcccctgcatcccactccatgcccctctctcactgctcattgcactctgccactcagacaagagcggacctacacagagggattcaggatagcaagataatgtctttgatcttagttacattgccatcactggactggaggtggtacctgagaccatcagatgcactttcagagctgaacaggtgacatcacaccatagctgggacttgttttagtgattaatgaaaagatcattgggcaagagccaggaaggaatacaaaaagagctggaagagataagaagtaattacaaagaaattaactttgtgaaataaaaaacttaaaaagttctttcagaaatcaggaaaaatctatggaaagataaatatatatgttttgtgtatataggaataatagttgctattaatgaggaaaatcccagaacaaacagaacagaagaaataaca

SEQ ID NO: 24397 - DNA, 358 bp, Homo sapiens
atggacaaggcccttctgcatctgtcccctgcatcccactccatgcccctctctcactgctcattgcactctgccactcagacaagagcggacctacacagagggattcaggatagcaagataatgtctttgatcttagttacattgccatcactggactggaggtggtacctgagaccatcagatgcactttcagagctgaacaggtgacatcacaccatagctgggacttgttttagtgattaatgaaaagatcattgggcaagagccaggaaggaatacaaaaagagctggaagagataagaagtaattacaaagaaattaactttgtgcgaaagtatgtagtcggggatcctct

SEQ ID NO: 24398 - DNA, 353 bp, Homo sapiens
gcaagaatctgtggtttgagacatcgaatgggcacctctgctccgtgcaaaccacttccttgctggcctcaaagcctcagttagtcctaaatgcctagggcactctatcacaggtggaggctgagttttggctgcttcttcgaattctggatttctccaccctttctttctgccagacaggaagctaacttcatgctttctctcatctttgtgtctaacaccttcacaatacagcacattgggctctttcagtggaaaataaaaatcactgtgcgagaggggctgattgctgatgattgaagcttatcgaaataaaaccagaacacatgcatgttcttattcagagaaggtag

SEQ ID NO: 24399 - DNA, 476 bp, Homo sapiens
agaatcaagaatggatccatcttgtggatgatgacatcattcagcaacaaggtacaattgctacaatagaggatcatatttccaagccaggtccaaagaggcatcagggctgtcaagcttaggtataaatgttgacagaatcttcctttggattacctaaggctctgaatttctgggaagatcttgatgccctctaaccccagcaaattgatgctagctatacattgaatctgacagtggcagctcaaacagattttaaacacatcttgtatgtatccattcatacacatttacatattaaaaacatgtcttcaagtttgagctttcttggtgtatctcaggtaccttttgacatggttctctttttattgtatgtactaatagagtgagaacctacttattacttgggggctgcaccaagccattcatgatagctcgacccccatgacccaaacacctccctttaggtcccactt

SEQ ID NO: 24400 - DNA, 454 bp, Homo sapiens
gattgaagttatagcttttagacaatatagagctaaattatgaaggggaaacatgttttcaaagaagactgggtggataagaaggaactaaagaaagtaatagtcggaataattccaatgcatggcgattaggattttagtgttcactaccatagtctcccaggggacacccacatccaacagaacttgtatgtttttatttacagttattaaataactgtatttaatatcatccatgcccccaattatttaatatcatcctagcccccaattattcagttttttaaaaaaattcaaccaagctttttaagggaaagcattaattttataaacctagatctgagcaatttataacagagccatgtgagctatttcaggaaatcaacaaatatttattgagcacctatgatgtgctaggcagagtacataagtcgaagtagttacagttctggaa

SEQ ID NO: 24401 - DNA, 326 bp, Homo sapiens
atatacctaatgctaaatgacgagttaatgggtgcagcacaccagcatggcacatgtatacatatgtaactaacctgcacattgtgcacatgtaccttaaaacttaaagtataataataataaaaagaaaaaatagttataaaacaaagcaaatatgttagttttaatgaatttatagactagtttgtctttttcctatttccttttttactgatttcttcttttgttttttattttacttttgttttttagagacagggtctcataccgtcacccaggcttgagttcagtgatgctatcaatcatggctcactgtagctttgtcc

SEQ ID NO: 24402 - DNA, 147 bp, Homo sapiens
atttaaacttagtctaaaatattaaaaaaacaatttcccagtaatacctaaaactactggtacttgtgaaaaatgtgctaccagaaccctagctaagaaagtgagctcaaaaagtcatggactaaaaattttttttagggttaaaac

SEQ ID NO: 24403 - DNA, 355 bp, Homo sapiens
tgtgatcagggagattttttgaaagcaaggggattagatctgagcaccaaagatgggagaggaatttgaaaagctgggatggagggaagcacacattctcgttgcaaagtttgtaagacaagatgctgaggaaggtaagcacacgcaggctctgaagagagcccactccaccgcccatgaggaggcagattcggcaggctgggctgtggcagagaggagtggaaagaaggtaggggccgggtgcggtggctcatgcctataatcacagcactttgggagcccaagccaggaggattgtttgaggctaggagtttgagaccagcctgtgcaacatagtgagaccctgtctctacca

SEQ ID NO: 24404 - DNA, 381 bp, Homo sapiens
tccctttcatatatacataaaacttattatttctgtccctgtggagaagtgtgactaatacatctgggttaataggctttgttttttattttattttttccttattttctttttgggttgatagttttttttttcttttggtacttaaaacatattctattgtcttctgtttttcattgtttctagtgataaatcagctatcattcttattattcttctccagtatatactttatctcttttccctggttgcttttttgttttttgtttctttttttcctggttgctttttttttggatattgagttttgctcttgttgcagtgagccaagatcacgccattgcactccagcctgggtgacagggcaagacactgtctcaa

SEQ ID NO: 24405 - DNA, 479 bp, Homo sapiens
gcagaagaacaccaccttcttgcacttcttcacctcctctggcattgaagacttatgcatcttcatgtccttgaacaccttgatgacaccatcagagacggccacccctgaggccatgtttccggaagtgaaaagaagaaggcatggagagcctcagaagacaccgctgctaggacccacctgaaccaagtcttaacatctttaagaagatttgaatcaaatcaagtatattttgtggacaaaatggcatgaaactagaaatcaacaaacaggagtaaatttggaaaattcacaactgtgtaaattaaacaatgtgctcctgaacaaccaatgcatcaaagaagaaatcaaaatggaaatacaaacatatcttgaaatgagctaaatagaaacaaaatatccccaaaattgtgggattcaacaaaagcagttctaagagggaagattatagcaataaacacgtacattaaaatggaaga

SEQ ID NO: 24406 - DNA, 483 bp, Homo sapiens
aggactctactatgtcatcttaagtgaaacagtgcatatgtatactagtaaaattctctgctttcctagcattggacaaaaacaaaaatcaacaaaagaattgcctcagtgtcttaaactgggatccctactagttgactaggcacttagttactgaaggatatgtgtggaattcaagttcttttcaacctataagaaatatcggccaggtgcagtggctcacgcctgtaatcccagcactttgggaggccgaggcaggaggatcacaaggtcaggatttcaagaccagcctggccaacatagtgaaatcctgtctctactaaaaatacaaaaaaattagctgggcgtggtggtggggacctgtaatcccagctactcgggaggctgaggcaggagaatcacttcaacccgggaggtggaggttgcagtgaaccaagatcgcaccattgcactccagcctgggcgacagtgtaagagtcagtc

SEQ ID NO: 24407 - DNA, 443 bp, Homo sapiens
gaaatattagagccccaggaggacttggtgctgtctgtttgaaagtctcccatgttttacgtttggttcaaaagatcccctgcgctccctctcacccagcaaaccagccaaaccagtttcttcaccctgcctgcttctgtgttaagcaaacagtgcactgcaaacagtgactaagcctagtgccttgttaggaagaaactggcgtttttttgcttgccactgtgcagggtgctcagggtggaccggaacggttttgttgtggcttaggaaaggggacctgctcgtggaggttgtgtagaactggagtgggaggagtggggcaaggcgcactaaggggccggggggagttcgggatgatcttgaaacttgttcagcttctgcttgggctttttaaaagttattccagggccagattagatgctgtggctcacacctgtaatccc

SEQ ID NO: 24408 - DNA, 325 bp, Homo sapiens
attcactgtgtcagcatatagtagcaaaataagaaaaaaaggtgtatttagttctgagccaaatcttaatccagttaaaatgtactgaatgttaacttacaatttttaaattagcaatataagaataattcataaaacttatctttgcattaaattttctttaaatttatgttcaaaggaatatcaaaggcaactttttaaaaatagacttcatgggattgtcaatgtcttaaacagcctttttacttgaccactaaagcacagtaattgatctttggttttaacaactgaaaccctttaaagcaaatgccaacagctttttgat

SEQ ID NO: 24409 - DNA, 916 bp, Homo sapiens
gctttttaggtctccacttaataaccattgtgttccttgtataattcctcttacgacacttaggattgttgacacttttttcttttactagactcttctgtgagagctgggattcatttttggcttactttctataatctctccaatgccttgaacagtatgtggcacaaaacaagttcttagagaaatattttggtgaattcccaagtaattgatagatttgaactcagatctgatgcttggaaacaaccataatgtcctcctaaattctcaacaccttacacacaaatttggggacccacctacttgattgagtctgtttttgatgattacaggggtaacttaccattgccagtgtaatgatactttgttcctccctctaagaccaacctttttttttaaggtggtggttgtgttgatgggcttttcccatactttcttttttagttctgttatttatactttaggctataaagagcagtttggattccttttttcagactttcaaccttgatgattattgctacttagatattagttccttagcatgctttcacattggtgccattcttatttagcaagtggaaaaagtataagaatactgaacaatgcgaattcacatacataattgcttatgaatctacttgtatggtttattggaaaaagtaaaacaactgggctgggcgcactgcctcacgcctgtaatcccagtactttgggaggtctgggtgaacagatcacctgaggttgggaatttgagaccagcctggccaacgttgtgaaaccctgtctcattagccaggtgtggtggcacatccctgtaacctagctacttgggaggctgaggcacaagaatcacctgaacccaggaggtggaggttgcagtgaactgagattatgttactgcactccatcc

SEQ ID NO: 24410 - DNA, 489 bp, Homo sapiens
cttttggcccccattctttcacccattgccctttccagagagttttctaaaatgtgtgtatggaaataagagagacacataagtgttgtaaattgccaacccttgcatgtaaaaattatttcttaaattttggaatgtctgcttaattatagtagggatatggggagaaaaaaataataaatgcacaaataggaagaagaaactttgctcaatttacagttttgtcacaagctatgtgctatacataggaaaccttaaaatgtcagtgaaagggaattgtaagatgtgcatattttctttctttttttctttttttttttggcaaagtctcactccgtcctccaggctgaagtgcggtggcacaatctcggctcactgcagcctccacctcccaggagaatccttgaacccggttcaagcggttgcagtgagccaagacggtgccattacattccagccttggtgatgagagggaaaatccatctcaag

SEQ ID NO: 24411 - DNA, 604 bp, Homo sapiens
tagtagagatggggtttcaccatgttagccaggatggtctcgatctcctgacctcgtgatccgcctgtctcggcctcccaaagtgctgggattacaggcgtgagccgccgctcccagcctaatttttgtatttttaatagggacagggtttcaccatcttggctaggctggtcttgaactcctgaccttgtgatctgcccgcctcagcctcccaaagtgctgggattacaggcgtgagccaccgcgcccagccggtttgttcctcttttactttgtctagtgtattcttagccttcaaggcccatgccaactgttgctccattaattcattttaacatatttatgagcgcttcactgtcccttctcctaggtgctggaaatacagcaaggaattagaccagttccctgctctctggtatggggcgaccatactgccaccacacctagctaatttttgtatttttagtagagatgggtttcactgcatttgtcaggctggtctcgaacttctgacctcagatgatccacctgccttggcctcccaaagtgctgggattacaggcataagccaccgtgcccaggccactattcatttttaacacga

SEQ ID NO: 24412 - DNA, 426 bp, Homo sapiens
atgcccatcgccgtgtcactgggtctgcttccagccagcccggggagggaaaggagggcaacagcatgaccccccttcagggtgcatgttggaaaccgcacagatcatttgcagccagatcctgttgactagaacttggttccatgaccaacacttagtgcaaagtatgctgggaaatccagcctttcttctgggcagccgtgtgcccaggtaaaatgcagaggttatatgacttaagaaagaaggggacaaagaaaggaaattgggggataacgaagtcttatgtccttaccttacactttcaggagaattatggaaaggggaagaaagctggaaagctgggtccagtctcgcccatctgcaccagaggtctccagcgtgactgcagtgggcgccctggctaaaaccaagctctgtttgtgtctg

SEQ ID NO: 24413 - DNA, 783 bp, Homo sapiens
gagggaacaaaccttcaaagcatagcagcactgtttcttggaagcctcttggaaaacatcttatctctttcctaagtagcacaaagcaagattcaaacagggtattttccttactccatggtatacaggccttttcagaaatgttgtatataggcactgtttctgtagatcatatatgctaattaactaatttcagtttgtaaaagttaagtaactatattttttagttaatttctagtatctgtttgagccaagccatccaggcactccactaagttaggggtggccaagtagtgcttgttgaatggagaagccgccttccatatccaagcaaaaggttaatgaacccccagccgcaagagtcagagaatcgggacacctcccatttccaaagtctgcctggcaacacaaagagccagcaagaataagatatagctggtttataatcttaaatgaaatgaatggctcttcaaacagatgactcaatgtggtcagatttattatgaagtattgtgaattttccaactgtcctccccgaccaagcacacaggaagaggcaggctcaatgacaacctctcagggctcatttagaatgtcattaagcgtgcttgcacctgtcacctttatatcagcatcatctcaatcaaaggtaaaatgatacttctatggcccatgaaggaatgagcttttcctatgatgcaggatgactttttgcttcattcaatggaagagttttgtggggcaattgtaggaagcagaatggagaccctgccttgaagatgt

SEQ ID NO: 24414 - DNA, 274 bp, Homo sapiens
caccatatttgtggtcatttgttatggcagccataggaaactaacacaaagatccagagagcaggaccagaaccaaaacagaaaaagtgaaagataaactttcctattattgaatctgctcaagagtgtgagagactgagttatgaaatagttggcttcagtaattggagttgggtttcagtggttcaatggtcaaaagggagagaggctggtgacagggcgagatcttatctcttaaaaaaagggaggaagagagtttattgggtagaactgg

SEQ ID NO: 24415 - DNA, 257 bp, Homo sapiens
gataaaattaaaacacatacacactgtgaaagttcagataataaaaaaattcagataatacattaataataaagaaaatgaaatcacctgtaattcaatttgatctatattcttacagtttttttatatgtagaagtggttttttaatggaatcatgaaatcattttcttactacagcaattcatacgcatacacaactttttgttaacacgtacctaataatccattgttggatgtaccaaattcatttaactatt

SEQ ID NO: 24416 - DNA, 542 bp, Homo sapiens
actatatcagtacgtgttaggagggaacaaaattagatgtgttgtacccaatctgccttcttttcttctttactgtatgctttgaaggctgcaaaatttcctctaaatattccctttacctaaatcttttctaaaaagtttctagtcttttaaaaaatgtttagcttaattacattgtcaaagaatatggtcttgtgtgataccaattgcttgaaatgtgttgaggctactttacagactagtatgagatcatttcttaagtaaatatatgcttttccatgtgttttcttcagttttggggtggagtagtctacatgtctattcattaacataaaactaattttgcttttcaaatatttcatatctatagtgacctttttgtcagcttttctattagttactgagaaggtaggttaaaaactctgaggccagggtggtgggacgcctataatcccagcattttgggaggccaaggcaggagcgttgcttgagcccagaagtttgagaccagcttgggcaacagagtaagatcccatctgtac

SEQ ID NO: 24417 - DNA, 142 bp, Homo sapiens
tcatcttcctcctgaaatctacttctcctgactgttctgtcttgggattggctccagcctctcaagcccaaaacattggagttacccacactctcactcaatcaccagccagccttagtgagcccaccctactcatttcctc

SEQ ID NO: 24418 - DNA, 499 bp, Homo sapiens
agaaagattaaatatacaaaggaatctacattatctaaaccaagcttacccaacccacagcccataggccatttgcaatccaacacagctttgatgcagcccaacacaaacttgtaaactcttttaagacgttatgagatttttttgtgattttttttttcatcagcttttgttagtgttagtatattttaagtgtggcccaagacaattcttccaatgtagcccagggaaaacaaaagattggacatccctgcaaaccttttattttatttttttaactttctgaattcttcttgcacaaacattttgatgtcagctctactagactttctacctgcatttcataacctgaattctaatctaaatctaaaattctaacgatataaaattttataaataggtgttcataagagtccccagttcttcatccttgcatttcattaaaacacttattttgcaaatcagggtgggggtgatggggatagaatggaaagaagaa

SEQ ID NO: 24419 - DNA, 512 bp, Homo sapiens
tatggcaaactgttcaacttggtaaagctttgaactattccataacagtcattttctggaataagatactattgtaaatatacaactaagatgtgaatgtttgaataataattttatttcaatttcacatgaaaatttagatgtctcatatactcacccattttaggggcaggaagtcaatgaagctgcttgcgacatcgcccgacaagtggctgatgaaggagatgctttggtagcaggaggagtgagtcagacaccttcataccttagctgcaagagtgaaactgaagtcaaaaaagtatttctgcaacagttagaggtctttatgaagaagaacgtggacttcttgattgcagaggtaaagaaagatgtggtgaaagataagacaaatacacctagtacattttctctaccttttgctttcaagagtactgtgtggggttaggtgacaatcataactagcaatagtaatatttagtttttgaaatcgttttccaattcagggctactac

SEQ ID NO: 24420 - DNA, 2510 bp, Homo sapiens
gtataaagaggcaggctgcggactcggggagctcggggctgcgcagcgggaaggctcgcctagtcggtccgcatccgtgtcgaccacctgtctggacaccacgaagatgccacccgttgggggcaaaaaggccaagaagggcatcctagaacgtttaaatgctggagagattgtgattggagatggagggtttgtctttgcactggagaagaggggctacgtaaaggcaggaccctggactcctgaagctgctgtggagcacccagaagcagttcgccagcttcatcgagagttcctcagagctggctcaaacgtcatgcagaccttcaccttctatgcgagtgaagacaagctggagaacaggggcaactatgtcttagagaagatatctgggcaggaagtcaatgaagctgcttgcgacatcgcccgacaagtggctgatgaaggagatgctttggtagcaggaggagtgagtcagacaccttcataccttagctgcaagagtgaaactgaagtcaaaaaagtatttctgcaacagttagaggtctttatgaagaagaacgtggacttcttgattgcagagtattttgaacacgttgaagaagctgtgtgggcagttgaaaccttgatagcatccggtaaacctgtggcagcaaccatgtgcattgggcccagaaggagatttgcatggcgtgccccccggcgagtgtgcagtgcgcctggtgaaagcaggagcatccatcattggtgtgaactgccactttgaccccaccattagtttaaaaacagtgaagctcatgaaggagggcttggaggctgcccgactgaaagctcacctgatgagccagcccttggcttaccacactcctgactgcaacaagcagggattcatcgatctcccagaattcccatttggactggaacccagagttgccaccagatgggatattcaaaaatacgccagagaggcctacaacctgggggtcaggtacattggcgggtgctgtggatttgagccctaccacatcagggcaattgcagaggagctggccccagaaaggggctttttgccaccagcttcagaaaaacatggcagctggggaagtggtttggacatgcacaccaaaccctgggttagagcaagggccaggaaggaatactgggagaatcttcggatagcctcaggccggccatacaacccttcaatgtcaaagccagatggctggggagtgaccaaaggaacagccgagctgatgcagcagaaagaagccacaactgagcagcagctgaaagagctctttgaaaaacaaaaattcaaatcacagtagcctcgatagaagctatttttgatgaatttctaggtgtttgggtcacagttcctacaaatacggaaaagggggttaaaaagcagtgctttcatgaatgccatcctacacatattattgctattacctgaacaaaatagaattacaaatagcacttgataattttaaagtatgttttagaaattttcttaggagcaaaataagtacaaagtaaatcttgaacaggttcactaagcacccaccctgtgaaaagtattatggaaatcactgcagcacaggaaaagtaattcagatgttaatgccacttgaagaagttggtaggctagcaaagaggatgagacatgaactgtcataaaggactcagcaaccagccagggacagataaagcgctatggaaaggggcttccaagttcttttgaacatgacccttagtaacaaacacaatttatataatgacccagcaaaacacatcacatcttactgtcgaaattaaatgtgtgatccatcctagtattttctgttccattccttttcattctatttcatttataaaacatgctagttgagacttttcaaatggatttttatgacccactactgggtttggatccacagtttgaaaaatattgctacaagacacttaaggagaccatcctgtttaagtttattcttataagtaggtcagtcatatgagacctgatcaataaatatccaatacccagagtcctgctctcagagttcttctgtttcgtgacccacttttctaccagtaaaagacatagaccaatggggaggaggggaggagagatggatatttcagccctctccatcctagtcaacactggatccacctagtgcctctgggccataaggctgagcagagtgagcttgtattagttggtagcttttaaaaaatataataagaaaaaagtagagattctccaaactctagcctggtttcctagattgagaactatgatatttttctctgataatttaatatctactctcctacaaaagctcaagcctgaagatacaagactattagaagaaacatgactaccctcagtgtattagaaaagaggtcatgcagctttctaaacattattgaattgtttgagctgttttgaaattgtaattcttttcagctattaaaaagaagagcaatgagactataaaattgta

SEQ ID NO: 24421 - DNA, 1565 bp, Homo sapiens
cccctctgcgagaaacacccaagaatgatcaataaaaaaaaaataaataaattaaaaaaaaaaaaaaaaaaaaaaaggaatcatggtgaagccaaacaaccacagactgcccacacaggtggctgagattgacacctttgctttttaatgtctgataggcaactttgtgtgctgcatgaaattatttaaaatattatataatttttaaatggttccatgatataaagaccaaagctaggggaggagtctgttgtctggtgtcatgtgttttgttcacacagggccaggaaggaatactgggagaatcttcggatagcctcaggccggccatacaacccttcaatgtcaaagccagatggctggggagtgaccaaaggaacagccgagctgatgcagcagaaagaagccacaactgagcagcagctgaaagagctctttgaaaaacagtttgggtcacagttcctacaaatacggaaaagggggttaaaaagcagtgctttcatgaatgccatcctacacatattattgctattacctgaacaaaatagaattacaaatagcacttgataattttaaagtatgttttagaaattttcttaggagcaaaataagtacaaagtaaatcttgaacaggttcactaagcacccaccctgtgaaaagtattatggaaatcactgcagcacaggaaaagtaattcagatgttaatgccacttgaagaagttggtaggctagcaaagaggatgagacatgaactgtcataaaggactcagcaaccagccagggacagataaagcgctatggaaaggggcttccaagttcttttgaacatgacccttagtaacaaacacaatttatataatgacccagcaaaacacatcacatcttactgtcgaaattaaatgtgtgatccatcctagtattttctgttccattccttttcattctatttcatttataaaacatgctagttgagacttttcaaatggatttttatgacccactactgggtttggatccacagtttgaaaaatattgctacaagacacttaaggagaccatcctgtttaagtttattcttataagtaggtcagtcatatgagacctgatcaataaatatccaatacccagagtcctgctctcagagttcttctgtttcgtgacccacttttctaccagtaaaagacatagaccaatggggaggaggggaggagagatggatatttcagccctctccatcctagtcaacactggatccacctagtgcctctgggccataaggctgagcagagtgagcttgtattagttggtagcttttaaaaaatataataagaaaaaagtagagattctccaaactctagcctggtttcctagattgagaactatgatatttttctctgataatttaatatctactctcctacaaaagctcaagcctgaagatacaagactattagaagaaacatgactaccctcagtgtattagaaaagaggtcatgcagctttctaaacattattgaattgtttgagctgttttgaaattgtaattcttttcagctattaaaa

SEQ ID NO: 24422 - DNA, 557 bp, Homo sapiens
tatggcaaactgttcaacttggtaaagctttgaactattccataacagtcattttctggaataagatactattgtaaatatacaactaagatgtgaatgtttgaataataattttatttcaatttcacatgaaaatttagatgtctcatatactcacccattttaggggcaggaagtcaatgaagctgcttgcgacatcgcccgacaagtggctgatgaaggagatgctttggtagcaggaggagtgagtcagacaccttcataccttagtattttgaacacgttgaagaagctgtgtgggcagttgaaaccttgatagcatccggtaaacctgtggcagcaaccatgtgcattgggcccagaaggagatttgcatggcgtgccccccggcgagtgtgcagtgcgcctggtgaaagcagctggaattcgaaacgtctcagttcctccgccttagttcctcttttcccgggttcggaggccacctgtgcagcagggcacacctgccactctcatcgccctcggagccggcaaccagccgacagccggctccagccccg

SEQ ID NO: 24423 - DNA, 401 bp, Homo sapiens
gtataaagaggcaggctgcggactcggggagctcggggctgcgcagcgggaaggctcgcctagtcggtccgcatccgtgtcgaccacctgtctggacaccacgaagatgccacccgttgggggcaaaaaggccaagaaggagatggagggtttgtctttgcactggagaagaggggctacgtaaaggcaggaccctggactcctgaagctgctgtggagcacccagaagcagttcgccagcttcatcgagagttcctcagagctggctcaaacgtcatgcagaccttcaccttctatgcgagtgaagacaagctggagaacaggggcaactatgtcttagagaagatatctgggcaggaagtcaatggctgcttgtgacattggcccccgccacccccccc

SEQ ID NO: 24424 - DNA, 2660 bp, Homo sapiens
gaagtggtttggacatgcacaccaaaccctgggttagagcaagggccaggaaggaatactgggagaatcttcggatagcctcaggccggccatacaacccttcaatgtcaaagccagatggctggggagtgaccaaaggaacagccgagctgatgcagcagaaagaagctcatgaaggagggcttggaggctgcccaactgaaagctcacctgatgagccagcccttggcttaccacactcctgactgcaacaagcagggattcatcgatctcccagaattcccatttggactggaacccagagttgccaccagatgggatattcaaaaatacgccagagaggcctacaacctgggggtcaggtacattggcggggtgctgtggatttgagccctaccacatcagggcaattgcagaagcagttcgccagcttcatcgagagttcctcagagctggctcaaacgtcatgcagaccttcaccttctatgcgagtgaagacaagctggagaacaggggcaactatgtcttagagaagatatctgggcaggaagtcaatgaagctgcttgcgacatcgcccgacaagtggctgatgaaggagatgctttggtagcaggaggagtgagtcagacaccttcataccttagctgcaagagtgaaactgaagtcaaaaaagtatttctgcaacagttagaggtctttatgaagaagaacgtggacttcttgattgcagagtattttgaacacgttgaagaagctgtgtgggcagttgaaaccttgatagcatccggtaaacctgtggcagcaaccatgtgcattgggcccagaaggagatttgcatggcgtgccccccggcgagtgtgcagtgcgcctggtgaaagcaggagcatccatcattggtgtgaactgccactttgaccccaccattagtttaaaaacagtgaagctcatgaaggagggcttggaggctgcccgactgaaagctcacctgatgagccagcccttggcttaccacactcctgactgcaacaagcagggattcatcgatctcccagaattcccatttggactggaacccagagttgccaccagatgggatattcaaaaatacgccagagaggcctacaacctgggggtcaggtacattggcgggtgctgtggatttgagccctaccacatcagggcaattgcagaggagctggccccagaaaggggctttttgccaccagcttcagaaaaacatggcagctggggaagtggtttggacatgcacaccaaaccctgggttagagcaagggccaggaaggaatactgggagaatcttcggatagcctcaggccggccatacaacccttcaatgtcaaagccagatggctggggagtgaccaaaggaacagccgagctgatgcagcagaaagaagccacaactgagcagcagctgaaagagctctttgaaaaacaaaaattcaaatcacagtagcctcgatagaagctatttttgatgaatttctaggtgtttgggtcacagttcctacaaatacggaaaagggggttaaaaagcagtgctttcatgaatgccatcctacacatattattgctattacctgaacaaaatagaattacaaatagcacttgataattttaaagtatgttttagaaattttcttaggagcaaaataagtacaaagtaaatcttgaacaggttcactaagcacccaccctgtgaaaagtattatggaaatcactgcagcacaggaaaagtaattcagatgttaatgccacttgaagaagttggtaggctagcaaagaggatgagacatgaactgtcataaaggactcagcaaccagccagggacagataaagcgctatggaaaggggcttccaagttcttttgaacatgacccttagtaacaaacacaatttatataatgacccagcaaaacacatcacatcttactgtcgaaattaaatgtgtgatccatcctagtattttctgttccattccttttcattctatttcatttataaaacatgctagttgagacttttcaaatggatttttatgacccactactgggtttggatccacagtttgaaaaatattgctacaagacacttaaggagaccatcctgtttaagtttattcttataagtaggtcagtcatatgagacctgatcaataaatatccaatacccagagtcctgctctcagagttcttctgtttcgtgacccacttttctaccagtaaaagacatagaccaatggggaggaggggaggagagatggatatttcagccctctccatcctagtcaacactggatccacctagtgcctctgggccataaggctgagcagagtgagcttgtattagttggtagcttttaaaaaatataataagaaaaaagtagagattctccaaactctagcctggtttcctagattgagaactatgatatttttctctgataatttaatatctactctcctacaaaagctcaagcctgaagatacaagactattagaagaaacatgactaccctcagtgtattagaaaagaggtcatgcagctttctaaacattattgaattgtttgagctgttttgaaattgtaattcttttcagctattaaaaagaagagcaatgagactataaaattgta

SEQ ID NO: 24425 - DNA, 2446 bp, Homo sapiens
gtataaagaggcaggctgcggactcggggagctcggggctgcgcagcgggaaggctcgcctagtcggtccgcatccgtgtcgaccacctgtctggacaccacgaagatgccacccgttgggggcaaaaaggccaagaagggcatcctagaacgtttaaatgctggagagattgtgattggagatggagggtttgtctttgcactggagaagaggggctacgtaaaggcaggaccctggactcctgaagctgctgtggagcacccagaagcagttcgccagcttcatcgagagttcctcagagctggctcaaacgtcatgcagaccttcaccttctatgcgagtgaagacaagctggagaacaggggcaactatgtcttagagaagatatctgggcaggaagtcaatgaagctgcttgcgacatcgcccgacaagtggctgatgaaggagatgctttggtagcaggaggagtgagtcagacaccttcataccttagctgcaagagtgaaactgaagtcaatattttgaacacgttgaagaagctgtgtgggcagttgaaaccttgatagcatccggtaaacctgtggcagcaaccatgtgcattgggcccagaaggagatttgcatggcgtgccccccggcgagtgtgcagtgcgcctggtgaaagcaggagcatccatcattggtgtgaactgccactttgaccccaccattagtttaaaaacagtgaagctcatgaaggagggcttggaggctgcccgactgaaagctcacctgatgagccagcccttggcttaccacactcctgactgcaacaagcagggattcatcgatctcccagaattcccatttggactggaacccagagttgccaccagatgggatattcaaaaatacgccagagaggcctacaacctgggggtcaggtacattggcgggtgctgtggatttgagccctaccacatcagggcaattgcagaggagctggccccagaaaggggctttttgccaccagcttcagaaaaacatggcagctggggaagtggtttggacatgcacaccaaaccctgggttagagcaagggccaggaaggaatactgggagaatcttcggatagcctcaggccggccatacaacccttcaatgtcaaagccagatggctggggagtgaccaaaggaacagccgagctgatgcagcagaaagaagccacaactgagcagcagctgaaagagctctttgaaaaacaaaaattcaaatcacagtagcctcgatagaagctatttttgatgaatttctaggtgtttgggtcacagttcctacaaatacggaaaagggggttaaaaagcagtgctttcatgaatgccatcctacacatattattgctattacctgaacaaaatagaattacaaatagcacttgataattttaaagtatgttttagaaattttcttaggagcaaaataagtacaaagtaaatcttgaacaggttcactaagcacccaccctgtgaaaagtattatggaaatcactgcagcacaggaaaagtaattcagatgttaatgccacttgaagaagttggtaggctagcaaagaggatgagacatgaactgtcataaaggactcagcaaccagccagggacagataaagcgctatggaaaggggcttccaagttcttttgaacatgacccttagtaacaaacacaatttatataatgacccagcaaaacacatcacatcttactgtcgaaattaaatgtgtgatccatcctagtattttctgttccattccttttcattctatttcatttataaaacatgctagttgagacttttcaaatggatttttatgacccactactgggtttggatccacagtttgaaaaatattgctacaagacacttaaggagaccatcctgtttaagtttattcttataagtaggtcagtcatatgagacctgatcaataaatatccaatacccagagtcctgctctcagagttcttctgtttcgtgacccacttttctaccagtaaaagacatagaccaatggggaggaggggaggagagatggatatttcagccctctccatcctagtcaacactggatccacctagtgcctctgggccataaggctgagcagagtgagcttgtattagttggtagcttttaaaaaatataataagaaaaaagtagagattctccaaactctagcctggtttcctagattgagaactatgatatttttctctgataatttaatatctactctcctacaaaagctcaagcctgaagatacaagactattagaagaaacatgactaccctcagtgtattagaaaagaggtcatgcagctttctaaacattattgaattgtttgagctgttttgaaattgtaattcttttcagctattaaaaagaagagcaatgagactataaaattgta

SEQ ID NO: 24426 - DNA, 2142 bp, Homo sapiens
gtataaagaggcaggctgcggactcggggagctcggggctgcgcagcgggaaggctcgcctagtcggtccgcatccgtgtcgaccacctgtctggacaccacgaagatgccacccgttgggggcaaaaaggccaagaagggcatcctagaacgtttaaatgctggagagattgtgattggagatggagggtttgtctttgcactggagaagaggggctacgtaaaggcaggaccctggactcctgaagctgctgtggagcacccagaagcagttcgccagcttcatcgagagttcctcagagctggctcaaacgtcatgcagaccttcaccttctatgcgagtgaagacaagctggagaacagggagcatccatcattggtgtgaactgccactttgaccccaccattagtttaaaaacagtgaagctcatgaaggagggcttggaggctgcccgactgaaagctcacctgatgagccagcccttggcttaccacactcctgactgcaacaagcagggattcatcgatctcccagaattcccatttggactggaacccagagttgccaccagatgggatattcaaaaatacgccagagaggcctacaacctgggggtcaggtacattggcgggtgctgtggatttgagccctaccacatcagggcaattgcagaggagctggccccagaaaggggctttttgccaccagcttcagaaaaacatggcagctggggaagtggtttggacatgcacaccaaaccctgggttagagcaagggccaggaaggaatactgggagaatcttcggatagcctcaggccggccatacaacccttcaatgtcaaagccagatggctggggagtgaccaaaggaacagccgagctgatgcagcagaaagaagccacaactgagcagcagctgaaagagctctttgaaaaacaaaaattcaaatcacagtagcctcgatagaagctatttttgatgaatttctaggtgtttgggtcacagttcctacaaatacggaaaagggggttaaaaagcagtgctttcatgaatgccatcctacacatattattgctattacctgaacaaaatagaattacaaatagcacttgataattttaaagtatgttttagaaattttcttaggagcaaaataagtacaaagtaaatcttgaacaggttcactaagcacccaccctgtgaaaagtattatggaaatcactgcagcacaggaaaagtaattcagatgttaatgccacttgaagaagttggtaggctagcaaagaggatgagacatgaactgtcataaaggactcagcaaccagccagggacagataaagcgctatggaaaggggcttccaagttcttttgaacatgacccttagtaacaaacacaatttatataatgacccagcaaaacacatcacatcttactgtcgaaattaaatgtgtgatccatcctagtattttctgttccattccttttcattctatttcatttataaaacatgctagttgagacttttcaaatggatttttatgacccactactgggtttggatccacagtttgaaaaatattgctacaagacacttaaggagaccatcctgtttaagtttattcttataagtaggtcagtcatatgagacctgatcaataaatatccaatacccagagtcctgctctcagagttcttctgtttcgtgacccacttttctaccagtaaaagacatagaccaatggggaggaggggaggagagatggatatttcagccctctccatcctagtcaacactggatccacctagtgcctctgggccataaggctgagcagagtgagcttgtattagttggtagcttttaaaaaatataataagaaaaaagtagagattctccaaactctagcctggtttcctagattgagaactatgatatttttctctgataatttaatatctactctcctacaaaagctcaagcctgaagatacaagactattagaagaaacatgactaccctcagtgtattagaaaagaggtcatgcagctttctaaacattattgaattgtttgagctgttttgaaattgtaattcttttcagctattaaaaagaagagcaatgagactataaaattgta

SEQ ID NO: 24427 - DNA, 1092 bp, Homo sapiens
gtataaagaggcaggctgcggactcggggagctcggggctgcgcagcgggaaggctcgcctagtcggtccgcatccgtgtcgaccacctgtctggacaccacgaagatgccacccgttgggggcaaaaaggccaagaagggcatcctagaacgtttaaatgctggagagattgtgattggagatggagggtttgtctttgcactggagaagaggggctacgtaaaggcaggaccctggactcctgaagctgctgtggagcacccagaagcagttcgccagcttcatcgagagttcctcagagctggctcaaacgtcatgcagaccttcaccttctatgcgagtgaagacaagctggagaacaggggcaactatgtcttagagaagatatctgggcaggaagtcaatgaagctgcttgcgacatcgcccgacaagtggctgatgaaggagatgctttggtagcaggaggagtgagtcagacaccttcataccttagctgcaagagtgaaactgaagtcaaaaaagtatttctgcaacagttagaggtctttatgaagaagaacgtggacttcttgattgcagagtattttgaacacgttgaagaagctgtgtgggcagttgaaaccttgatagcatccggtaaacctgtggcagcaaccatgtgcattgggcccagaaggagatttgcatggcgtgccccccggcgagtgtgcagtgcgcctggtgaaagcaggagcatccatcattggtgtgaactgccactttgaccccaccattagtttaaaaacaagtgagcttgtattagttggtagcttttaaaaaatataataagaaaaaagtagagattctccaaactctagcctggtttcctagattgagaactatgatatttttctctgataatttaatatctactctcctacaaaagctcaagcctgaagatacaagactattagaagaaacatgactaccctcagtgtattagaaaagaggtcatgcagctttctaaacattattgaattgtttgagctgttttgaaattgtaattcttttcagctattaaaaagaagagcaatgagactataaaattgta

SEQ ID NO: 24428 - DNA, 1511 bp, Homo sapiens
cccctctgcgagaaacacccaagaatgatcaataaaaaaaaaataaataaattaaaaaaaaaaaaaaaaaaaaaaaggaatcatggtgaagccaaacaaccacagactgcccacacaggtggctgagattgacacctttgctttttaatgtctgataggcaactttgtgtgctgcatgaaattatttaagagtctgttgtctggtgtcatgtgttttgttcacacagggccaggaaggaatactgggagaatcttcggatagcctcaggccggccatacaacccttcaatgtcaaagccagatggctggggagtgaccaaaggaacagccgagctgatgcagcagaaagaagccacaactgagcagcagctgaaagagctctttgaaaaacagtttgggtcacagttcctacaaatacggaaaagggggttaaaaagcagtgctttcatgaatgccatcctacacatattattgctattacctgaacaaaatagaattacaaatagcacttgataattttaaagtatgttttagaaattttcttaggagcaaaataagtacaaagtaaatcttgaacaggttcactaagcacccaccctgtgaaaagtattatggaaatcactgcagcacaggaaaagtaattcagatgttaatgccacttgaagaagttggtaggctagcaaagaggatgagacatgaactgtcataaaggactcagcaaccagccagggacagataaagcgctatggaaaggggcttccaagttcttttgaacatgacccttagtaacaaacacaatttatataatgacccagcaaaacacatcacatcttactgtcgaaattaaatgtgtgatccatcctagtattttctgttccattccttttcattctatttcatttataaaacatgctagttgagacttttcaaatggatttttatgacccactactgggtttggatccacagtttgaaaaatattgctacaagacacttaaggagaccatcctgtttaagtttattcttataagtaggtcagtcatatgagacctgatcaataaatatccaatacccagagtcctgctctcagagttcttctgtttcgtgacccacttttctaccagtaaaagacatagaccaatggggaggaggggaggagagatggatatttcagccctctccatcctagtcaacactggatccacctagtgcctctgggccataaggctgagcagagtgagcttgtattagttggtagcttttaaaaaatataataagaaaaaagtagagattctccaaactctagcctggtttcctagattgagaactatgatatttttctctgataatttaatatctactctcctacaaaagctcaagcctgaagatacaagactattagaagaaacatgactaccctcagtgtattagaaaagaggtcatgcagctttctaaacattattgaattgtttgagctgttttgaaattgtaattcttttcagctattaaaa

SEQ ID NO: 24429 - DNA, 715 bp, Homo sapiens
ggaaggaatactgggagaatcttcggatagcctcaggccggccatacaacccttcaatgtcaaagccagatggctggggagtgaccaaaggaacagccgagctgatgcagcagaaagaagccacaactgagcagcagctgaaagagctctttgaaaaacaaaaattcaaatcacagtagcctcgatagaagctatttttgatgaatttctaggtgtttgggtcacagttcctacaaatacggaaaagggggttaaaaagcagtgctttcatgaatgccatcctacacatattattgctattacctgaacaaaatagaattacaaatagcacttgataattttaaagtatgttttagaaattttcttaggagcaaaataagtacaaagtaaatcttgaacaggttcactaagcacccaccctgtgaaaagtattatggaaatcactgcagcacaggaaaagtaattcagatgttaatgccacttgaagaagttggtaggctagcaaagaggatgagacatgaactgtcataaaggactcagcaaccagccagggacagataaagcgctatggaaaggggcttccaagttcttttgaacatgacccttagtaacaaacacaatttatataatgacccagcaaaacacatcacatcttactgtcgaaattaaatgtgtgatccatcctagtattttctgttccattccttttcattct

SEQ ID NO: 24430 - DNA, 494 bp, Homo sapiens
agaatgtataatgcctaatggcataatgccacttattacaggactggaacccagagttgccaccagatgggatattcaaaaatacgccagagaggcctacaacctgggggtcaggtacattggcgggtgctgtggatttgagccctaccacatcagggcaattgcagaggagctggccccagaaaggggctttttgccaccagcttcagaaaaacatggcagctggggaagtggtttggacatgcacaccaaaccctgggttagagcaaggtaagcatctttttactaacccaaactaatttagattatgaatatgttcaagtgaggccatttagaagactgcagcaaatttgttgtgtgatgatgaagaatcagtcatccccaaattctctcccagagatgtttacaaagcatccttattaggtgatttctggagattgttttaagaatatagaacgtatttgacctgattttggattttgaaaaaaaaaaaa

SEQ ID NO: 24431 - DNA, 2470 bp, Homo sapiens
gtataaagaggcaggctgcggactcggggagctcggggctgcgcagcgggaaggctcgcctagtcggtccgcatccgtgtcgaccacctgtctggacaccacgaagatgccacccgttgggggcaaaaaggccaagaaggagatggagggtttgtctttgcactggagaagaggggctacgtaaaggcaggaccctggactcctgaagctgctgtggagcacccagaagcagttcgccagcttcatcgagagttcctcagagctggctcaaacgtcatgcagaccttcaccttctatgcgagtgaagacaagctggagaacaggggcaactatgtcttagagaagatatctgggcaggaagtcaatgaagctgcttgcgacatcgcccgacaagtggctgatgaaggagatgctttggtagcaggaggagtgagtcagacaccttcataccttagctgcaagagtgaaactgaagtcaaaaaagtatttctgcaacagttagaggtctttatgaagaagaacgtggacttcttgattgcagagtattttgaacacgttgaagaagctgtgtgggcagttgaaaccttgatagcatccggtaaacctgtggcagcaaccatgtgcattgggcccagaaggagatttgcatggcgtgccccccggcgagtgtgcagtgcgcctggtgaaagcaggagcatccatcattggtgtgaactgccactttgaccccaccattagtttaaaaacagtgaagctcatgaaggagggcttggaggctgcccgactgaaagctcacctgatgagccagcccttggcttaccacactcctgactgcaacaagcagggattcatcgatctcccagaattcccatttggactggaacccagagttgccaccagatgggatattcaaaaatacgccagagaggcctacaacctgggggtcaggtacattggcgggtgctgtggatttgagccctaccacatcagggcaattgcagaggagctggccccagaaaggggctttttgccaccagcttcagaaaaacatggcagctggggaagtggtttggacatgcacaccaaaccctgggttagagcaagggccaggaaggaatactgggagaatcttcggatagcctcaggccggccatacaacccttcaatgtcaaagccagatggctggggagtgaccaaaggaacagccgagctgatgcagcagaaagaagccacaactgagcagcagctgaaagagctctttgaaaaacaaaaattcaaatcacagtagcctcgatagaagctatttttgatgaatttctaggtgtttgggtcacagttcctacaaatacggaaaagggggttaaaaagcagtgctttcatgaatgccatcctacacatattattgctattacctgaacaaaatagaattacaaatagcacttgataattttaaagtatgttttagaaattttcttaggagcaaaataagtacaaagtaaatcttgaacaggttcactaagcacccaccctgtgaaaagtattatggaaatcactgcagcacaggaaaagtaattcagatgttaatgccacttgaagaagttggtaggctagcaaagaggatgagacatgaactgtcataaaggactcagcaaccagccagggacagataaagcgctatggaaaggggcttccaagttcttttgaacatgacccttagtaacaaacacaatttatataatgacccagcaaaacacatcacatcttactgtcgaaattaaatgtgtgatccatcctagtattttctgttccattccttttcattctatttcatttataaaacatgctagttgagacttttcaaatggatttttatgacccactactgggtttggatccacagtttgaaaaatattgctacaagacacttaaggagaccatcctgtttaagtttattcttataagtaggtcagtcatatgagacctgatcaataaatatccaatacccagagtcctgctctcagagttcttctgtttcgtgacccacttttctaccagtaaaagacatagaccaatggggaggaggggaggagagatggatatttcagccctctccatcctagtcaacactggatccacctagtgcctctgggccataaggctgagcagagtgagcttgtattagttggtagcttttaaaaaatataataagaaaaaagtagagattctccaaactctagcctggtttcctagattgagaactatgatatttttctctgataatttaatatctactctcctacaaaagctcaagcctgaagatacaagactattagaagaaacatgactaccctcagtgtattagaaaagaggtcatgcagctttctaaacattattgaattgtttgagctgttttgaaattgtaattcttttcagctattaaaaagaagagcaatgagactataaaattgta

SEQ ID NO: 24432 - DNA, 2285 bp, Homo sapiens
tatggcaaactgttcaacttggtaaagctttgaactattccataacagtcattttctggaataagatactattgtaaatatacaactaagatgtgaatgtttgaataataattttatttcaatttcacatgaaaatttagatgtctcatatactcacccattttaggggcaggaagtcaatgaagctgcttgcgacatcgcccgacaagtggctgatgaaggagatgctttggtagcaggaggagtgagtcagacaccttcataccttagctgcaagagtgaaactgaagtcaaaaaagtatttctgcaacagttagaggtctttatgaagaagaacgtggacttcttgattgcagagtattttgaacacgttgaagaagctgtgtgggcagttgaaaccttgatagcatccggtaaacctgtggcagcaaccatgtgcattgggcccagaaggagatttgcatggcgtgccccccggcgagtgtgcagtgcgcctggtgaaagcaggagcatccatcattggtgtgaactgccactttgaccccaccattagtttaaaaacagtgaagctcatgaaggagggcttggaggctgcccgactgaaagctcacctgatgagccagcccttggcttaccacactcctgactgcaacaagcagggattcatcgatctcccagaattcccatttggactggaacccagagttgccaccagatgggatattcaaaaatacgccagagaggcctacaacctgggggtcaggtacattggcgggtgctgtggatttgagccctaccacatcagggcaattgcagaggagctggccccagaaaggggctttttgccaccagcttcagaaaaacatggcagctggggaagtggtttggacatgcacaccaaaccctgggttagagcaagggccaggaaggaatactgggagaatcttcggatagcctcaggccggccatacaacccttcaatgtcaaagccagatggctggggagtgaccaaaggaacagccgagctgatgcagcagaaagaagccacaactgagcagcagctgaaagagctctttgaaaaacaaaaattcaaatcacagtagcctcgatagaagctatttttgatgaatttctaggtgtttgggtcacagttcctacaaatacggaaaagggggttaaaaagcagtgctttcatgaatgccatcctacacatattattgctattacctgaacaaaatagaattacaaatagcacttgataattttaaagtatgttttagaaattttcttaggagcaaaataagtacaaagtaaatcttgaacaggttcactaagcacccaccctgtgaaaagtattatggaaatcactgcagcacaggaaaagtaattcagatgttaatgccacttgaagaagttggtaggctagcaaagaggatgagacatgaactgtcataaaggactcagcaaccagccagggacagataaagcgctatggaaaggggcttccaagttcttttgaacatgacccttagtaacaaacacaatttatataatgacccagcaaaacacatcacatcttactgtcgaaattaaatgtgtgatccatcctagtattttctgttccattccttttcattctatttcatttataaaacatgctagttgagacttttcaaatggatttttatgacccactactgggtttggatccacagtttgaaaaatattgctacaagacacttaaggagaccatcctgtttaagtttattcttataagtaggtcagtcatatgagacctgatcaataaatatccaatacccagagtcctgctctcagagttcttctgtttcgtgacccacttttctaccagtaaaagacatagaccaatggggaggaggggaggagagatggatatttcagccctctccatcctagtcaacactggatccacctagtgcctctgggccataaggctgagcagagtgagcttgtattagttggtagcttttaaaaaatataataagaaaaaagtagagattctccaaactctagcctggtttcctagattgagaactatgatatttttctctgataatttaatatctactctcctacaaaagctcaagcctgaagatacaagactattagaagaaacatgactaccctcagtgtattagaaaagaggtcatgcagctttctaaacattattgaattgtttgagctgttttgaaattgtaattcttttcagctattaaaaagaagagcaatgagactataaaattgta

SEQ ID NO: 24433 - DNA, 1368 bp, Homo sapiens
gtataaagaggcaggctgcggactcggggagctcggggctgcgcagcgggaaggctcgcctagtcggtccgcatccgtgtcgaccacctgtctggacaccacgaagatgccacccgttgggggcaaaaaggccaagaagggcatcctagaacgtttaaatgctggagagattgtgattggagatggagggtttgtctttgcactggagaagaggggctacgtaaaggcaggaccctggactcctgaagctgctgtggagcacccagaagcagttcgccagcttcatcgagagttcctcagagctggctcaaacgtcatgcagaccttcaccttctatgcgagtgaagacaagctggagaacaggggcaactatgtcttagagaagatatctgggcaggaagtcaatgaagctgcttgcgacatcgcccgacaagtggctgatgaaggagatgctttggtagcaggaggagtgagtcagacaccttcataccttagctgcaagagtgaaactgaagtcaaaaaagtatttctgcaacagttagaggtctttatgaagaagaacgtggacttcttgattgcagagtattttgaacacgttgaagaagctgtgtgggcagttgaaaccttgatagcatccggtaaacctgtggcagcaaccatgtgcattgggcccagaaggagatttgcatggcgtgccccccggcgagtgtgcagtgcgcctggtgaaagcaggagcatccatcattggtgtgaactgccactttgaccccaccattagtttaaaaacagtgaagctcatgaaggagggcttggaggctgcccgactgaaagctcacctgatgagccagcccttggcttaccacactcctgactgcaacaagcagggattcatcgatctcccagaattcccatttggactggaacccagagttgccaccagatgggatattcaaaaatacgccagagaggcctacaacctgggggtcaggtacattggcgggtgctgtggatttgagccctaccacatcagggcaattgcagaggagctggccccagaaaggggctttttgccaccagcttcagaaaaacatggcagctggggaagtggtttggacatgcacaccaaaccctgggttagagcaaggtaagcatctttttactaacccaaactaatttagattatgaatatgttcaagtgaggccatttagaagactgcagcaaatttgttgtgtgatgatgaagaatcagtcatccccaaattctctcccagagatgtttacaaagcatccttattaggtgatttctggagattgttttaagaatatagaacgtatttgacctgattttggattttgaaaaaaaaaaaa

SEQ ID NO: 24434 - DNA, 770 bp, Homo sapiens
  misc_feature (45)..(45): n is a, c, g, or t
  misc_feature (51)..(51): n is a, c, g, or t
  misc_feature (58)..(58): n is a, c, g, or t
  misc_feature (76)..(76): n is a, c, g, or t
gagtgaccacacaatagatacacccacacaaatcgaaaccccttncaaacnccccacncatcatggaaccccttgnggaagccaaggactgccagaatacggcacgagaaggctggttgccttaagctcttccctgcctcgtgttcctgagaaacggattaatagccctttatccccctgcaccctcctgcaggggatggcactttgagccctctggagccctccccttgctgagccttactctcttcagactttctgaatgtacaatgccgttggttgggatttggggactggaagggaccaaggacactgaccccaagctgtcctgcctagcgtccagcgtcttctaggagggtggggtctgcctgtcctggtgtggttggtttggccctgtttgctgtgactacccccccccctccccgaaccgagggacggctgcctttgtctctgcctcagatgccacctgccccgcccatgctccccatcagcagcatccagactttcaggaagggcagggccagccagtccagaaccgcatccctcagcagggactgataagccatctctcggagggccccctaatacccagtggagtctggttcacaccctggggggtgtgtcactgtgatgggacacgtaggagtccacccttaaaaccagcaccctgtccctcgaggctgccgagtgggtgtgtggactcgggggccactcccaatgaaactggcaacggcctggggcttaatgaaatcccttctggaatacttcccccg

SEQ ID NO: 24435 - DNA, 2467 bp, Homo sapiens
atcgcgcctgcgccagaaccgctgcctcgctcccggaagtggagggtctacacgaagcgccgctgggtctgggtgcccggaggcagcagcgttcgcggagttcgcccgctggcccccgatcaccatgtcggctttcgacaccaaccccttcgcggacccagtggatgtaaaccccttccaggatccctctgtgacccagctgaccaacgccccgcagggcggcctggcggaattcaaccccttctcagagacaaatgcagcgacaacagttcctgtcacccaactccctgggtcctcacagccagcggttctccagccatcagtggaaccaacccagccgaccccccaggccgtggtgtctgcagcccaggcaggcctgctccggcagcaggaagaactggacaggaaagctgccgagctggaacgcaaggagcgggagctgcagaacactgtagccaacttgcatgtgagacagaacaactggccccctctgccctcgtggtgccctgtgaagccctgcttctatcaggatttctccacagagatccctgccgactaccagcggatatgcaagatgctctactatctgtggatgttgcattcagtgactctgtttctgaacctgcttgcctgcctggcctggttctcgggcaacagctccaagggagtggactttggcctctccatcctgtggtttctgatcttcactccctgtgccttcctttgttggtaccgacccatctataaggcctttaggtccgacaactctttcagcttctttgtgttcttctttgtatttttttgtcaaatagggatctacatcatccagttggttggcatccctggcctgggggacagcggttggattgcagccctgtctacactggataatcattccctggccatatcagtcatcatgatggtggtggctggcttcttcaccctctgtgccgtgctctcagtcttcctcctgcagcgggtgcactccctctaccgacggacaggggccagcttccagcaggcccaggaggagttttcccagggcatcttcagcagcagaaccttccacagagctgcttcatctgctgcccaaggagccttccaggggaattagtcctcctctcttctctccccctcagcctttctctcgcctgccttctgagctgcactttccgtgggtgccttatgtggtggtggttgtgcccagcacagacctggcagggttcttgccgtggctcttcctcctccctcagcgaccagctctccctggaacgggagggacagggaattttttccccctctatgtacaaaaaaaaacaaagctctctttccttctctggtgatggtttggtaggattcttttgtctctggaagcagtgggactgaagttctcttcgtcctgtgcacacacagacacccccacacagttgggatcacaggctgacctgggcccatcccagctggagctttctgccagggtcctgggccttgactcccccaccctgcaggcctggcctgaatctggcttcttagacacagcccagtccttcctgcctgggctgggaataagcctctcacaggttctggtggacagatctgttccccaggtcactccagtggtctccaggcttccagagaaggctggttgcctcaagctcttctctgcctcataaacggatccagagaaggctggttgccttaagctcttccctgcctcgtgttcctgagaaacggattaatagccctttatccccctgcaccctcctgcaggggatggcactttgagccctctggagccctccccttgctgagccttactctcttcagactttctgaatgtacaatgccgttggttgggatttggggactggaagggaccaaggacactgaccccaagctgtcctgcctagcgtccagcgtcttctaggagggtggggtctgcctgtcctggtgtggttggtttggccctgtttgctgtgactacccccccccctccccgaaccgagggacggctgcctttgtctctgcctcagatgccacctgccccgcccatgctccccatcagcagcatccagactttcaggaagggcagggccagccagtccagaaccgcatccctcagcagggactgataagccatctctcggagggccccctaatacccagtggagtctggttcacaccctggggggtgtgtcactgtgatgggacacgtaggagtccacccttaaaaccagcaccctgtccctcgaggctgccgagtgggtgtgtggactcgggggccttcccacaaaactagcctccggctctgggcccgagacagccgcaggccccagccactgaatgatactggcagcggctggggttttatgaactcctttctggtattttttcccctctatgtacaaatgtatatgttacgtctcaatttttgtgcttaagtaaaaataaaaacattttcagacaa

SEQ ID NO: 24436 - DNA, 2499 bp, Homo sapiens
  misc_feature (16)..(16): n is a, c, g, or t
  misc_feature (23)..(23): n is a, c, g, or t
caggctggtacgcccncgagtantggatatcgtcgaccacgccgtcgcggacgcgtgggcgctcccggaagtggagggtctacacgaagcgccgctgggtctgggtgcccggaggcagcagcgttcgcggagttcgcccgctggcccccgatcaccatgtcggctttcgacaccaaccccttcgcggacccagtggatgtaaaccccttccaggatccctctgtgacccagctgaccaacgccccgcagggcggcctggcggaattcaaccccttctcagagacaaatgcagcgacaacagttcctgtcacccaactccctgggtcctcacagccagcggttctccagccatcagtggaaccaacccagccgaccccccaggccgtggtgtctgcagcccaggcaggcctgctccggcagcaggaagaactggacaggaaagctgccgagctggaacgcaaggagcgggagctgcagaacactgtagccaacttgcatgtgagacagaacaactggccccctctgccctcgtggtgccctgtgaagccctgcttctatcaggatttctccacagagatccctgccgactaccagcggatatgcaagatgctctactatctgtggatgttgcattcagtgactctgtttctgaacctgcttgcctgcctggcctggttctcgggcaacagctccaagggagtggactttggcctctccatcctgtggtttctgatcttcactccctgtgccttcctttgttggtaccgacccatctataaggcctttaggtccgacaactctttcagcttctttgtgttcttctttgtatttttttgtcaaatagggatctacatcatccagttggttggcatccctggcctgggggacagcggttggattgcagccctgtctacactggataatcattccctggccatatcagtcatcatgatggtggtggctggcttcttcaccctctgtgccgtgctctcagtcttcctcctgcagcgggtgcactccctctaccgacggacaggggccagcttccagcaggcccaggaggagttttcccagggcatcttcagcagcagaaccttccacagagctgcttcatctgctgcccaaggagccttccaggggaattagtcctcctctcttctctccccctcagcctttctctcgcctgccttctgagctgcactttccgtgggtgccttatgtggtggtggttgtgcccagcacagacctggcagggttcttgccgtggctcttcctcctccctcagcgaccagctctccctggaacgggagggacagggaattttttccccctctatgtacaaaaaaaaacaaagctctctttccttctctggtgatggtttggtaggattcttttgtctctggaagcagtgggactgaagttctcttcgtcctgtgcacacacagacacccccacacagttgggatcacaggctgacctgggcccatcccagctggagctttctgccagggtcctgggccttgactcccccaccctgcaggcctggcctgaatctggcttcttagacacagcccagtccttcctgcctgggctgggaataagcctctcacaggttctggtggacagatctgttccccaggtcactccagtggtctccaggcttccagagaaggctggttgcctcaagctcttctctgcctcataaacggatccagagaaggctggttgccttaagctcttccctgcctcgtgttcctgagaaacggattaatagccctttatccccctgcaccctcctgcaggggatggcactttgagccctctggagccctccccttgctgagccttactctcttcagactttctgaatgtacaatgccgttggttgggatttggggactggaagggaccaaggacactgaccccaagctgtcctgcctagcgtccagcgtcttctaggagggtggggtctgcctgtcctggtgtggttggtttggccctgtttgctgtgactacccccccccctccccgaaccgagggacggctgcctttgtctctgcctcagatgccacctgccccgcccatgctccccatcagcagcatccagactttcaggaagggcagggccagccagtccagaaccgcatccctcagcagggactgataagccatctctcggagggccccctaatacccagtggagtctggttcacaccctggggggtgtgtcactgtgatgggacacgtaggagtccacccttaaaaccagcaccctgtccctcgaggctgccgagtgggtgtgtggactcgggggccttcccacaaaactagcctccggctctgggcccgagacagccgcaggccccagccactgaatgatactggcagcggctggggttttatgaactcctttctggtattttttcccctctatgtacaaatgtatatgttacgtctcaatttttgtgcttaagtaaaaataaaaacattttcagacaa

SEQ ID NO: 24437 - DNA, 2607 bp, Homo sapiens
atcgcgcctgcgccagaaccgctgcctcgctcccggaagtggagggtctacacgaagcgccgctgggtctgggtgcccggaggcagcagcgttcgcggagttcgcccgctggcccccgatcaccatgtcggctttcgacaccaaccccttcgcggacccagtggatgtaaaccccttccaggatccctctgtgacccagctgaccaacgccccgcagggcggcctggcggaattcaaccccttctcagagacaaatgcagcgacaacagttcctgtcacccaactccctgggtcctcacagccagcggttctccagccatcagtggaaccaacccagccgaccccccaggccgtggtgtctgcagcccaggcaggcctgctccggcagcaggaagaactggacaggaaagctgccgagctggaacgcaaggagcgggagctgcagaacactgtagccaacttgcatgtgagacagaacaactggccccctctgccctcgtggtgccctgtgaagccctgcttctatcaggatttctccacagagatccctgccgactaccagcggatatgcaagatgctctactatctgtggatgttgcattcagtgactctgtttctgaacctgcttgcctgcctggcctggttctcgggcaacagctccaagggagtggactttggcctctccatcctgtggtttctgatcttcactccctgtgccttcctttgttggtaccgacccatctataaggcctttaggtccgacaactctttcagcttctttgtgttcttctttgtatttttttgtcaaatagggatctacatcatccagttggttggcatccctggcctgggggacagcggttggattgcagccctgtctacactggataatcattccctggccatatcagtcatcatgatggtggtggctggcttcttcaccctctgtgccgtgctctcagtcttcctcctgcagcgggtgcactccctctaccgacggacaggggccagcttccagcaggcccaggaggagttttcccagggcatcttcagcagcagaaccttccacagagctgcttcatctgctgcccaaggagccttccaggggaattagtcctcctctcttctctccccctcagcctttctctcgcctgccttctgagctgcactttccgtgggtgccttatgtggtggtggttgtgcccagcacagacctggcagggttcttgccgtggctcttcctcctccctcagcgaccagctctccctggaacgggagggacagggaattttttccccctctatgtacaaaaaaaaacaaagctctctttccttctctggtgatggtttggtaggattcttttgtctctggaagcagtgggactgaagttctcttcgtcctgtgcacacacagacacccccacacagttgggatcacaggctgacctgggcccatcccagctggagctttctgccagggtcctgggccttgactcccccaccctgcaggcctggcctgaatctggcttcttagacacagcccagtccttcctgcctgggctgggaataagcctctcacaggttctggtggacagatctgttccccaggtcactccagtggtctccaggcttccagagaaggctggttgcctcaagctcttctctgcctcataaacggatccagagaaggctggttgccttaagctcttccctgcctcgtgttcctgagaaacggattaatagccctttatccccctgcaccctcctgcaggggatggcactttgagccctctggagccctccccttgctgagccttactctcttcagactttctgaatgtacaatgccgttggttgggatttggggactggaagggaccaaggacactgaccccaagctgtcctgcctagcgtccagcgtcttctaggagggtggggtctgcctgtcctggtgtggttggtttggccctgtttgctgtgactacccccccccctccccgaaccgagggacggctgcctttgtctctgcctcagatgccacctgccccgcccatgctccccatcagcagcatccagactttcaggaagggcagggccagccagtccagaaccgcatccctcagcagggactgataagccatctctcggagggccccctaatacccagtggagtctggttcacaccctggggggtgtgtcactgtgatgggacacgtaggagtccacccttaaaaccagcaccctgtccctcgaggctgccgagtgggtgtgtggactcgggggccttcccacaaaactagcctccggctctgggcccgagacagccgcaggccccagccactgaatgatactggcagcggctggggttttatgaactcctttctggtattttttcccctctatgtacaaatgtatatgttacgtctcaatttttgtgcttaagtaaaaataaaaacattttcagacaaaatataattaataaatataataaatacactacaaagacaaaatatccacggtcatgtaagtttacaacacaaacacatgatagaaaacaataaccatattttggtgtgggtcggcggcgcctcactgtgttcgtcttttc

SEQ ID NO: 24438 - DNA, 2228 bp, Homo sapiens
atcgcgcctgcgccagaaccgctgcctcgctcccggaagtggagggtctacacgaagcgccgctgggtctgggtgcccggaggcagcagcgttcgcggagttcgcccgctggcccccgatcaccatgtcggctttcgacaccaaccccttcgcggacccagtggatgtaaaccccttccaggatccctctgtgacccagctgaccaacgccccgcagggcggcctggcggaattcaaccccttctcagagacaaatgcagcgacaacagttcctgtcacccaactccctgggtcctcacagccagcggttctccagccatcagtggaaccaacccagccgaccccccaggccgtggtgtctgcagcccaggcaggcctgctccggcagcaggaagaactggacaggaaagctgccgagctggaacgcaaggagcgggagctgcagaacactgtagccaacttgcatgtgagacagaacaactggccccctctgccctcgtggtgccctgtgaagccctgcttctatcaggatttctccacagagatccctgccgactaccagcggatatgcaagatgctctactatctgtggatgttgcattcagtgactctgtttctgaacctgcttgcctgcctggcctggttctcgggcaacagctccaagggagtggactttggcctctccatcctgtggtttctgatcttcactccctgtgccttcctttgttggtaccgacccatctataaggcctttaggtccgacaactctttcagcttctttgtgttcttctttgtatttttttgtcaaatagggatctacatcatccagttggttggcatccctggcctgggggacagcggttggattgcagccctgtctacactggataatcattccctggccatatcagtcatcatgatggtggtggctggcttcttcaccctctgtgccgtgctctcagtcttcctcctgcagcgggtgcactccctctaccgacggacaggggccagcttccagcaggcccaggaggagttttcccagggcatcttcagcagcagaaccttccacagagctgcttcatctgctgcccaaggagccttccaggggaattagtcctcctctcttctctccccctcagcctttctctcgcctgccttctgagctgcactttccgtgggtgccttatgtggtggtggttgtgcccagcacagacctggcagggttcttgccgtggctcttcctcctccctcagcgaccagctctccctggaacgggagggacagggaattttttccccctctatgtacaaaaaaaaacaaagctctctttccttctctggtgatggtttggtaggattcttttgtctctggaagcagtgggactgaagttctcttcgtcctgtgcacacacagacacccccacacagttgggatcacaggctgacctgggcccatcccagctggagctttctgccagggtcctgggccttgactcccccaccctgcaggcctggcctgaatctggcttcttagacacagcccagtccttcctgcctgggctgggaataagcctctcacaggttctggtggacagatctgttccccaggtcactccagtggtctccaggcttccagagaaggctggttgcctcaagctcttctctgcctcataaacggatccagagaaggctggttgccttaagctcttccctgcctcgtgttcctgagaaacggattaatagccctttatccccctgcaccctcctgcaggggatggcactttgagccctctggagccctccccttgctgagccttactctcttcagactttctgaatgtacaatgccgttggttgggatttggggactggaagggaccaaggacactgaccccaagctgtcctgcctagcgtccagcgtcttctaggagggtggggtctgcctgtcctggtgtggttggtttggccctgtttgctgtgactccacccttaaaaccagcaccctgtccctcgaggctgccgagtgggtgtgtggactcgggggccttcccacaaaactagcctccggctctgggcccgagacagccgcaggccccagccactgaatgatactggcagcggctggggttttatgaactcctttctggtattttttcccctctatgtacaaatgtatatgttacgtctcaatttttgtgcttaagtaaaaataaaaacattttcagacaa

SEQ ID NO: 24439 - DNA, 1835 bp, Homo sapiens
atcgcgcctgcgccagaaccgctgcctcgctcccggaagtggagggtctacacgaagcgccgctgggtctgggtgcccggaggcagcagcgttcgcggagttcgcccgctggcccccgatcaccatgtcggctttcgacaccaaccccttcgcggacccagtggatgtaaaccccttccaggatccctctgtgacccagctgaccaacgccccgcagggcggcctggcggaattcaaccccttctcagagacaaatgcagcgacaacagttcctgtcacccaactccctgggtcctcacagccagcggttctccagccatcagtggaaccaacccagccgaccccccaggccgtggtgtctgcagcccaggcaggcctgctccggcagcaggaagaactggacaggaaagctgccgagctggaacgcaaggagcgggagctgcagaacactgtagccaacttgcatgtgagacagaacaactggccccctctgccctcgtggtgccctgtgaagccctgcttctatcaggatttctccacagagatccctgccgactaccagcggatatgcaagatgctctactatctgtggatgttgcattcagtgactctgtttctgaacctgcttgcctgcctggcctggttctcgggcaacagctccaagggagtggactttggcctctccatcctgtggtttctgatcttcactccctgtgccttcctttgttggtaccgacccatctataaggcctttaggtccgacaactctttcagcttctttgtgttcttctttgtatttttttgtcaaatagggatctacatcatccagttggttggcatccctggcctgggggacagcggttggattgcagccctgtctacactggataatcattccctggccatatcagtcatcatgatggtggtggctggcttcttcaccctctgtgccgtgctctcagtcttcctcctgcagcgggtgcactccctctaccgacggacaggggccagcttccagcaggcccaggaggagttttcccagggcatcttcagcagcagaaccttccacagagctgcttcatctgctgcccaaggagccttccaggggaattagtcctcctctcttctctccccctcagcctttctctcgcctgccttctgagctgcactttccgtgggtgccttatgtggtggtggttgtgcccagcacagacctggcagggttcttgccgtggctcttcctcctccctcagcgaccagctctccctggaacgggagggacagggaattttttccccctctatgtacaaaaaaaaacaaagctctctttccttctctggtgatggtttggtaggattcttttgtctctggaagcagtgggactgaagttctcttcgtcctgtgcacacacagacacccccacacagttgggatcacaggctgacctgggcccatcccagctggagctttctgccagggtcctgggccttgactcccccaccctgcaggcctggcctgaatctggcttcttagacacagcccagtccttcctgcctgggctgggaataagcctctcacaggttctggtggacagatctgttccccaggtcactccagtggtctccaggcttccagagaaggctggttgcctcaagctcttctctgcctcataaacggatccagagaaggctggttgccttaagctcttccctgcctcctggcagcggctggggttttatgaactcctttctggtattttttcccctctatgtacaaatgtatatgttacgtctcaatttttgtgcttaagtaaaaataaaaacattttcagacaa

SEQ ID NO: 24440 - DNA, 1771 bp, Homo sapiens
atcgcgcctgcgccagaaccgctgcctcgctcccggaagtggagggtctacacgaagcgccgctgggtctgggtgcccggaggcagcagcgttcgcggagttcgcccgctggcccccgatcaccatgtcggctttcgacaccaaccccttcgcggacccagtggatgtaaaccccttccaggatccctctgtgacccagctgaccaacgccccgcagggcggcctggcggaattcaaccccttctcagagacaaatgcagcgacaacagttcctgtcacccaactccctgggtcctcacagccagcggttctccagccatcagtggaaccaacccagccgaccccccaggccgtggtgtctgcagcccaggcaggcctgctccggcagcaggaagaactggacaggaaagctgccgagctggaacgcaaggagcgggagctgcagaacactgtagccaacttgcatgtgagacagaacaactggccccctctgccctcgtggtgccctgtgaagccctgcttctatcaggatttctccacagagatccctgccgactaccagcggatatgcaagatgctctactatctgtggatgttgcattcagtgactctgtttctgaacctgcttgcctgcctggcctggttctcgggcaacagctccaagggagtggactttggcctctccatcctgtggtttctgatcttcactccctgtgccttcctttgttggtaccgacccatctataaggcctttaggtccgacaactctttcagcttctttgtgttcttctttgtatttttttgtcaaatagggatctacatcatccagttggttggcatccctggcctgggggacagcggttggattgcagccctgtctacactggataatcattccctggccatatcagtcatcatgatggtggtggctggcttcttcaccctctgtgccgtgctctcagtcttcctcctgcagcgggtgcactccctctaccgacggacaggggccagcttccagcaggcccaggaggagttttcccagggcatcttcagcagcagaaccttccacagagctgcttcatctgctgcccaaggagccttccaggggaattagtcctcctctcttctctccccctcagcctttctctcgcctgccttctgagctgcactttccgtgggtgccttatgtggtggtggttgtgcccagcacagacctggcagggttcttgccgtggctcttcctcctccctcagcgaccagctctccctggaacgggagggacagggaattttttccccctctatgtacaaaaaaaaacaaagctctctttccttctctggtgatggtttggtaggattcttttgtctctggaagcagtgggactgaagttctcttcgtcctgtgcacacacagacacccccacacagttgggatcacaggctgacctgggcccatcccagctggagctttctgccagggtcctgggccttgaggggtgtgtcactgtgatgggacacgtaggagtccacccttaaaaccagcaccctgtccctcgaggctgccgagtgggtgtgtggactcgggggccttcccacaaaactagcctccggctctgggcccgagacagccgcaggccccagccactgaatgatactggcagcggctggggttttatgaactcctttctggtattttttcccctctatgtacaaatgtatatgttacgtctcaatttttgtgcttaagtaaaaataaaaacattttcagacaa

SEQ ID NO: 24441 - DNA, 1815 bp, Homo sapiens
  misc_feature (1366)..(1366): n is a, c, g, or t
atcgcgcctgcgccagaaccgctgcctcgctcccggaagtggagggtctacacgaagcgccgctgggtctgggtgcccggaggcagcagcgttcgcggagttcgcccgctggcccccgatcaccatgtcggctttcgacaccaaccccttcgcggacccagtggatgtaaaccccttccaggatccctctgtgacccagctgaccaacgccccgcagggcggcctggcggaattcaaccccttctcagagacaaatgcagcgacaacagttcctgtcacccaactccctgggtcctcacagccagcggttctccagccatcagtggaaccaacccagccgaccccccaggccgtggtgtctgcagcccaggcaggcctgctccggcagcaggaagaactggacaggaaagctgccgagctggaacgcaaggagcgggagctgcagaacactgtagccaacttgcatgtgagacagaacaactggccccctctgccctcgtggtgccctgtgaagccctgcttctatcaggatttctccacagagatccctgccgactaccagcggatatgcaagatgctctactatctgtggatgttgcattcagtgactctgtttctgaacctgcttgcctgcctggcctggttctcgggcaacagctccaagggagtggactttggcctctccatcctgtggtttctgatcttcactccctgtgccttcctttgttggtaccgacccatctataaggcctttaggtccgacaactctttcagcttctttgtgttcttctttgtatttttttgtcaaatagggatctacatcatccagttggttggcatccctggcctgggggacagcggttggattgcagccctgtctacactggataatcattccctggccatatcagtcatcatgatggtggtggctggcttcttcaccctctgtgccgtgctctcagtcttcctcctgcagcgggtgcactccctctaccgacggacaggggccagcttccagcaggcccaggaggagttttcccagggcatcttcagcagcagaaccttccacagagctgcttcatctgctgcccaaggagccttccaggggaattagtcctcctctcttctctccccctcagcctttctctcgcctgccttctgagctgcactttccgtgggtgccttatgtggtggtggttgtgcccagcacagacctggcagggttcttgccgtggctcttcctcctccctcagcgaccagctctccctggaacgggagggacagggaattttttccccctctatgtacaaaaaaaaacaaagctctctttccttctctggtgatggtttggtaaaaaaaaaaaaanaaaaaaaaaaaaaaaacaacacaaaaaaaaaaaaaaaaaaaacaaaaaaaagttgtgtgggcgggcgcgccccgcgcgccccccgaaaaaattttcacacacacccctcggggggggcgggcggcggcccccaatgaggtggtagatgcgcaacacatgcgttccacacagtgggtgtgggtcccgacaagaaacgccggcggcgtccccaacgacaacagcgtgcgggggggttcattccccccacacaatatagaaaaacgccgcccgcgggggcgacaccgcacggaggttgtgttctgaaaaacaacccaccggagggagggacctaccgcggagggcagccacaacaggggggcggtcccaccacaccagcgaggggggacccgccaacgcgggacgagccctcactcatacaaaaatgtacggccaccggcgacgcggagggt

SEQ ID NO: 24442 - DNA, 2398 bp, Homo sapiens
atcgcgcctgcgccagaaccgctgcctcgctcccggaagtggagggtctacacgaagcgccgctgggtctgggtgcccggaggcagcagcgttcgcggagttcgcccgctggcccccgatcaccatgtcggctttcgacaccaaccccttcgcggacccagtggatgtaaaccccttccagacaaatgcagcgacaacagttcctgtcacccaactccctgggtcctcacagccagcggttctccagccatcagtggaaccaacccagccgaccccccaggccgtggtgtctgcagcccaggcaggcctgctccggcagcaggaagaactggacaggaaagctgccgagctggaacgcaaggagcgggagctgcagaacactgtagccaacttgcatgtgagacagaacaactggccccctctgccctcgtggtgccctgtgaagccctgcttctatcaggatttctccacagagatccctgccgactaccagcggatatgcaagatgctctactatctgtggatgttgcattcagtgactctgtttctgaacctgcttgcctgcctggcctggttctcgggcaacagctccaagggagtggactttggcctctccatcctgtggtttctgatcttcactccctgtgccttcctttgttggtaccgacccatctataaggcctttaggtccgacaactctttcagcttctttgtgttcttctttgtatttttttgtcaaatagggatctacatcatccagttggttggcatccctggcctgggggacagcggttggattgcagccctgtctacactggataatcattccctggccatatcagtcatcatgatggtggtggctggcttcttcaccctctgtgccgtgctctcagtcttcctcctgcagcgggtgcactccctctaccgacggacaggggccagcttccagcaggcccaggaggagttttcccagggcatcttcagcagcagaaccttccacagagctgcttcatctgctgcccaaggagccttccaggggaattagtcctcctctcttctctccccctcagcctttctctcgcctgccttctgagctgcactttccgtgggtgccttatgtggtggtggttgtgcccagcacagacctggcagggttcttgccgtggctcttcctcctccctcagcgaccagctctccctggaacgggagggacagggaattttttccccctctatgtacaaaaaaaaacaaagctctctttccttctctggtgatggtttggtaggattcttttgtctctggaagcagtgggactgaagttctcttcgtcctgtgcacacacagacacccccacacagttgggatcacaggctgacctgggcccatcccagctggagctttctgccagggtcctgggccttgactcccccaccctgcaggcctggcctgaatctggcttcttagacacagcccagtccttcctgcctgggctgggaataagcctctcacaggttctggtggacagatctgttccccaggtcactccagtggtctccaggcttccagagaaggctggttgcctcaagctcttctctgcctcataaacggatccagagaaggctggttgccttaagctcttccctgcctcgtgttcctgagaaacggattaatagccctttatccccctgcaccctcctgcaggggatggcactttgagccctctggagccctccccttgctgagccttactctcttcagactttctgaatgtacaatgccgttggttgggatttggggactggaagggaccaaggacactgaccccaagctgtcctgcctagcgtccagcgtcttctaggagggtggggtctgcctgtcctggtgtggttggtttggccctgtttgctgtgactacccccccccctccccgaaccgagggacggctgcctttgtctctgcctcagatgccacctgccccgcccatgctccccatcagcagcatccagactttcaggaagggcagggccagccagtccagaaccgcatccctcagcagggactgataagccatctctcggagggccccctaatacccagtggagtctggttcacaccctggggggtgtgtcactgtgatgggacacgtaggagtccacccttaaaaccagcaccctgtccctcgaggctgccgagtgggtgtgtggactcgggggccttcccacaaaactagcctccggctctgggcccgagacagccgcaggccccagccactgaatgatactggcagcggctggggttttatgaactcctttctggtattttttcccctctatgtacaaatgtatatgttacgtctcaatttttgtgcttaagtaaaaataaaaacattttcagacaa

SEQ ID NO: 24443 - DNA, 2742 bp, Homo sapiens
atcgcgcctgcgccagaaccgctgcctcgctcccggaagtggagggtctacacgaagcgccgctgggtctgggtgcccggaggcagcagcgttcgcggagttcgcccgctggcccccgatcaccatgtcggctttcgacaccaaccccttcgcggacccagtggatgtaaaccccttccaggtagagcccctctcccgccatccagctctcagatttccctagggcccacggccgccgcccgggcctctcgctagagccgggagacgtggcgtaggagggacgggtcatctgcccaatgggagagcgggctttgaggtctggcctatcgtaacgcgtgaggggcgcgactagcagcaggtggaactgcagaggaggcggggcgctgaagtgttggagacagtggggtcttctagcacccggaggctgggctgtgctagggaaggggactggagcaggatccctctgtgacccagctgaccaacgccccgcagggcggcctggcggaattcaaccccttctcagagacaaatgcagcgacaacagttcctgtcacccaactccctgggtcctcacagccagcggttctccagccatcagtggaaccaacccagccgaccccccaggccgtggtgtctgcagcccaggcaggcctgctccggcagcaggaagaactggacaggaaagctgccgagctggaacgcaaggagcgggagctgcagaacactgtagccaacttgcatgtgagacagaacaactggccccctctgccctcgtggtgccctgtgaagccctgcttctatcaggatttctccacagagatccctgccgactaccagcggatatgcaagatgctctactatctgtggatgttgcattcagtgactctgtttctgaacctgcttgcctgcctggcctggttctcgggcaacagctccaagggagtggactttggcctctccatcctgtggtttctgatcttcactccctgtgccttcctttgttggtaccgacccatctataaggcctttaggtccgacaactctttcagcttctttgtgttcttctttgtatttttttgtcaaatagggatctacatcatccagttggttggcatccctggcctgggggacagcggttggattgcagccctgtctacactggataatcattccctggccatatcagtcatcatgatggtggtggctggcttcttcaccctctgtgccgtgctctcagtcttcctcctgcagcgggtgcactccctctaccgacggacaggggccagcttccagcaggcccaggaggagttttcccagggcatcttcagcagcagaaccttccacagagctgcttcatctgctgcccaaggagccttccaggggaattagtcctcctctcttctctccccctcagcctttctctcgcctgccttctgagctgcactttccgtgggtgccttatgtggtggtggttgtgcccagcacagacctggcagggttcttgccgtggctcttcctcctccctcagcgaccagctctccctggaacgggagggacagggaattttttccccctctatgtacaaaaaaaaacaaagctctctttccttctctggtgatggtttggtaggattcttttgtctctggaagcagtgggactgaagttctcttcgtcctgtgcacacacagacacccccacacagttgggatcacaggctgacctgggcccatcccagctggagctttctgccagggtcctgggccttgactcccccaccctgcaggcctggcctgaatctggcttcttagacacagcccagtccttcctgcctgggctgggaataagcctctcacaggttctggtggacagatctgttccccaggtcactccagtggtctccaggcttccagagaaggctggttgcctcaagctcttctctgcctcataaacggatccagagaaggctggttgccttaagctcttccctgcctcgtgttcctgagaaacggattaatagccctttatccccctgcaccctcctgcaggggatggcactttgagccctctggagccctccccttgctgagccttactctcttcagactttctgaatgtacaatgccgttggttgggatttggggactggaagggaccaaggacactgaccccaagctgtcctgcctagcgtccagcgtcttctaggagggtggggtctgcctgtcctggtgtggttggtttggccctgtttgctgtgactacccccccccctccccgaaccgagggacggctgcctttgtctctgcctcagatgccacctgccccgcccatgctccccatcagcagcatccagactttcaggaagggcagggccagccagtccagaaccgcatccctcagcagggactgataagccatctctcggagggccccctaatacccagtggagtctggttcacaccctggggggtgtgtcactgtgatgggacacgtaggagtccacccttaaaaccagcaccctgtccctcgaggctgccgagtgggtgtgtggactcgggggccttcccacaaaactagcctccggctctgggcccgagacagccgcaggccccagccactgaatgatactggcagcggctggggttttatgaactcctttctggtattttttcccctctatgtacaaatgtatatgttacgtctcaatttttgtgcttaagtaaaaataaaaacattttcagacaa

SEQ ID NO: 24444 - DNA, 2378 bp, Homo sapiens
gcggccgctcccaacatcagagggagaggacagcttagtcatggccaaggggtcaggaaggtgtgggggcagtggaagacaggttggcctctctaaggtggtctctggtacctaagacactctgtggggcggggactgcttctgggactccttgatggctgtccctgcctggggcaaggcctctctgcctgcctacccaggctgacactgtttctgtttgttgtgtctggctgtccctgtacctcccctgttctctccaggccgtggtgtctgcagcccaggcaggcctgctccggcagcaggaagaactggacaggaaagctgccgagctggaacgcaaggagcgggagctgcagaacactgtagccaacttgcatgtgagacagaacaactggccccctctgccctcgtggtgccctgtgaagccctgcttctatcaggatttctccacagagatccctgccgactaccagcggatatgcaagatgctctactatctgtggatgttgcattcagtgactctgtttctgaacctgcttgcctgcctggcctggttctcgggcaacagctccaagggagtggactttggcctctccatcctgtggtttctgatcttcactccctgtgccttcctttgttggtaccgacccatctataaggcctttaggtccgacaactctttcagcttctttgtgttcttctttgtatttttttgtcaaatagggatctacatcatccagttggttggcatccctggcctgggggacagcggttggattgcagccctgtctacactggataatcattccctggccatatcagtcatcatgatggtggtggctggcttcttcaccctctgtgccgtgctctcagtcttcctcctgcagcgggtgcactccctctaccgacggacaggggccagcttccagcaggcccaggaggagttttcccagggcatcttcagcagcagaaccttccacagagctgcttcatctgctgcccaaggagccttccaggggaattagtcctcctctcttctctccccctcagcctttctctcgcctgccttctgagctgcactttccgtgggtgccttatgtggtggtggttgtgcccagcacagacctggcagggttcttgccgtggctcttcctcctccctcagcgaccagctctccctggaacgggagggacagggaattttttccccctctatgtacaaaaaaaaacaaagctctctttccttctctggtgatggtttggtaggattcttttgtctctggaagcagtgggactgaagttctcttcgtcctgtgcacacacagacacccccacacagttgggatcacaggctgacctgggcccatcccagctggagctttctgccagggtcctgggccttgactcccccaccctgcaggcctggcctgaatctggcttcttagacacagcccagtccttcctgcctgggctgggaataagcctctcacaggttctggtggacagatctgttccccaggtcactccagtggtctccaggcttccagagaaggctggttgcctcaagctcttctctgcctcataaacggatccagagaaggctggttgccttaagctcttccctgcctcgtgttcctgagaaacggattaatagccctttatccccctgcaccctcctgcaggggatggcactttgagccctctggagccctccccttgctgagccttactctcttcagactttctgaatgtacaatgccgttggttgggatttggggactggaagggaccaaggacactgaccccaagctgtcctgcctagcgtccagcgtcttctaggagggtggggtctgcctgtcctggtgtggttggtttggccctgtttgctgtgactacccccccccctccccgaaccgagggacggctgcctttgtctctgcctcagatgccacctgccccgcccatgctccccatcagcagcatccagactttcaggaagggcagggccagccagtccagaaccgcatccctcagcagggactgataagccatctctcggagggccccctaatacccagtggagtctggttcacaccctggggggtgtgtcactgtgatgggacacgtaggagtccacccttaaaaccagcaccctgtccctcgaggctgccgagtgggtgtgtggactcgggggccttcccacaaaactagcctccggctctgggcccgagacagccgcaggccccagccactgaatgatactggcagcggctggggttttatgaactcctttctggtattttttcccctctatgtacaaatgtatatgttacgtctcaatttttgtgcttaagtaaaaataaaaacattttcagacaa

SEQ ID NO: 24445 - DNA, 1676 bp, Homo sapiens
gagctcagtacccgctgatccgcttaagatcatccagttggtttggcatccctggcctgggggacagcggttggattgcagccctgtctacactggataatcattccctggccatatcagtcatcatgatggtggtggctggcttcttcaccctctgtgccgtgctctcagtcttcctcctgcagcgggtgcactccctctaccgacggacaggggccagcttccagcaggcccaggaggagttttcccagggcatcttcagcagcagaaccttccacagagctgcttcatctgctgcccaaggagccttccaggggaattagtcctcctctcttctctccccctcagcctttctctcgcctgccttctgagctgcactttccgtgggtgccttatgtggtggtggttgtgcccagcacagacctggcagggttcttgccgtggctcttcctcctccctcagcgaccagctctccctggaacgggagggacagggaattttttccccctctatgtacaaaaaaaaacaaagctctctttccttctctggtgatggtttggtaggattcttttgtctctggaagcagtgggactgaagttctcttcgtcctgtgcacacacagacacccccacacagttgggatcacaggctgacctgggcccatcccagctggagctttctgccagggtcctgggccttgactcccccaccctgcaggcctggcctgaatctggcttcttagacacagcccagtccttcctgcctgggctgggaataagcctctcacaggttctggtggacagatctgttccccaggtcactccagtggtctccaggcttccagagaaggctggttgcctcaagctcttctctgcctcataaacggatccagagaaggctggttgccttaagctcttccctgcctcgtgttcctgagaaacggattaatagccctttatccccctgcaccctcctgcaggggatggcactttgagccctctggagccctccccttgctgagccttactctcttcagactttctgaatgtacaatgccgttggttgggatttggggactggaagggaccaaggacactgaccccaagctgtcctgcctagcgtccagcgtcttctaggagggtggggtctgcctgtcctggtgtggttggtttggccctgtttgctgtgactacccccccccctccccgaaccgagggacggctgcctttgtctctgcctcagatgccacctgccccgcccatgctccccatcagcagcatccagactttcaggaagggcagggccagccagtccagaaccgcatccctcagcagggactgataagccatctctcggagggccccctaatacccagtggagtctggttcacaccctggggggtgtgtcactgtgatgggacacgtaggagtccacccttaaaaccagcaccctgtccctcgaggctgccgagtgggtgtgtggactcgggggccttcccacaaaactagcctccggctctgggcccgagacagccgcaggccccagccactgaatgatactggcagcggctggggttttatgaactcctttctggtattttttcccctctatgtacaaatgtatatgttacgtctcaatttttgtgcttaagtaaaaataaaaacattttcagacaa

SEQ ID NO: 24446 - DNA, 1611 bp, Homo sapiens
tagtcttagtcgggcctgggttaaatcgcgcgagatcattccctggccatatcagtcatcatgatggtggtggctggcttcttcaccctctgtgccgtgctctcagtcttcctcctgcagcgggtgcactccctctaccgacggacaggggccagcttccagcaggcccaggaggagttttcccagggcatcttcagcagcagaaccttccacagagctgcttcatctgctgcccaaggagccttccaggggaattagtcctcctctcttctctccccctcagcctttctctcgcctgccttctgagctgcactttccgtgggtgccttatgtggtggtggttgtgcccagcacagacctggcagggttcttgccgtggctcttcctcctccctcagcgaccagctctccctggaacgggagggacagggaattttttccccctctatgtacaaaaaaaaacaaagctctctttccttctctggtgatggtttggtaggattcttttgtctctggaagcagtgggactgaagttctcttcgtcctgtgcacacacagacacccccacacagttgggatcacaggctgacctgggcccatcccagctggagctttctgccagggtcctgggccttgactcccccaccctgcaggcctggcctgaatctggcttcttagacacagcccagtccttcctgcctgggctgggaataagcctctcacaggttctggtggacagatctgttccccaggtcactccagtggtctccaggcttccagagaaggctggttgcctcaagctcttctctgcctcataaacggatccagagaaggctggttgccttaagctcttccctgcctcgtgttcctgagaaacggattaatagccctttatccccctgcaccctcctgcaggggatggcactttgagccctctggagccctccccttgctgagccttactctcttcagactttctgaatgtacaatgccgttggttgggatttggggactggaagggaccaaggacactgaccccaagctgtcctgcctagcgtccagcgtcttctaggagggtggggtctgcctgtcctggtgtggttggtttggccctgtttgctgtgactacccccccccctccccgaaccgagggacggctgcctttgtctctgcctcagatgccacctgccccgcccatgctccccatcagcagcatccagactttcaggaagggcagggccagccagtccagaaccgcatccctcagcagggactgataagccatctctcggagggccccctaatacccagtggagtctggttcacaccctggggggtgtgtcactgtgatgggacacgtaggagtccacccttaaaaccagcaccctgtccctcgaggctgccgagtgggtgtgtggactcgggggccttcccacaaaactagcctccggctctgggcccgagacagccgcaggccccagccactgaatgatactggcagcggctggggttttatgaactcctttctggtattttttcccctctatgtacaaatgtatatgttacgtctcaatttttgtgcttaagtaaaaataaaaacattttcagacaa

SEQ ID NO: 24447 - DNA, 1565 bp, Homo sapiens
tgggagtataacctggatggctggcttcctggtgggcccaaaggacaggcttctctcaccccacccctcttcgccaggtgcactccctctaccgacggacaggggccagcttccagcaggcccaggaggagttttcccagggcatcttcagcagcagaaccttccacagagctgcttcatctgctgcccaaggagccttccaggggaattagtcctcctctcttctctccccctcagcctttctctcgcctgccttctgagctgcactttccgtgggtgccttatgtggtggtggttgtgcccagcacagacctggcagggttcttgccgtggctcttcctcctccctcagcgaccagctctccctggaacgggagggacagggaattttttccccctctatgtacaaaaaaaaacaaagctctctttccttctctggtgatggtttggtaggattcttttgtctctggaagcagtgggactgaagttctcttcgtcctgtgcacacacagacacccccacacagttgggatcacaggctgacctgggcccatcccagctggagctttctgccagggtcctgggccttgactcccccaccctgcaggcctggcctgaatctggcttcttagacacagcccagtccttcctgcctgggctgggaataagcctctcacaggttctggtggacagatctgttccccaggtcactccagtggtctccaggcttccagagaaggctggttgcctcaagctcttctctgcctcataaacggatccagagaaggctggttgccttaagctcttccctgcctcgtgttcctgagaaacggattaatagccctttatccccctgcaccctcctgcaggggatggcactttgagccctctggagccctccccttgctgagccttactctcttcagactttctgaatgtacaatgccgttggttgggatttggggactggaagggaccaaggacactgaccccaagctgtcctgcctagcgtccagcgtcttctaggagggtggggtctgcctgtcctggtgtggttggtttggccctgtttgctgtgactacccccccccctccccgaaccgagggacggctgcctttgtctctgcctcagatgccacctgccccgcccatgctccccatcagcagcatccagactttcaggaagggcagggccagccagtccagaaccgcatccctcagcagggactgataagccatctctcggagggccccctaatacccagtggagtctggttcacaccctggggggtgtgtcactgtgatgggacacgtaggagtccacccttaaaaccagcaccctgtccctcgaggctgccgagtgggtgtgtggactcgggggccttcccacaaaactagcctccggctctgggcccgagacagccgcaggccccagccactgaatgatactggcagcggctggggttttatgaactcctttctggtattttttcccctctatgtacaaatgtatatgttacgtctcaatttttgtgcttaagtaaaaataaaaacattttcagacaa

SEQ ID NO: 24448 - DNA, 1248 bp, Homo sapiens
  misc_feature (13)..(13): n is a, c, g, or t
  misc_feature (15)..(15): n is a, c, g, or t
  misc_feature (17)..(17): n is a, c, g, or t
  misc_feature (20)..(21): n is a, c, g, or t
  misc_feature (56)..(56): n is a, c, g, or t
aggactcgagcgntngntcnnaaaaaacccacgggcgtgttttaaaacggaagcgncatactatacgtcttaggtacgaggctgggtggtgaaaaaaacaaagctctctttccttctctggtgatggtttggtaggattcttttgtctctggaagcagtgggactgaagttctcttcgtcctgtgcacacacagacacccccacacagttgggatcacaggctgacctgggcccatcccagctggagctttctgccagggtcctgggccttgactcccccaccctgcaggcctggcctgaatctggcttcttagacacagcccagtccttcctgcctgggctgggaataagcctctcacaggttctggtggacagatctgttccccaggtcactccagtggtctccaggcttccagagaaggctggttgcctcaagctcttctctgcctcataaacggatccagagaaggctggttgccttaagctcttccctgcctcgtgttcctgagaaacggattaatagccctttatccccctgcaccctcctgcaggggatggcactttgagccctctggagccctccccttgctgagccttactctcttcagactttctgaatgtacaatgccgttggttgggatttggggactggaagggaccaaggacactgaccccaagctgtcctgcctagcgtccagcgtcttctaggagggtggggtctgcctgtcctggtgtggttggtttggccctgtttgctgtgactacccccccccctccccgaaccgagggacggctgcctttgtctctgcctcagatgccacctgccccgcccatgctccccatcagcagcatccagactttcaggaagggcagggccagccagtccagaaccgcatccctcagcagggactgataagccatctctcggagggccccctaatacccagtggagtctggttcacaccctggggggtgtgtcactgtgatgggacacgtaggagtccacccttaaaaccagcaccctgtccctcgaggctgccgagtgggtgtgtggactcgggggccttcccacaaaactagcctccggctctgggcccgagacagccgcaggccccagccactgaatgatactggcagcggctggggttttatgaactcctttctggtattttttcccctctatgtacaaatgtatatgttacgtctcaatttttgtgcttaagtaaaaataaaaacattttcagacaa

SEQ ID NO: 24449 - DNA, 1036 bp, Homo sapiens
atcgcgcctgcgccagaaccgctgcctcgctcccggaagtggagggtctacacgaagcgccgctgggtctgggtgcccggaggcagcagcgttcgcggagttcgcccgctggcccccgatcaccatgtcggctttcgacaccaaccccttcgcggacccagtggatgtaaaccccttccaggatccctctgtgacccagctgaccaacgccccgcagggcggcctggcggaattcaaccccttctcagagacaaatgcagcgacaacagttcctgtcacccaactccctgggtcctcacagccagcggttctccagccatcagtggaaccaacccagccgaccccccaggccgtggtgtctgcagcccaggcaggcctgctccggcagcaggaagaactggacaggaaagctgccgagctggaacgcaaggagcgggagctgcagaacactgtagccaacttgcatgtgagacagaacaactggccccctctgccctcgtggtgccctgtgaagccctgcttctatcaggatttctccacagagatccctgccgactaccagcggatatgcaagatgctctactatctgtggatgttgcattcagtgactctgtttctgaacctgcttgcctgcctggcctggttctcgggcaacagctccaagggagtggactttggcctctccatcctgtggtttctgatcttcactccctgtgccttcctttgttggtaccgacccatctataaggcctttaggtccgacaactctttcagcttctttgtgttcttctttgtatttttttgtcaaatagggatctacatcatccagttggttggcatccctggcctgggggacaggtgagacctgggcatcacagagggaattaggctttggatatgggactcagcctctcttgccctgttttctagctcccacagagccccgccagtgccctgcttttcccatggcggggagtgggtgagtgggccagctcggatctgctttgggccttctctccagttcttcatcagtagc

SEQ ID NO: 24450 - DNA, 844 bp, Homo sapiens
  misc_feature (55)..(55): n is a, c, g, or t
ggacgtcatttttcatcctcgagcccgtgccgagtgagagaagcggcggaggtcnccaagagaaggctggttgccttaagctcttccctgcctcgtgttcctgagaaacggattaatagccctttatccccctgcaccctcctgcaggggatggcactttgagccctctggagccctccccttgctgagccttactctcttcagactttctgaatgtacaatgccgttggttgggatttggggactggaagggaccaaggacactgaccccaagctgtcctgcctagcgtccagcgtcttctaggagggtggggtctgcctgtcctggtgtggttggtttggccctgtttgctgtgactacccccccccctccccgaaccgagggacggctgcctttgtctctgcctcagatgccacctgccccgcccatgctccccatcagcagcatccagactttcaggaagggcagggccagccagtccagaaccgcatccctcagcagggactgataagccatctctcggagggccccctaatacccagtggagtctggttcacaccctggggggtgtgtcactgtgatgggacacgtaggagtccacccttaaaaccagcaccctgtccctcgaggctgccgagtgggtgtgtggactcgggggccttcccacaaaactagcctccggctctgggcccgagacagccgcaggccccagccactgaatgatactggcagcggctggggttttatgaactcctttctggtattttttcccctctatgtacaaatgtatatgttacgtctcaatttttgtgcttaagtaaaaataaaaacattttcagacaa

SEQ ID NO: 24451 - DNA, 664 bp, Homo sapiens
tactactaaattcgcggccgctcgactttctgaatgtacaatgccgttggttgggatttggggactggaagggaccaaggacactgaccccaagctgtcctgcctagcgtccagcgtcttctaggagggtggggtctgcctgtcctggtgtggttggtttggccctgtttgctgtgactacccccccccctccccgaaccgagggacggctgcctttgtctctgcctcagatgccacctgccccgcccatgctccccatcagcagcatccagactttcaggaagggcagggccagccagtccagaaccgcatccctcagcagggactgataagccatctctcggagggccccctaatacccagtggagtctggttcacaccctggggggtgtgtcactgtgatgggacacgtaggagtccacccttaaaaccagcaccctgtccctcgaggctgccgagtgggtgtgtggactcgggggccttcccacaaaactagcctccggctctgggcccgagacagccgcaggccccagccactgaatgatactggcagcggctggggttttatgaactcctttctggtattttttcccctctatgtacaaatgtatatgttacgtctcaatttttgtgcttaagtaaaaataaaaacattttcagacaa

SEQ ID NO: 24452 - DNA, 556 bp, Homo sapiens
aatttgtggtgacaactaaagaagagcttttccacaaatctttgaaaagcaatctgggaaaggaattcattacccccccccctccccgaaccgagggacggctgcctttgtctctgcctcagatgccacctgccccgcccatgctccccatcagcagcatccagactttcaggaagggcagggccagccagtccagaaccgcatccctcagcagggactgataagccatctctcggagggccccctaatacccagtggagtctggttcacaccctggggggtgtgtcactgtgatgggacacgtaggagtccacccttaaaaccagcaccctgtccctcgaggctgccgagtgggtgtgtggactcgggggccttcccacaaaactagcctccggctctgggcccgagacagccgcaggccccagccactgaatgatactggcagcggctggggttttatgaactcctttctggtattttttcccctctatgtacaaatgtatatgttacgtctcaatttttgtgcttaagtaaaaataaaaacattttcagacaa

SEQ ID NO: 24453 - DNA, 568 bp, Homo sapiens
atcgcgcctgcgccagaaccgctgcctcgctcccggaagtggagggtctacacgaagcgccgctgggtctgggtgcccggaggcagcagcgttcgcggagttcgcccgctggcccccgatcaccatgtcggctttcgacaccaaccccttcgcggacccagtggatgtaaaccccttccaggatccctctgtgacccagctgaccaacgccccgcagggcggcctggcggaattcaaccccttctcagagacaaatgcagcgacaacagttcctgtcacccaactccctgggtcctcacagccagcggttctccagccatcagtggaaccaacccagccgaccccccaggtagtgctgacaaagaactctggccttttctctccagtgagggaatcatccagaccagtagctgagccctgaggctgggggcaagcagagagctttcagcctttggcccctaagggccctcttgctaatttgttcggagctggtcacctacaagtagaggggctgctctgccaattaatatccttactccctccatcccactcaccacccccattgtta

SEQ ID NO: 24454 - DNA, 2596 bp, Homo sapiens
atcgcgcctgcgccagaaccgctgcctcgctcccggaagtggagggtctacacgaagcgccgctgggtctgggtgcccggaggcagcagcgttcgcggagttcgcccgctggcccccgatcaccatgtcggctttcgacaccaaccccttcgcggacccagtggatgtaaaccccttccaggatccctctgtgacccagctgaccaacgccccgcagggcggcctggcggaattcaaccccttctcagagacaaatgcagcgacaacagttcctgtcacccaactccctgggtcctcacagccagcggttctccagccatcagtggaaccaacccagccgaccccccagctcctgcttagacaggccagcaagttcccgcctgcccaattcctggcagtgagcgagctctcagagaggcagatgctcctaggaggagaaagtattctcagagacagctacatgcgaaagcttccgaaggccgtggtgtctgcagcccaggcaggcctgctccggcagcaggaagaactggacaggaaagctgccgagctggaacgcaaggagcgggagctgcagaacactgtagccaacttgcatgtgagacagaacaactggccccctctgccctcgtggtgccctgtgaagccctgcttctatcaggatttctccacagagatccctgccgactaccagcggatatgcaagatgctctactatctgtggatgttgcattcagtgactctgtttctgaacctgcttgcctgcctggcctggttctcgggcaacagctccaagggagtggactttggcctctccatcctgtggtttctgatcttcactccctgtgccttcctttgttggtaccgacccatctataaggcctttaggtccgacaactctttcagcttctttgtgttcttctttgtatttttttgtcaaatagggatctacatcatccagttggttggcatccctggcctgggggacagcggttggattgcagccctgtctacactggataatcattccctggccatatcagtcatcatgatggtggtggctggcttcttcaccctctgtgccgtgctctcagtcttcctcctgcagcgggtgcactccctctaccgacggacaggggccagcttccagcaggcccaggaggagttttcccagggcatcttcagcagcagaaccttccacagagctgcttcatctgctgcccaaggagccttccaggggaattagtcctcctctcttctctccccctcagcctttctctcgcctgccttctgagctgcactttccgtgggtgccttatgtggtggtggttgtgcccagcacagacctggcagggttcttgccgtggctcttcctcctccctcagcgaccagctctccctggaacgggagggacagggaattttttccccctctatgtacaaaaaaaaacaaagctctctttccttctctggtgatggtttggtaggattcttttgtctctggaagcagtgggactgaagttctcttcgtcctgtgcacacacagacacccccacacagttgggatcacaggctgacctgggcccatcccagctggagctttctgccagggtcctgggccttgactcccccaccctgcaggcctggcctgaatctggcttcttagacacagcccagtccttcctgcctgggctgggaataagcctctcacaggttctggtggacagatctgttccccaggtcactccagtggtctccaggcttccagagaaggctggttgcctcaagctcttctctgcctcataaacggatccagagaaggctggttgccttaagctcttccctgcctcgtgttcctgagaaacggattaatagccctttatccccctgcaccctcctgcaggggatggcactttgagccctctggagccctccccttgctgagccttactctcttcagactttctgaatgtacaatgccgttggttgggatttggggactggaagggaccaaggacactgaccccaagctgtcctgcctagcgtccagcgtcttctaggagggtggggtctgcctgtcctggtgtggttggtttggccctgtttgctgtgactacccccccccctccccgaaccgagggacggctgcctttgtctctgcctcagatgccacctgccccgcccatgctccccatcagcagcatccagactttcaggaagggcagggccagccagtccagaaccgcatccctcagcagggactgataagccatctctcggagggccccctaatacccagtggagtctggttcacaccctggggggtgtgtcactgtgatgggacacgtaggagtccacccttaaaaccagcaccctgtccctcgaggctgccgagtgggtgtgtggactcgggggccttcccacaaaactagcctccggctctgggcccgagacagccgcaggccccagccactgaatgatactggcagcggctggggttttatgaactcctttctggtattttttcccctctatgtacaaatgtatatgttacgtctcaatttttgtgcttaagtaaaaataaaaacattttcagacaa

SEQ ID NO: 24455 - DNA, 2411 bp, Homo sapiens
atcgcgcctgcgccagaaccgctgcctcgctcccggaagtggagggtctacacgaagcgccgctgggtctgggtgcccggaggcagcagcgttcgcggagttcgcccgctggcccccgatcaccatgtcggctttcgacaccaaccccttcgcggacccagtggatgtaaaccccttccaggatccctctgtgacccagctgaccaacgccccgcagggcggcctggcggaattcaaccccttctcagagacaaatgcagcgacaacagttcctgtcacccaactccctgggtcctcacagccagcggttctccagccatcagtggaaccaacccagccgaccccccaggccgtggtgtctgcagcccaggcaggcctgctccggcagcaggaagaactggacaggaaagctgccgagctggaacgcaaggagcgggagctgcagaacactgtagccaacttgcatgtgagacagaacaactggccccctctgccctcgtggtgccctgtgaagccctgcttctatcaggatttctccacagagatccctgccgactaccagcggatatgcaagatgctctactatctgtggatgttgcattcagtgactctgtttctgaacctgcttgcctgcctggcctggttctcgggcaacagctccaagggagtggactttggcctctccatcctgtggtttctgatcttcactccctgtgccttcctttgttggtaccgacccatctataaggcctttagggatctacatcatccagttggttggcatccctggcctgggggacagcggttggattgcagccctgtctacactggataatcattccctggccatatcagtcatcatgatggtggtggctggcttcttcaccctctgtgccgtgctctcagtcttcctcctgcagcgggtgcactccctctaccgacggacaggggccagcttccagcaggcccaggaggagttttcccagggcatcttcagcagcagaaccttccacagagctgcttcatctgctgcccaaggagccttccaggggaattagtcctcctctcttctctccccctcagcctttctctcgcctgccttctgagctgcactttccgtgggtgccttatgtggtggtggttgtgcccagcacagacctggcagggttcttgccgtggctcttcctcctccctcagcgaccagctctccctggaacgggagggacagggaattttttccccctctatgtacaaaaaaaaacaaagctctctttccttctctggtgatggtttggtaggattcttttgtctctggaagcagtgggactgaagttctcttcgtcctgtgcacacacagacacccccacacagttgggatcacaggctgacctgggcccatcccagctggagctttctgccagggtcctgggccttgactcccccaccctgcaggcctggcctgaatctggcttcttagacacagcccagtccttcctgcctgggctgggaataagcctctcacaggttctggtggacagatctgttccccaggtcactccagtggtctccaggcttccagagaaggctggttgcctcaagctcttctctgcctcataaacggatccagagaaggctggttgccttaagctcttccctgcctcgtgttcctgagaaacggattaatagccctttatccccctgcaccctcctgcaggggatggcactttgagccctctggagccctccccttgctgagccttactctcttcagactttctgaatgtacaatgccgttggttgggatttggggactggaagggaccaaggacactgaccccaagctgtcctgcctagcgtccagcgtcttctaggagggtggggtctgcctgtcctggtgtggttggtttggccctgtttgctgtgactacccccccccctccccgaaccgagggacggctgcctttgtctctgcctcagatgccacctgccccgcccatgctccccatcagcagcatccagactttcaggaagggcagggccagccagtccagaaccgcatccctcagcagggactgataagccatctctcggagggccccctaatacccagtggagtctggttcacaccctggggggtgtgtcactgtgatgggacacgtaggagtccacccttaaaaccagcaccctgtccctcgaggctgccgagtgggtgtgtggactcgggggccttcccacaaaactagcctccggctctgggcccgagacagccgcaggccccagccactgaatgatactggcagcggctggggttttatgaactcctttctggtattttttcccctctatgtacaaatgtatatgttacgtctcaatttttgtgcttaagtaaaaataaaaacattttcagacaa

SEQ ID NO: 24456 - DNA, 1824 bp, Homo sapiens
ggcatgaggcgggggtgggaagtcaggaggtttggcctctccatcctgtggtttctgatcttcactccctgtgccttcctttgttggtaccgacccatctataaggcctttaggtccgacaactctttcagcttctttgtgttcttctttgtatttttttgtcaaatagggatctacatcatccagttggttggcatccctggcctgggggacagcggttggattgcagccctgtctacactggataatcattccctggccatatcagtcatcatgatggtggtggctggcttcttcaccctctgtgccgtgctctcagtcttcctcctgcagcgggtgcactccctctaccgacggacaggggccagcttccagcaggcccaggaggagttttcccagggcatcttcagcagcagaaccttccacagagctgcttcatctgctgcccaaggagccttccaggggaattagtcctcctctcttctctccccctcagcctttctctcgcctgccttctgagctgcactttccgtgggtgccttatgtggtggtggttgtgcccagcacagacctggcagggttcttgccgtggctcttcctcctccctcagcgaccagctctccctggaacgggagggacagggaattttttccccctctatgtacaaaaaaaaacaaagctctctttccttctctggtgatggtttggtaggattcttttgtctctggaagcagtgggactgaagttctcttcgtcctgtgcacacacagacacccccacacagttgggatcacaggctgacctgggcccatcccagctggagctttctgccagggtcctgggccttgactcccccaccctgcaggcctggcctgaatctggcttcttagacacagcccagtccttcctgcctgggctgggaataagcctctcacaggttctggtggacagatctgttccccaggtcactccagtggtctccaggcttccagagaaggctggttgcctcaagctcttctctgcctcataaacggatccagagaaggctggttgccttaagctcttccctgcctcgtgttcctgagaaacggattaatagccctttatccccctgcaccctcctgcaggggatggcactttgagccctctggagccctccccttgctgagccttactctcttcagactttctgaatgtacaatgccgttggttgggatttggggactggaagggaccaaggacactgaccccaagctgtcctgcctagcgtccagcgtcttctaggagggtggggtctgcctgtcctggtgtggttggtttggccctgtttgctgtgactacccccccccctccccgaaccgagggacggctgcctttgtctctgcctcagatgccacctgccccgcccatgctccccatcagcagcatccagactttcaggaagggcagggccagccagtccagaaccgcatccctcagcagggactgataagccatctctcggagggccccctaatacccagtggagtctggttcacaccctggggggtgtgtcactgtgatgggacacgtaggagtccacccttaaaaccagcaccctgtccctcgaggctgccgagtgggtgtgtggactcgggggccttcccacaaaactagcctccggctctgggcccgagacagccgcaggccccagccactgaatgatactggcagcggctggggttttatgaactcctttctggtattttttcccctctatgtacaaatgtatatgttacgtctcaatttttgtgcttaagtaaaaataaaaacattttcagacaa

SEQ ID NO: 24457 - DNA, 2173 bp, Homo sapiens
gggctttccggtgatccagctgttccagccttctccccgagctgggagtaaagctccttcactggcctctccggctctggcctgtaggctccaggccttctgcaacgcctccagctaagatggggccaccctggggttcaggtgaatgaggaccgcagcgcgtgccgggtgcacgttctccttccttggagaggcggtgaggaagaagccatcgaagaggctgctgcagaagtcctcaagggcaaattcgtcggccagcagcgcaaggttgcccgtgagcaggtggaggaagatgtcgccaaaggccaagtcgccaaaggtctccaccagcccgggcagcaggcggaggagcgcgttcttgttcctctgcttggtgatgtgcaggacgtagtacagccccacctcgcaggccatgcgctgctcctgcagaaacttagtgaagctttcgggaagtgtgtttggatatgagactggggctttctcctcagccggaagtttctgatccacattgaaagtgtagtcatccaccaggaaggacatgagcatcgggaggaacctggtgatgagctctacctccatcttgggctccttgaagaatcattccctggccatatcagtcatcatgatggtggtggctggcttcttcaccctctgtgccgtgctctcagtcttcctcctgcagcgggtgcactccctctaccgacggacaggggccagcttccagcaggcccaggaggagttttcccagggcatcttcagcagcagaaccttccacagagctgcttcatctgctgcccaaggagccttccaggggaattagtcctcctctcttctctccccctcagcctttctctcgcctgccttctgagctgcactttccgtgggtgccttatgtggtggtggttgtgcccagcacagacctggcagggttcttgccgtggctcttcctcctccctcagcgaccagctctccctggaacgggagggacagggaattttttccccctctatgtacaaaaaaaaacaaagctctctttccttctctggtgatggtttggtaggattcttttgtctctggaagcagtgggactgaagttctcttcgtcctgtgcacacacagacacccccacacagttgggatcacaggctgacctgggcccatcccagctggagctttctgccagggtcctgggccttgactcccccaccctgcaggcctggcctgaatctggcttcttagacacagcccagtccttcctgcctgggctgggaataagcctctcacaggttctggtggacagatctgttccccaggtcactccagtggtctccaggcttccagagaaggctggttgcctcaagctcttctctgcctcataaacggatccagagaaggctggttgccttaagctcttccctgcctcgtgttcctgagaaacggattaatagccctttatccccctgcaccctcctgcaggggatggcactttgagccctctggagccctccccttgctgagccttactctcttcagactttctgaatgtacaatgccgttggttgggatttggggactggaagggaccaaggacactgaccccaagctgtcctgcctagcgtccagcgtcttctaggagggtggggtctgcctgtcctggtgtggttggtttggccctgtttgctgtgactacccccccccctccccgaaccgagggacggctgcctttgtctctgcctcagatgccacctgccccgcccatgctccccatcagcagcatccagactttcaggaagggcagggccagccagtccagaaccgcatccctcagcagggactgataagccatctctcggagggccccctaatacccagtggagtctggttcacaccctggggggtgtgtcactgtgatgggacacgtaggagtccacccttaaaaccagcaccctgtccctcgaggctgccgagtgggtgtgtggactcgggggccttcccacaaaactagcctccggctctgggcccgagacagccgcaggccccagccactgaatgatactggcagcggctggggttttatgaactcctttctggtattttttcccctctatgtacaaatgtatatgttacgtctcaatttttgtgcttaagtaaaaataaaaacattttcagacaa

SEQ ID NO: 24458 - DNA, 1021 bp, Homo sapiens
atcgcgcctgcgccagaaccgctgcctcgctcccggaagtggagggtctacacgaagcgccgctgggtctgggtgcccggaggcagcagcgttcgcggagttcgcccgctggcccccgatcaccatgtcggctttcgacaccaaccccttcgcggacccagtggatgtaaaccccttccaggatccctctgtgacccagctgaccaacgccccgcagggcggcctggcggaattcaaccccttctcagagacaaatgcagcgacaacagttcctgtcacccaactccctgggtcctcacagccagcggttctccagccatcagtggaaccaacccagccgaccccccaggccgtggtgtctgcagcccaggcaggcctgctccggcagcaggaagaactggacaggaaagctgccgagctggaacgcaaggagcgggagctgcagaacactgtagccaacttgcatgtgagacagaacaactggccccctctgccctcgtggtgccctgtgaagccctgcttctatcaggatttctccacagagatccctgccgactaccagcggatatgcaagatgctctactatctgtggatgttgcattcagtgactctgtttctgaacctgcttgcctgcctggcctggttctcgggcaacagctccaagggagtggactttggcctctccatcctgtggtttctgatcttcactccctgtgccttcctttgttggtaccgacccatctataaggcctttaggtccgacaactctttcagcttctttgtgttcttctttgtatttttttgtcaaatagggatctacatcatccagttggttggcatccctggcctgggggacagcggttggattgcagccctgtctacactggataatcattccctggccatatcagtcatcatgatggtggtggctggcttcttcaccctctgtgccgtgctctcagtcttcctcctgcagcgggtgcactccctctaccgacgtcgggtatccatggtaccgacc

SEQ ID NO: 24459 - DNA, 1392 bp, Homo sapiens
tgaggatcccccgcggccccctccagcccagggaattagtcctcctctcttctctccccctcagcctttctctcgcctgccttctgagctgcactttccgtgggtgccttatgtggtggtggttgtgcccagcacagacctggcagggttcttgccgtggctcttcctcctccctcagcgaccagctctccctggaacgggagggacagggaattttttccccctctatgtacaaaaaaaaacaaagctctctttccttctctggtgatggtttggtaggattcttttgtctctggaagcagtgggactgaagttctcttcgtcctgtgcacacacagacacccccacacagttgggatcacaggctgacctgggcccatcccagctggagctttctgccagggtcctgggccttgactcccccaccctgcaggcctggcctgaatctggcttcttagacacagcccagtccttcctgcctgggctgggaataagcctctcacaggttctggtggacagatctgttccccaggtcactccagtggtctccaggcttccagagaaggctggttgcctcaagctcttctctgcctcataaacggatccagagaaggctggttgccttaagctcttccctgcctcgtgttcctgagaaacggattaatagccctttatccccctgcaccctcctgcaggggatggcactttgagccctctggagccctccccttgctgagccttactctcttcagactttctgaatgtacaatgccgttggttgggatttggggactggaagggaccaaggacactgaccccaagctgtcctgcctagcgtccagcgtcttctaggagggtggggtctgcctgtcctggtgtggttggtttggccctgtttgctgtgactacccccccccctccccgaaccgagggacggctgcctttgtctctgcctcagatgccacctgccccgcccatgctccccatcagcagcatccagactttcaggaagggcagggccagccagtccagaaccgcatccctcagcagggactgataagccatctctcggagggccccctaatacccagtggagtctggttcacaccctggggggtgtgtcactgtgatgggacacgtaggagtccacccttaaaaccagcaccctgtccctcgaggctgccgagtgggtgtgtggactcgggggccttcccacaaaactagcctccggctctgggcccgagacagccgcaggccccagccactgaatgatactggcagcggctggggttttatgaactcctttctggtattttttcccctctatgtacaaatgtatatgttacgtctcaatttttgtgcttaagtaaaaataaaaacattttcagacaa

SEQ ID NO: 24460 - DNA, 1164 bp, Homo sapiens
aaggcttgagctacctgcgatcccggcgcagatttttctcggcggcagtaggattcttttgtctctggaagcagtgggactgaagttctcttcgtcctgtgcacacacagacacccccacacagttgggatcacaggctgacctgggcccatcccagctggagctttctgccagggtcctgggccttgactcccccaccctgcaggcctggcctgaatctggcttcttagacacagcccagtccttcctgcctgggctgggaataagcctctcacaggttctggtggacagatctgttccccaggtcactccagtggtctccaggcttccagagaaggctggttgcctcaagctcttctctgcctcataaacggatccagagaaggctggttgccttaagctcttccctgcctcgtgttcctgagaaacggattaatagccctttatccccctgcaccctcctgcaggggatggcactttgagccctctggagccctccccttgctgagccttactctcttcagactttctgaatgtacaatgccgttggttgggatttggggactggaagggaccaaggacactgaccccaagctgtcctgcctagcgtccagcgtcttctaggagggtggggtctgcctgtcctggtgtggttggtttggccctgtttgctgtgactacccccccccctccccgaaccgagggacggctgcctttgtctctgcctcagatgccacctgccccgcccatgctccccatcagcagcatccagactttcaggaagggcagggccagccagtccagaaccgcatccctcagcagggactgataagccatctctcggagggccccctaatacccagtggagtctggttcacaccctggggggtgtgtcactgtgatgggacacgtaggagtccacccttaaaaccagcaccctgtccctcgaggctgccgagtgggtgtgtggactcgggggccttcccacaaaactagcctccggctctgggcccgagacagccgcaggccccagccactgaatgatactggcagcggctggggttttatgaactcctttctggtattttttcccctctatgtacaaatgtatatgttacgtctcaatttttgtgcttaagtaaaaataaaaacattttcagacaa

SEQ ID NO: 24461 - DNA, 1195 bp, Homo sapiens
ggttggtaggattcttcagtcccactgcttccagagacaaaagaatcctaccaaaccatcaccagagaaggaaagagagcaggattcttttgtctctggaagcagtgggactgaagttctcttcgtcctgtgcacacacagacacccccacacagttgggatcacaggctgacctgggcccatcccagctggagctttctgccagggtcctgggccttgactcccccaccctgcaggcctggcctgaatctggcttcttagacacagcccagtccttcctgcctgggctgggaataagcctctcacaggttctggtggacagatctgttccccaggtcactccagtggtctccaggcttccagagaaggctggttgcctcaagctcttctctgcctcataaacggatccagagaaggctggttgccttaagctcttccctgcctcgtgttcctgagaaacggattaatagccctttatccccctgcaccctcctgcaggggatggcactttgagccctctggagccctccccttgctgagccttactctcttcagactttctgaatgtacaatgccgttggttgggatttggggactggaagggaccaaggacactgaccccaagctgtcctgcctagcgtccagcgtcttctaggagggtggggtctgcctgtcctggtgtggttggtttggccctgtttgctgtgactacccccccccctccccgaaccgagggacggctgcctttgtctctgcctcagatgccacctgccccgcccatgctccccatcagcagcatccagactttcaggaagggcagggccagccagtccagaaccgcatccctcagcagggactgataagccatctctcggagggccccctaatacccagtggagtctggttcacaccctggggggtgtgtcactgtgatgggacacgtaggagtccacccttaaaaccagcaccctgtccctcgaggctgccgagtgggtgtgtggactcgggggccttcccacaaaactagcctccggctctgggcccgagacagccgcaggccccagccactgaatgatactggcagcggctggggttttatgaactcctttctggtattttttcccctctatgtacaaatgtatatgttacgtctcaatttttgtgcttaagtaaaaataaaaacattttcagacaa

SEQ ID NO: 24462 - DNA, 3639 bp, Homo sapiens
cagagagcaaatcccatttattggaatttcactgacaacaaattgagaggaaggcttccccctcccctgaaacatgccatcctctctgccctcagggctcagcacagggataagacccccactccgcatgtccccagagggcagcactccaggggggtgggggggaggggaggggtgctctacgccaggctggggagctgggacaggagggaagacgtgcaccctcacctcttggctcaatccctctccccgggacctggtgctgcccccagtccctggggtgggctggcagacagggctcatgcaacaatgagtagacaggaggtggcacggaaacgtggccttggtgccccttggcgggggcgggaggactaaaggggccatgctgtggccacagcgggtccaaatggaagtatctgcagtgtacatacaggagggttggagagaggcatccttttccctaggctgtgcctggggacaagagagaggggaagtacagctggcactgccgtgccaggggcagggtccaggccagccgtgccacctgagcgggcacagcgagctggagctcggctactccttggcgcggccaatgatggtgaggatgtacaggaagatgttgatgatgtctgtgtacaggttcagcgcagcaaacacatactcttctgggctcagggacagctgcttgttccccagcagcagctgggtgtccactgcgaggaagcaggtgaagagcagagcgcccagtgaggcgtacacgatctccaggatgcggttccggatgaagatgcagagaatggcgaagatgaagagcaccaccatgctcaccaggagcacgcccatgcatgaggtgaagtcgtagcgggtctgcatggagaagatgacgacggtgaagcagacggctgtggtgatgcccacggccatgatgactgcctcggtgttgtagaagctggcgatcatccccaccatgtacgacaggctggcggtcaggaccgacagtgcaacaaggttccaggggtgctttcgccggaagtccccacaacagctgaggacgatgagagagatgaagaagacagcataggagacatagtaggtccagacattctcccggacaaagcccttcacctccgcaacaaaagtgaacacagacaccgtggacagggtcaccgacagctgcaaggtcagcactaggaacaccttgcggatgaaggcctgtcggatgctcttgtcatcccagttggtggcagggaagtcctggttgtcatagtaggatgggggaccctcctcctggtagtttccatgctggggtgagtcagggtcttgtcctgggaagacctgtggctgtccataggggttgggggggaaggggctctggggatatggcccctgggggtagcccccttgggggtaggggccctgtgggtagccctcttgtgggtaggggccctgtgggtagcccccttgggggtagggaccctgtgggtagcccccttgggggtaggggctggggccatgggggtaccctggctgaccgtagggggagggctggaaagggggctgtgggtaaggggccccagggtagggaggctgagcataggggggcatgggtggctggggcccccccggatatccagggttggggggaggatagttgtccccagacaccaaaaaactcttttcatgggacatggcctcgggttccgcggtccgccccggtggccgggcgccgcaggccggtacgcacggtgtccgctgcgcggccgcgcggtgatggccgatgcgcccgcacccgcacccgctcggagcgactcttcagggaggtggcaggaaaggcttggaacagctgccggaggtgacggagcggcggccccgcccggtgcgctggaggtcgaagcttccaggtagcggcccgcagagcctgacccaggctctggacatcctgagcccaagtcccccacactcagtgcagtgatgagtgcggaagtgaaggtgacagggcagaaccaggagcaatttctgctcctagccaagtcggccaagggggcagcgctggccacactcatccatcaggtgctggaggcccctggtgtctacgtgtttggagaactgctggacatgcccaatgttagagagctggctgagagtgactttgcctctaccttccggctgctcacagtgtttgcttatgggacatacgctgactacttagctgaagcccggaatcttcctccactaacagaggctcagaagaataagcttcgacacctctcagttgtcaccctggctgctaaagtaaagtgtatcccatatgcagtgttgctggaggctcttgccctgcgtaatgtgcggcagctggaagaccttgtgattgaggctgtgtatgctgacgtgcttcgtggctccctggaccagcgcaaccagcggctcgaggttgactacagcatcgggcgggacatccagcgccaggacctcagtgccattgcccgaaccctgcaggaatggtgtgtgggctgtgaggtcgtgctgtcaggcattgaggagcaggtgagccgtgccaaccaacacaaggagcagcagctgggcctgaagcagcagattgagagtgaggttgccaaccttaaaaaaaccattaaagttacgacggcagcagcagccgcagccacatctcaggaccctgagcaacacctgactgagctgagggaaccagctcctggcaccaaccagcgccagcccagcaagaaagcctcaaagggcaaggggctccgagggagcgccaagatttggtccaagtcgaattgaaagaactgtcgtttcctccctggggatgtggggtcccagctgcctgcctgcctcttaggagtcctcagagagccttctgtgcccctggccagctgataatcctaggttcatgacccttcacctcccctaaccccaaacatagatcacaccttctctagggaggagtcaaatgtaggtcatgtttttgttggtactttctgttttttgtgacttcatgtgttccattgctccccgctgccatgctctctcccttgtttccttaagagctcagcatctgtccctgttcattacatgtcattgagtaggtgggtagccctgatgggggtcgctctgtctggagcataacccacaggcgttttttctgccaccccatccctgcatgcctgatccccagttcctataccctacccctgacctattgagcagcctctgaagagccatagggcccccacctttactcacaccctgagaattctgggagccagtctgccatgccaggagtcactggacatgttcatcctagaatcctgtcacactacagtcatttcttttcctctctctggcccttgggtcctgggaatgctgctgcttcaaccccagagcctaagaatggcagccgtttcttaacatgttgagagatgattctttcttggccctggccatctcgggaagcttgatggcaatcctggaagggtttaatctccttttgtgagtttggtggggaagggaagggtatatagattgtattaaaaaaaaaaaggtatatatgcatatatctatatataatatgacgcagaaataaatctatgagaaatctatctacaaactaccctgaactgg

SEQ ID NO: 24463 - DNA, 1837 bp, Homo sapiens
cgccatagagtttagtggccagaagcgactcttcagggaggtggcaggaaaggcttggaacagctgccggaggtgacggagcggcggccccgcccggtgcgctggaggtcgaagcttccaggtagcggcccgcagagcctgacccaggctctggacatcctgagcccaagtcccccacactcagtgcagtgatgagtgcggaagtgaaggtgacagggcagaaccaggagcaatttctgctcctagccaagtcggccaagggggcagcgctggccacactcatccatcaggtgctggaggcccctggtgtctacgtgtttggagaactgctggacatgcccaatgttagagagctggctgagagtgactttgcctctaccttccggctgctcacagtgtttgcttatgggacatacgctgactacttagctgaagcccggaatcttcctccactaacagaggctcagaagaataagcttcgacacctctcagttgtcaccctggctgctaaagtaaagtgtatcccatatgcagtgttgctggaggctcttgccctgcgtaatgtgcggcagctggaagaccttgtgattgaggctgtgtatgctgacgtgcttcgtggctccctggaccagcgcaaccagcggctcgaggttgactacagcatcgggcgggacatccagcgccaggacctcagtgccattgcccgaaccctgcaggaatggtgtgtgggctgtgaggtcgtgctgtcaggcattgaggagcaggtgagccgtgccaaccaacacaaggagcagcagctgggcctgaagcagcagattgagagtgaggttgccaaccttaaaaaaaccattaaagttacgacggcagcagcagccgcagccacatctcaggaccctgagcaacacctgactgagctgagggaaccagctcctggcaccaaccagcgccagcccagcaagaaagcctcaaagggcaaggggctccgagggagcgccaagatttggtccaagtcgaattgaaagaactgtcgtttcctccctggggatgtggggtcccagctgcctgcctgcctcttaggagtcctcagagagccttctgtgcccctggccagctgataatcctaggttcatgacccttcacctcccctaaccccaaacatagatcacaccttctctagggaggagtcaaatgtaggtcatgtttttgttggtactttctgttttttgtgacttcatgtgttccattgctccccgctgccatgctctctcccttgtttccttaagagctcagcatctgtccctgttcattacatgtcattgagtaggtgggtagccctgatgggggtcgctctgtctggagcataacccacaggcgttttttctgccaccccatccctgcatgcctgatccccagttcctataccctacccctgacctattgagcagcctctgaagagccatagggcccccacctttactcacaccctgagaattctgggagccagtctgccatgccaggagtcactggacatgttcatcctagaatcctgtcacactacagtcatttcttttcctctctctggcccttgggtcctgggaatgctgctgcttcaaccccagagcctaagaatggcagccgtttcttaacatgttgagagatgattctttcttggccctggccatctcgggaagcttgatggcaatcctggaagggtttaatctccttttgtgagtttggtggggaagggaagggtatatagattgtattaaaaaaaaaaaggtatatatgcatatatctatatataatatgacgcagaaataaatctatgagaaatcta

SEQ ID NO: 24464 - DNA, 2757 bp, Homo sapiens
cgccatagagtttagtggccagaagcgactcttcagggaggtggcaggaaaggcttggaacagctgccggaggtgacggagcggcggccccgcccggtgcgctggaggtcgaagcttccaggtagcggcccgcagagcctgacccaggctctggacatcctgagcccaagtcccccacactcagtgcagtgatgagtgcggaagtgaaggtgacagggcagaaccaggagcaatttctgctcctagccaagtcggccaagggggcagcgctggccacactcatccatcaggtgctggaggcccctggtgtctacgtgtttggagaactgctggacatgcccaatgttagagagctggctgagagtgactttgcctctaccttccggctgctcacagtgtttgcttatgggacatacgctgactacttagctgaagcccggaatcttcctccactaacagaggctcagaagaataagcttcgacacctctcagttgtcaccctggctgctaaagtaaagtgtatcccatatgcagtgttgctggaggctcttgccctgcgtaatgtgcggcagctggaagaccttgtgattgaggctgtgtatgctgacgtgcttcgtggctccctggaccagcgcaaccagcggctcgaggttgactacagcatcgggcgggacatccagcgccaggacctcagtgccattgcccgaaccctgcaggaatggtgtgtgggctgtgaggtcgtgctgtcaggcattgaggagcaggtgagccgtgccaaccaacacaaggagcagcagctgggcctgaagcagcagattgagagtgaggttgccaaccttaaaaaaaccattaaagttacgacggcagcagcagccgcagccacatctcaggaccctgagcaacacctgactgagctgagggaaccagctcctggcaccaaccagcgccagcccagcaagaaagcctcaaagggcaaggggctccgagggagcgccaagatttggtccaagtcgaattgaaagaactgtcgtttcctccctggggatgtggggtcccagctgcctgcctgcctcttaggagtcctcagagagccttctgtgcccctggccagctgataatcctaggttcatgacccttcacctcccctaaccccaaacatagatcacaccttctctagggaggagtcaaatgtaggtcatgtttttgttggtactttctgttttttgtgacttcatgtgttccattgctccccgctgccatgctctctcccttgtttccttaagagctcagcatctgtccctgttcattacatgtcattgagtaggtgggtagccctgatgggggtcgctctgtctggagcataacccacaggcgttttttctgccaccccatccctgcatgcctgatccccagttcctataccctacccctgacctattgagcagcctctgaagagccatagggcccccacctttactcacaccctgagaattctgggagccagtctgccatgccaggagtcactggacatgttcatcctagaatcctgtcacactacagtcatttcttttcctctctctggcccttgggtcctgggaatgctgctgcttcaaccccagagcctaagaatggcagccgtttcttaacatgttgagagatgattctttcttggccctggccatctcgggaagcttgatggcaatcctggaagggtttaatctccttttgtgagtttggtggggaagggaagggtatatagattgtattaaaaaaaaaaaggtatatatgcatatatctatatataatatgacgcagaaataaatctatgagaaatctaaaaaaaaaaaaaaaaaaaaaaaaaacaaaaaaaaaaacaccaaaaagcaaaaaaacaaaaaagcgggggcgccggccaataagaacatcgacacaggggcgacacacagcgaacagcacacacccagagacacaggtaggcgcataagaaggggcgcccaacaacgagagcagcgcctgaacaaacaaacagcagagcaaggcgcgcgcgcacaagcgtacacagaccacacaaacggcaccaccaccgggccacgacagggcggagacaccagcgcgcagccggggacggaccacagacacagaacagagcggggaggggacgaacaaacagacgagggcgcaacacaacgacccgcgcgccggacacgatacgaagaccgacgacgtacatctgagaggaagggaacagcacacgacgcgcactactccgcggggggcggtacaagccgaggcagcgggcggaagagcgcaacaaggagagcccagagacacagccgatcaacgcaggagcccggcagaccgcagagaacacgacccacacgaccaacagcacagagcagaagaagataacacccgacagcccaccacaggacagagacacgacaactccctgcccacgctgcgcggaggggagcagtacgcagagagaaacacgcgaagccaagaaccccggccgaagacacacacgacgatcgagagaaccgacggcaacgcagacaccgaaggcacgcaggccacgcagcaaggactaccacaacgctgccacagaccagacagatgggcgacgcgagccgcaccgacggacaggcacgcaaggaacaacacaaccacggcagagctacagacccaaggaagcgacgcaccagtcacacgccacgcacagcgtctacaaccacagcgacccaagaggacgccgcc

SEQ ID NO: 24465 - DNA, 3688 bp, Homo sapiens
cagagagcaaatcccatttattggaatttcactgacaacaaattgagaggaaggcttccccctcccctgaaacatgccatcctctctgccctcagggctcagcacagggataagacccccactccgcatgtccccagagggcagcactccaggggggtgggggggaggggaggggtgctctacgccaggctggggagctgggacaggagggaagacgtgcaccctcacctcttggctcaatccctctccccgggacctggtgctgcccccagtccctggggtgggctggcagacagggctcatgcaacaatgagtagacaggaggtggcacggaaacgtggccttggtgccccttggcgggggcgggaggactaaaggggccatgctgtggccacagcgggtccaaatggaagtatctgcagtgtacatacaggagggttggagagaggcatccttttccctaggctgtgcctggggacaagagagaggggaagtacagctggcactgccgtgccaggggcagggtccaggccagccgtgccacctgagcgggcacagcgagctggagctcggctactccttggcgcggccaatgatggtgaggatgtacaggaagatgttgatgatgtctgtgtacaggttcagcgcagcaaacacatactcttctgggctcagggacagctgcttgttccccagcagcagctgggtgtccactgcgaggaagcaggtgaagagcagagcgcccagtgaggcgtacacgatctccaggatgcggttccggatgaagatgcagagaatggcgaagatgaagagcaccaccatgctcaccaggagcacgcccatgcatgaggtgaagtcgtagcgggtctgcatggagaagatgacgacggtgaagcagacggctgtggtgatgcccacggccatgatgactgcctcggtgttgtagaagctggcgatcatccccaccatgtacgacaggctggcggtcaggaccgacagtgcaacaaggttccaggggtgctttcgccggaagtccccacaacagctgaggacgatgagagagatgaagaagacagcataggagacatagtaggtccagacattctcccggacaaagcccttcacctccgcaacaaaagtgaacacagacaccgtggacagggtcaccgacagctgcaaggtcagcactaggaacaccttgcggatgaaggcctgtcggatgctcttgtcatcccagttggtggcagggaagtcctggttgtcatagtaggatgggggaccctcctcctggtagtttccatgctggggtgagtcagggtcttgtcctgggaagacctgtggctgtccataggggttgggggggaaggggctctggggatatggcccctgggggtagcccccttgggggtaggggccctgtgggtagccctcttgtgggtaggggccctgtgggtagcccccttgggggtagggaccctgtgggtagcccccttgggggtaggggctggggccatgggggtaccctggctgaccgtagggggagggctggaaagggggctgtgggtaaggggccccagggtagggaggctgagcataggggggcatgggtggctggggcccccccggatatccagggttggggggaggatagttgtccccagacaccaaaaaactcttttcatgggacatggcctcgggttccgcggtccgccccggtggccgggcgccgcaggccggtacgcacggtgtccgctgcgcggccgcgcggtgatggccgatgcgcccgcacccgcacccgctcggagcgactcttcagggaggtggcaggaaaggcttggaacagctgccggaggtgacggagcggcggccccgcccggtgcgctggaggtcgaagcttccaggtagcggcccgcagagcctgacccagggtacgacgaagcagtcggcgggagcccacggtcgctgggcggtgtctttaagggagggggcggagccacgtctctggacatcctgagcccaagtcccccacactcagtgcagtgatgagtgcggaagtgaaggtgacagggcagaaccaggagcaatttctgctcctagccaagtcggccaagggggcagcgctggccacactcatccatcaggtgctggaggcccctggtgtctacgtgtttggagaactgctggacatgcccaatgttagagagctggctgagagtgactttgcctctaccttccggctgctcacagtgtttgcttatgggacatacgctgactacttagctgaagcccggaatcttcctccactaacagaggctcagaagaataagcttcgacacctctcagttgtcaccctggctgctaaagtaaagtgtatcccatatgcagtgttgctggaggctcttgccctgcgtaatgtgcggcagctggaagaccttgtgattgaggctgtgtatgctgacgtgcttcgtggctccctggaccagcgcaaccagcggctcgaggttgactacagcatcgggcgggacatccagcgccaggacctcagtgccattgcccgaaccctgcaggaatggtgtgtgggctgtgaggtcgtgctgtcaggcattgaggagcaggtgagccgtgccaaccaacacaaggagcagcagctgggcctgaagcagcagattgagagtgaggttgccaaccttaaaaaaaccattaaagttacgacggcagcagcagccgcagccacatctcaggaccctgagcaacacctgactgagctgagggaaccagctcctggcaccaaccagcgccagcccagcaagaaagcctcaaagggcaaggggctccgagggagcgccaagatttggtccaagtcgaattgaaagaactgtcgtttcctccctggggatgtggggtcccagctgcctgcctgcctcttaggagtcctcagagagccttctgtgcccctggccagctgataatcctaggttcatgacccttcacctcccctaaccccaaacatagatcacaccttctctagggaggagtcaaatgtaggtcatgtttttgttggtactttctgttttttgtgacttcatgtgttccattgctccccgctgccatgctctctcccttgtttccttaagagctcagcatctgtccctgttcattacatgtcattgagtaggtgggtagccctgatgggggtcgctctgtctggagcataacccacaggcgttttttctgccaccccatccctgcatgcctgatccccagttcctataccctacccctgacctattgagcagcctctgaagagccatagggcccccacctttactcacaccctgagaattctgggagccagtctgccatgccaggagtcactggacatgttcatcctagaatcctgtcacactacagtcatttcttttcctctctctggcccttgggtcctgggaatgctgctgcttcaaccccagagcctaagaatggcagccgtttcttaacatgttgagagatgattctttcttggccctggccatctcgggaagcttgatggcaatcctggaagggtttaatctccttttgtgagtttggtggggaagggaagggtatatagattgtattaaaaaaaaaaaggtatatatgcatatatctatatataatatgacgcagaaataaatctatgagaaatcta

SEQ ID NO: 24466 - DNA, 1729 bp, Homo sapiens
gtgcggggcagcaatggagagctgagggagcgtcgtcaggctctggacatcctgagcccaagtcccccacactcagtgcagtgatgagtgcggaagtgaaggtgacagggcagaaccaggagcaatttctgctcctagccaagtcggccaagggggcagcgctggccacactcatccatcaggtgctggaggcccctggtgtctacgtgtttggagaactgctggacatgcccaatgttagagagctggctgagagtgactttgcctctaccttccggctgctcacagtgtttgcttatgggacatacgctgactacttagctgaagcccggaatcttcctccactaacagaggctcagaagaataagcttcgacacctctcagttgtcaccctggctgctaaagtaaagtgtatcccatatgcagtgttgctggaggctcttgccctgcgtaatgtgcggcagctggaagaccttgtgattgaggctgtgtatgctgacgtgcttcgtggctccctggaccagcgcaaccagcggctcgaggttgactacagcatcgggcgggacatccagcgccaggacctcagtgccattgcccgaaccctgcaggaatggtgtgtgggctgtgaggtcgtgctgtcaggcattgaggagcaggtgagccgtgccaaccaacacaaggagcagcagctgggcctgaagcagcagattgagagtgaggttgccaaccttaaaaaaaccattaaagttacgacggcagcagcagccgcagccacatctcaggaccctgagcaacacctgactgagctgagggaaccagctcctggcaccaaccagcgccagcccagcaagaaagcctcaaagggcaaggggctccgagggagcgccaagatttggtccaagtcgaattgaaagaactgtcgtttcctccctggggatgtggggtcccagctgcctgcctgcctcttaggagtcctcagagagccttctgtgcccctggccagctgataatcctaggttcatgacccttcacctcccctaaccccaaacatagatcacaccttctctagggaggagtcaaatgtaggtcatgtttttgttggtactttctgttttttgtgacttcatgtgttccattgctccccgctgccatgctctctcccttgtttccttaagagctcagcatctgtccctgttcattacatgtcattgagtaggtgggtagccctgatgggggtcgctctgtctggagcataacccacaggcgttttttctgccaccccatccctgcatgcctgatccccagttcctataccctacccctgacctattgagcagcctctgaagagccatagggcccccacctttactcacaccctgagaattctgggagccagtctgccatgccaggagtcactggacatgttcatcctagaatcctgtcacactacagtcatttcttttcctctctctggcccttgggtcctgggaatgctgctgcttcaaccccagagcctaagaatggcagccgtttcttaacatgttgagagatgattctttcttggccctggccatctcgggaagcttgatggcaatcctggaagggtttaatctccttttgtgagtttggtggggaagggaagggtatatagattgtattaaaaaaaaaaaggtatatatgcatatatctatatataatatgacgcagaaataaatctatgagaaatcta

SEQ ID NO: 24467 - DNA, 3541 bp, Homo sapiens
cagagagcaaatcccatttattggaatttcactgacaacaaattgagaggaaggcttccccctcccctgaaacatgccatcctctctgccctcagggctcagcacagggataagacccccactccgcatgtccccagagggcagcactccaggggggtgggggggaggggaggggtgctctacgccaggctggggagctgggacaggagggaagacgtgcaccctcacctcttggctcaatccctctccccgggacctggtgctgcccccagtccctggggtgggctggcagacagggctcatgcaacaatgagtagacaggaggtggcacggaaacgtggccttggtgccccttggcgggggcgggaggactaaaggggccatgctgtggccacagcgggtccaaatggaagtatctgcagtgtacatacaggagggttggagagaggcatccttttccctaggctgtgcctggggacaagagagaggggaagtacagctggcactgccgtgccaggggcagggtccaggccagccgtgccacctgagcgggcacagcgagctggagctcggctactccttggcgcggccaatgatggtgaggatgtacaggaagatgttgatgatgtctgtgtacaggttcagcgcagcaaacacatactcttctgggctcagggacagctgcttgttccccagcagcagctgggtgtccactgcgaggaagcaggtgaagagcagagcgcccagtgaggcgtacacgatctccaggatgcggttccggatgaagatgcagagaatggcgaagatgaagagcaccaccatgctcaccaggagcacgcccatgcatgaggtgaagtcgtagcgggtctgcatggagaagatgacgacggtgaagcagacggctgtggtgatgcccacggccatgatgactgcctcggtgttgtagaagctggcgatcatccccaccatgtacgacaggctggcggtcaggaccgacagtgcaacaaggttccaggggtgctttcgccggaagtccccacaacagctgaggacgatgagagagatgaagaagacagcataggagacatagtaggtccagacattctcccggacaaagcccttcacctccgcaacaaaagtgaacacagacaccgtggacagggtcaccgacagctgcaaggtcagcactaggaacaccttgcggatgaaggcctgtcggatgctcttgtcatcccagttggtggcagggaagtcctggttgtcatagtaggatgggggaccctcctcctggtagtttccatgctggggtgagtcagggtcttgtcctgggaagacctgtggctgtccataggggttgggggggaaggggctctggggatatggcccctgggggtagcccccttgggggtaggggccctgtgggtagccctcttgtgggtaggggccctgtgggtagcccccttgggggtagggaccctgtgggtagcccccttgggggtaggggctggggccatgggggtaccctggctgaccgtagggggagggctggaaagggggctgtgggtaaggggccccagggtagggaggctgagcataggggggcatgggtggctggggcccccccggatatccagggttggggggaggatagttgtccccagacaccaaaaaactcttttcatgggacatggcctcgggttccgcggtccgccccggtggccgggcgccgcaggccggtacgcacggtgtccgctgcgcggccgcgcggtgatggccgatgcgcccgcacccgcacccgctcggagcgactcttcagggaggtggcaggaaaggcttggaacagctgccggaggtgacggagcggcggccccgcccggtgcgctggaggtcgaagcttccaggtagcggcccgcagagcctgacccaggctctggacatcctgagcccaagtcccccacactcagtgcagtgatgagtgcggaagtgaaggtgacagggcagaaccaggagcaatttctgctcctagccaagtcggccaagggggcagcgctggccacactcatccatcaggtgctggaggcccctggtgtctacgtgtttggagaactgctggacatgcccaatgttagagagctgaagcccggaatcttcctccactaacagaggctcagaagaataagcttcgacacctctcagttgtcaccctggctgctaaagtaaagtgtatcccatatgcagtgttgctggaggctcttgccctgcgtaatgtgcggcagctggaagaccttgtgattgaggctgtgtatgctgacgtgcttcgtggctccctggaccagcgcaaccagcggctcgaggttgactacagcatcgggcgggacatccagcgccaggacctcagtgccattgcccgaaccctgcaggaatggtgtgtgggctgtgaggtcgtgctgtcaggcattgaggagcaggtgagccgtgccaaccaacacaaggagcagcagctgggcctgaagcagcagattgagagtgaggttgccaaccttaaaaaaaccattaaagttacgacggcagcagcagccgcagccacatctcaggaccctgagcaacacctgactgagctgagggaaccagctcctggcaccaaccagcgccagcccagcaagaaagcctcaaagggcaaggggctccgagggagcgccaagatttggtccaagtcgaattgaaagaactgtcgtttcctccctggggatgtggggtcccagctgcctgcctgcctcttaggagtcctcagagagccttctgtgcccctggccagctgataatcctaggttcatgacccttcacctcccctaaccccaaacatagatcacaccttctctagggaggagtcaaatgtaggtcatgtttttgttggtactttctgttttttgtgacttcatgtgttccattgctccccgctgccatgctctctcccttgtttccttaagagctcagcatctgtccctgttcattacatgtcattgagtaggtgggtagccctgatgggggtcgctctgtctggagcataacccacaggcgttttttctgccaccccatccctgcatgcctgatccccagttcctataccctacccctgacctattgagcagcctctgaagagccatagggcccccacctttactcacaccctgagaattctgggagccagtctgccatgccaggagtcactggacatgttcatcctagaatcctgtcacactacagtcatttcttttcctctctctggcccttgggtcctgggaatgctgctgcttcaaccccagagcctaagaatggcagccgtttcttaacatgttgagagatgattctttcttggccctggccatctcgggaagcttgatggcaatcctggaagggtttaatctccttttgtgagtttggtggggaagggaagggtatatagattgtattaaaaaaaaaaaggtatatatgcatatatctatatataatatgacgcagaaataaatctatgagaaatcta

SEQ ID NO: 24468 - DNA, 3612 bp, Homo sapiens
cagagagcaaatcccatttattggaatttcactgacaacaaattgagaggaaggcttccccctcccctgaaacatgccatcctctctgccctcagggctcagcacagggataagacccccactccgcatgtccccagagggcagcactccaggggggtgggggggaggggaggggtgctctacgccaggctggggagctgggacaggagggaagacgtgcaccctcacctcttggctcaatccctctccccgggacctggtgctgcccccagtccctggggtgggctggcagacagggctcatgcaacaatgagtagacaggaggtggcacggaaacgtggccttggtgccccttggcgggggcgggaggactaaaggggccatgctgtggccacagcgggtccaaatggaagtatctgcagtgtacatacaggagggttggagagaggcatccttttccctaggctgtgcctggggacaagagagaggggaagtacagctggcactgccgtgccaggggcagggtccaggccagccgtgccacctgagcgggcacagcgagctggagctcggctactccttggcgcggccaatgatggtgaggatgtacaggaagatgttgatgatgtctgtgtacaggttcagcgcagcaaacacatactcttctgggctcagggacagctgcttgttccccagcagcagctgggtgtccactgcgaggaagcaggtgaagagcagagcgcccagtgaggcgtacacgatctccaggatgcggttccggatgaagatgcagagaatggcgaagatgaagagcaccaccatgctcaccaggagcacgcccatgcatgaggtgaagtcgtagcgggtctgcatggagaagatgacgacggtgaagcagacggctgtggtgatgcccacggccatgatgactgcctcggtgttgtagaagctggcgatcatccccaccatgtacgacaggctggcggtcaggaccgacagtgcaacaaggttccaggggtgctttcgccggaagtccccacaacagctgaggacgatgagagagatgaagaagacagcataggagacatagtaggtccagacattctcccggacaaagcccttcacctccgcaacaaaagtgaacacagacaccgtggacagggtcaccgacagctgcaaggtcagcactaggaacaccttgcggatgaaggcctgtcggatgctcttgtcatcccagttggtggcagggaagtcctggttgtcatagtaggatgggggaccctcctcctggtagtttccatgctggggtgagtcagggtcttgtcctgggaagacctgtggctgtccataggggttgggggggaaggggctctggggatatggcccctgggggtagcccccttgggggtaggggccctgtgggtagccctcttgtgggtaggggccctgtgggtagcccccttgggggtagggaccctgtgggtagcccccttgggggtaggggctggggccatgggggtaccctggctgaccgtagggggagggctggaaagggggctgtgggtaaggggccccagggtagggaggctgagcataggggggcatgggtggctggggcccccccggatatccagggttggggggaggatagttgtccccagacaccaaaaaactcttttcatgggacatggcctcgggttccgcggtccgccccggtggccgggcgccgcaggccggtacgcacggtgtccgctgcgcggccgcgcggtgatggccgatgcgcccgcacccgcacccgctcggagcgactcttcagggaggtggcaggaaaggcttggaacagctgccggaggtgacggagcggcggccccgcccggtgcgctggaggtcgaagcttccaggtagcggcccgcagagcctgacccagggtacgacgaagcagtcggcgggagcccacggtcgctgggcggtgtctttaagggagggggcggagccacgtctctggacatcctgagcccaagtcccccacactcagtgcagtgatgagtgcggaagtgaaggtgacagggcagaaccaggagcaatttctgctcctagccaagtcggccaagggggcagcgctggccacactcatccatcaggtgctggaggcccctggtgtctacgtgtttggagaactgctggacatgcccaatgttagagagctgaagcccggaatcttcctccactaacagaggctcagaagaataagcttcgacacctctcagttgtcaccctggctgctaaagtaaagtgtatcccatatgcagtgttgctggaggctcttgccctgcgtaatgtgcggcagctggaagaccttgtgattgaggctgtgtatgctgacgtgcttcgtggctccctggaccagcgcaaccagcggctcgaggttgactacagcatcgggcgggacatccagcgccaggacctcagtgccattgcccgaaccctgcaggaatggtgtgtgggctgtgaggtcgtgctgtcaggcattgaggagcaggtgagccgtgccaaccaacacaaggagcagcagctgggcctgaagcagcagattgagagtgaggttgccaaccttaaaaaaaccattaaagttacgacggcagcagcagccgcagccacatctcaggaccctgagcaacacctgactgagctgagggaaccagctcctggcaccaaccagcgccagcccagcaagaaagcctcaaagggcaaggggctccgagggagcgccaagatttggtccaagtcgaattgaaagaactgtcgtttcctccctggggatgtggggtcccagctgcctgcctgcctcttaggagtcctcagagagccttctgtgcccctggccagctgataatcctaggttcatgacccttcacctcccctaaccccaaacatagatcacaccttctctagggaggagtcaaatgtaggtcatgtttttgttggtactttctgttttttgtgacttcatgtgttccattgctccccgctgccatgctctctcccttgtttccttaagagctcagcatctgtccctgttcattacatgtcattgagtaggtgggtagccctgatgggggtcgctctgtctggagcataacccacaggcgttttttctgccaccccatccctgcatgcctgatccccagttcctataccctacccctgacctattgagcagcctctgaagagccatagggcccccacctttactcacaccctgagaattctgggagccagtctgccatgccaggagtcactggacatgttcatcctagaatcctgtcacactacagtcatttcttttcctctctctggcccttgggtcctgggaatgctgctgcttcaaccccagagcctaagaatggcagccgtttcttaacatgttgagagatgattctttcttggccctggccatctcgggaagcttgatggcaatcctggaagggtttaatctccttttgtgagtttggtggggaagggaagggtatatagattgtattaaaaaaaaaaaggtatatatgcatatatctatatataatatgacgcagaaataaatctatgagaaatcta

SEQ ID NO: 24469 - DNA, 1696 bp, Homo sapiens
gtgcggggcagcaatggagagctgagggagcgtcgtcagggtggacaccatgcgacacccatttctcctttgcatcctgtgtcctctggacatcctgagcccaagtcccccacactcagtgcagtgatgagtgcggaagtgaaggtgacagggcagaaccaggagcaatttctgctcctagccaagtcggccaagggggcagcgctggccacactcatccatcaggtgctggaggcccctggtgtctacgtgtttggagaactgctggacatgcccaatgttagagagctgaagcccggaatcttcctccactaacagaggctcagaagaataagcttcgacacctctcagttgtcaccctggctgctaaagtaaagtgtatcccatatgcagtgttgctggaggctcttgccctgcgtaatgtgcggcagctggaagaccttgtgattgaggctgtgtatgctgacgtgcttcgtggctccctggaccagcgcaaccagcggctcgaggttgactacagcatcgggcgggacatccagcgccaggacctcagtgccattgcccgaaccctgcaggaatggtgtgtgggctgtgaggtcgtgctgtcaggcattgaggagcaggtgagccgtgccaaccaacacaaggagcagcagctgggcctgaagcagcagattgagagtgaggttgccaaccttaaaaaaaccattaaagttacgacggcagcagcagccgcagccacatctcaggaccctgagcaacacctgactgagctgagggaaccagctcctggcaccaaccagcgccagcccagcaagaaagcctcaaagggcaaggggctccgagggagcgccaagatttggtccaagtcgaattgaaagaactgtcgtttcctccctggggatgtggggtcccagctgcctgcctgcctcttaggagtcctcagagagccttctgtgcccctggccagctgataatcctaggttcatgacccttcacctcccctaaccccaaacatagatcacaccttctctagggaggagtcaaatgtaggtcatgtttttgttggtactttctgttttttgtgacttcatgtgttccattgctccccgctgccatgctctctcccttgtttccttaagagctcagcatctgtccctgttcattacatgtcattgagtaggtgggtagccctgatgggggtcgctctgtctggagcataacccacaggcgttttttctgccaccccatccctgcatgcctgatccccagttcctataccctacccctgacctattgagcagcctctgaagagccatagggcccccacctttactcacaccctgagaattctgggagccagtctgccatgccaggagtcactggacatgttcatcctagaatcctgtcacactacagtcatttcttttcctctctctggcccttgggtcctgggaatgctgctgcttcaaccccagagcctaagaatggcagccgtttcttaacatgttgagagatgattctttcttggccctggccatctcgggaagcttgatggcaatcctggaagggtttaatctccttttgtgagtttggtggggaagggaagggtatatagattgtattaaaaaaaaaaaggtatatatgcatatatctatatataatatgacgcagaaataaatctatgagaaatcta

SEQ ID NO: 24470 - DNA, 2016 bp, Homo sapiens
cgccatagagtttagtggccagaagcgactcttcagggaggtggcaggaaaggcttggaacagctgccggaggtgacggagcggcggccccgcccggtgcgctggaggtcgaagcttccaggtagcggcccgcagagcctgacccaggctctggacatcctgagcccaagtcccccacactcagtgcagtgatgagtgcggaagtgaaggtgacagggcagaaccaggagcaatttctgctcctagccaagtcggccaagggggcagcgctggccacactcatccatcaggtgctggaggcccctggtgtctacgtgtttggagaactgctggacatgcccaatgttagagagctggctgagagtgactttgcctctaccttccggctgctcacagtgtttgcttatgggacatacgctgactacttagctgaagcccggaatcttcctccactaacagaggctcagaagaataagcttcgacacctctcagttgtcaccctggctgctaaagtaaagtgtatcccatatgcagtgttgctggaggctcttgccctgcgtaatgtgcggcagctggaagaccttgtgattgaggctgtgtatgctgacgtgcttcgtggctccctggaccagcgcaaccagcggctcgaggttgactacagcatcgggcgggacatccagcgccaggacctcagtgccattgcccgaaccctgcaggaatggtgtgtgggctgtgaggtcgtgctgtcaggcattgaggagcaggtgagccgtgccaaccaacacaaggagcagcagctgggcctgaagcagcagattgagagtgaggttgccaaccttaaaaaaaccattaaagttacgacggcagcagcagccgcagccacatctcaggaccctgagcaacacctgactgagctgagggaaccagctcctggcaccaaccagcgccagcccagcaagaaagcctcaaagggcaaggggtgagccagggtagcaggaactgctcacttgcagggtgccctgcttttaccccagggacctcactgtcctcatttccttcagttatttgcatgggagtagggagtgggggagcctccaggggttaggggattccctgcattctctctctctctctctttctctctcttctccttgccaggctccgagggagcgccaagatttggtccaagtcgaattgaaagaactgtcgtttcctccctggggatgtggggtcccagctgcctgcctgcctcttaggagtcctcagagagccttctgtgcccctggccagctgataatcctaggttcatgacccttcacctcccctaaccccaaacatagatcacaccttctctagggaggagtcaaatgtaggtcatgtttttgttggtactttctgttttttgtgacttcatgtgttccattgctccccgctgccatgctctctcccttgtttccttaagagctcagcatctgtccctgttcattacatgtcattgagtaggtgggtagccctgatgggggtcgctctgtctggagcataacccacaggcgttttttctgccaccccatccctgcatgcctgatccccagttcctataccctacccctgacctattgagcagcctctgaagagccatagggcccccacctttactcacaccctgagaattctgggagccagtctgccatgccaggagtcactggacatgttcatcctagaatcctgtcacactacagtcatttcttttcctctctctggcccttgggtcctgggaatgctgctgcttcaaccccagagcctaagaatggcagccgtttcttaacatgttgagagatgattctttcttggccctggccatctcgggaagcttgatggcaatcctggaagggtttaatctccttttgtgagtttggtggggaagggaagggtatatagattgtattaaaaaaaaaaaggtatatatgcatatatctatatataatatgacgcagaaataaatctatgagaaatcta

SEQ ID NO: 24471 - DNA, 3309 bp, Homo sapiens
cagagagcaaatcccatttattggaatttcactgacaacaaattgagaggaaggcttccccctcccctgaaacatgccatcctctctgccctcagggctcagcacagggataagacccccactccgcatgtccccagagggcagcactccaggggggtgggggggaggggaggggtgctctacgccaggctggggagctgggacaggagggaagacgtgcaccctcacctcttggctcaatccctctccccgggacctggtgctgcccccagtccctggggtgggctggcagacagggctcatgcaacaatgagtagacaggaggtggcacggaaacgtggccttggtgccccttggcgggggcgggaggactaaaggggccatgctgtggccacagcgggtccaaatggaagtatctgcagtgtacatacaggagggttggagagaggcatccttttccctaggctgtgcctggggacaagagagaggggaagtacagctggcactgccgtgccaggggcagggtccaggccagccgtgccacctgagcgggcacagcgagctggagctcggctactccttggcgcggccaatgatggtgaggatgtacaggaagatgttgatgatgtctgtgtacaggttcagcgcagcaaacacatactcttctgggctcagggacagctgcttgttccccagcagcagctgggtgtccactgcgaggaagcaggtgaagagcagagcgcccagtgaggcgtacacgatctccaggatgcggttccggatgaagatgcagagaatggcgaagatgaagagcaccaccatgctcaccaggagcacgcccatgcatgaggtgaagtcgtagcgggtctgcatggagaagatgacgacggtgaagcagacggctgtggtgatgcccacggccatgatgactgcctcggtgttgtagaagctggcgatcatccccaccatgtacgacaggctggcggtcaggaccgacagtgcaacaaggttccaggggtgctttcgccggaagtccccacaacagctgaggacgatgagagagatgaagaagacagcataggagacatagtaggtccagacattctcccggacaaagcccttcacctccgcaacaaaagtgaacacagacaccgtggacagggtcaccgacagctgcaaggtcagcactaggaacaccttgcggatgaaggcctgtcggatgctcttgtcatcccagttggtggcagggaagtcctggttgtcatagtaggatgggggaccctcctcctggtagtttccatgctggggtgagtcagggtcttgtcctgggaagacctgtggctgtccataggggttgggggggaaggggctctggggatatggcccctgggggtagcccccttgggggtaggggccctgtgggtagccctcttgtgggtaggggccctgtgggtagcccccttgggggtagggaccctgtgggtagcccccttgggggtaggggctggggccatgggggtaccctggctgaccgtagggggagggctggaaagggggctgtgggtaaggggccccagggtagggaggctgagcataggggggcatgggtggctggggcccccccggatatccagggttggggggaggatagttgtccccagacaccaaaaaactcttttcatgggacatggcctcgggttccgcggtccgccccggtggccgggcgccgcaggccggtacgcacggtgtccgctgcgcggccgcgcggtgatggccgatgcgcccgcacccgcacccgctcggagcgactcttcagggaggtggcaggaaaggcttggaacagctgccggaggtgacggagcggcggccccgcccggtgcgctggaggtcgaagcttccagctgaagcccggaatcttcctccactaacagaggctcagaagaataagcttcgacacctctcagttgtcaccctggctgctaaagtaaagtgtatcccatatgcagtgttgctggaggctcttgccctgcgtaatgtgcggcagctggaagaccttgtgattgaggctgtgtatgctgacgtgcttcgtggctccctggaccagcgcaaccagcggctcgaggttgactacagcatcgggcgggacatccagcgccaggacctcagtgccattgcccgaaccctgcaggaatggtgtgtgggctgtgaggtcgtgctgtcaggcattgaggagcaggtgagccgtgccaaccaacacaaggagcagcagctgggcctgaagcagcagattgagagtgaggttgccaaccttaaaaaaaccattaaagttacgacggcagcagcagccgcagccacatctcaggaccctgagcaacacctgactgagctgagggaaccagctcctggcaccaaccagcgccagcccagcaagaaagcctcaaagggcaaggggctccgagggagcgccaagatttggtccaagtcgaattgaaagaactgtcgtttcctccctggggatgtggggtcccagctgcctgcctgcctcttaggagtcctcagagagccttctgtgcccctggccagctgataatcctaggttcatgacccttcacctcccctaaccccaaacatagatcacaccttctctagggaggagtcaaatgtaggtcatgtttttgttggtactttctgttttttgtgacttcatgtgttccattgctccccgctgccatgctctctcccttgtttccttaagagctcagcatctgtccctgttcattacatgtcattgagtaggtgggtagccctgatgggggtcgctctgtctggagcataacccacaggcgttttttctgccaccccatccctgcatgcctgatccccagttcctataccctacccctgacctattgagcagcctctgaagagccatagggcccccacctttactcacaccctgagaattctgggagccagtctgccatgccaggagtcactggacatgttcatcctagaatcctgtcacactacagtcatttcttttcctctctctggcccttgggtcctgggaatgctgctgcttcaaccccagagcctaagaatggcagccgtttcttaacatgttgagagatgattctttcttggccctggccatctcgggaagcttgatggcaatcctggaagggtttaatctccttttgtgagtttggtggggaagggaagggtatatagattgtattaaaaaaaaaaaggtatatatgcatatatctatatataatatgacgcagaaataaatctatgagaaatcta

SEQ ID NO: 24472 - DNA, 1789 bp, Homo sapiens
cgccatagagtttagtggccagaagcgactcttcagggaggtggcaggaaaggcttggaacagctgccggaggtgacggagcggcggccccgcccggtgcgctggaggtcgaagcttccaggtagcggcccgcagagcctgacccaggctctggacatcctgagcccaagtcccccacactcagtgcagtgatgagtgcggaagtgaaggtgacagggcagaaccaggagcaatttctgctcctagccaagtcggccaagggggcagcgctggccacactcatccatcaggtgctggaggcccctggtgtctacgtgtttggagaactgctggacatgcccaatgttagagagctggctgagagtgactttgcctctaccttccggctgctcacagtgtttgcttatgggacatacgctgactacttagctgaagcccggaatcttcctccactaacagaggctcagaagaataagcttcgacacctctcagttgtcaccctggctgctaaagtaaagtgtatcccatatgcagtgttgctggaggctcttgccctgcgtaatgtgcggcagctggaagaccttgtgattgaggctgtgtatgctgacgtgcttcgtggctccctggaccagcgcaaccagcggctcgaggttgactacagcatcgggcgggacatccagcgccaggacctcagtgccattgcccgaaccctgcaggaatggtgtgtgggctgtgaggtcgtgctgtcaggcattgaggagcaggtgagccgtgccaaccaacacaaggagcagcagctgggcctgaagcagcagattgagagtgaggttgccaaccttaaaaaaaccattaaagttacgacggcagcagcagccgcagccacatctcaggaccctgagcaacacctgactgagctgagggaaccagctcctggcaccaaccagcgccagcccagcaagaaagcctcaaagggcaaggggctccgagggagcgccaagatttggtccaagtcgaattgaaagaactgtcgtttcctcagagagccttctgtgcccctggccagctgataatcctaggttcatgacccttcacctcccctaaccccaaacatagatcacaccttctctagggaggagtcaaatgtaggtcatgtttttgttggtactttctgttttttgtgacttcatgtgttccattgctccccgctgccatgctctctcccttgtttccttaagagctcagcatctgtccctgttcattacatgtcattgagtaggtgggtagccctgatgggggtcgctctgtctggagcataacccacaggcgttttttctgccaccccatccctgcatgcctgatccccagttcctataccctacccctgacctattgagcagcctctgaagagccatagggcccccacctttactcacaccctgagaattctgggagccagtctgccatgccaggagtcactggacatgttcatcctagaatcctgtcacactacagtcatttcttttcctctctctggcccttgggtcctgggaatgctgctgcttcaaccccagagcctaagaatggcagccgtttcttaacatgttgagagatgattctttcttggccctggccatctcgggaagcttgatggcaatcctggaagggtttaatctccttttgtgagtttggtggggaagggaagggtatatagattgtattaaaaaaaaaaaggtatatatgcatatatctatatataatatgacgcagaaataaatctatgagaaatcta

SEQ ID NO: 24473 - DNA, 3536 bp, Homo sapiens
cagagagcaaatcccatttattggaatttcactgacaacaaattgagaggaaggcttccccctcccctgaaacatgccatcctctctgccctcagggctcagcacagggataagacccccactccgcatgtccccagagggcagcactccaggggggtgggggggaggggaggggtgctctacgccaggctggggagctgggacaggagggaagacgtgcaccctcacctcttggctcaatccctctccccgggacctggtgctgcccccagtccctggggtgggctggcagacagggctcatgcaacaatgagtagacaggaggtggcacggaaacgtggccttggtgccccttggcgggggcgggaggactaaaggggccatgctgtggccacagcgggtccaaatggaagtatctgcagtgtacatacaggagggttggagagaggcatccttttccctaggctgtgcctggggacaagagagaggggaagtacagctggcactgccgtgccaggggcagggtccaggccagccgtgccacctgagcgggcacagcgagctggagctcggctactccttggcgcggccaatgatggtgaggatgtacaggaagatgttgatgatgtctgtgtacaggttcagcgcagcaaacacatactcttctgggctcagggacagctgcttgttccccagcagcagctgggtgtccactgcgaggaagcaggtgaagagcagagcgcccagtgaggcgtacacgatctccaggatgcggttccggatgaagatgcagagaatggcgaagatgaagagcaccaccatgctcaccaggagcacgcccatgcatgaggtgaagtcgtagcgggtctgcatggagaagatgacgacggtgaagcagacggctgtggtgatgcccacggccatgatgactgcctcggtgttgtagaagctggcgatcatccccaccatgtacgacaggctggcggtcaggaccgacagtgcaacaaggttccaggggtgctttcgccggaagtccccacaacagctgaggacgatgagagagatgaagaagacagcataggagacatagtaggtccagacattctcccggacaaagcccttcacctccgcaacaaaagtgaacacagacaccgtggacagggtcaccgacagctgcaaggtcagcactaggaacaccttgcggatgaaggcctgtcggatgctcttgtcatcccagttggtggcagggaagtcctggttgtcatagtaggatgggggaccctcctcctggtagtttccatgctggggtgagtcagggtcttgtcctgggaagacctgtggctgtccataggggttgggggggaaggggctctggggatatggcccctgggggtagcccccttgggggtaggggccctgtgggtagccctcttgtgggtaggggccctgtgggtagcccccttgggggtagggaccctgtgggtagcccccttgggggtaggggctggggccatgggggtaccctggctgaccgtagggggagggctggaaagggggctgtgggtaaggggccccagggtagggaggctgagcataggggggcatgggtggctggggcccccccggatatccagggttggggggaggatagttgtccccagacaccaaaaaactcttttcatgggacatggcctcgggttccgcggtccgccccggtggccgggcgccgcaggccggtacgcacggtgtccgctgcgcggccgcgcggtgatggccgatgcgcccgcacccgcacccgctcggagcgactcttcagggaggtggcaggaaaggcttggaacagctgccggaggtgacggagcggcggccccgcccggtgcgctggaggtcgaagcttccagctctggacatcctgagcccaagtcccccacactcagtgcagtgatgagtgcggaagtgaaggtgacagggcagaaccaggagcaatttctgctcctagccaagtcggccaagggggcagcgctggccacactcatccatcaggtgctggaggcccctggtgtctacgtgtttggagaactgctggacatgcccaatgttagagagctggctgagagtgactttgcctctaccttccggctgctcacagtgtttgcttatgggacatacgctgactacttagctgaagcccggaatcttcctccactaacagaggctcagaagaataagcttcgacacctctcagttgtcaccctggctgctaaagtaaagctggaagaccttgtgattgaggctgtgtatgctgacgtgcttcgtggctccctggaccagcgcaaccagcggctcgaggttgactacagcatcgggcgggacatccagcgccaggacctcagtgccattgcccgaaccctgcaggaatggtgtgtgggctgtgaggtcgtgctgtcaggcattgaggagcaggtgagccgtgccaaccaacacaaggagcagcagctgggcctgaagcagcagattgagagtgaggttgccaaccttaaaaaaaccattaaagttacgacggcagcagcagccgcagccacatctcaggaccctgagcaacacctgactgagctgagggaaccagctcctggcaccaaccagcgccagcccagcaagaaagcctcaaagggcaaggggctccgagggagcgccaagatttggtccaagtcgaattgaaagaactgtcgtttcctccctggggatgtggggtcccagctgcctgcctgcctcttaggagtcctcagagagccttctgtgcccctggccagctgataatcctaggttcatgacccttcacctcccctaaccccaaacatagatcacaccttctctagggaggagtcaaatgtaggtcatgtttttgttggtactttctgttttttgtgacttcatgtgttccattgctccccgctgccatgctctctcccttgtttccttaagagctcagcatctgtccctgttcattacatgtcattgagtaggtgggtagccctgatgggggtcgctctgtctggagcataacccacaggcgttttttctgccaccccatccctgcatgcctgatccccagttcctataccctacccctgacctattgagcagcctctgaagagccatagggcccccacctttactcacaccctgagaattctgggagccagtctgccatgccaggagtcactggacatgttcatcctagaatcctgtcacactacagtcatttcttttcctctctctggcccttgggtcctgggaatgctgctgcttcaaccccagagcctaagaatggcagccgtttcttaacatgttgagagatgattctttcttggccctggccatctcgggaagcttgatggcaatcctggaagggtttaatctccttttgtgagtttggtggggaagggaagggtatatagattgtattaaaaaaaaaaaggtatatatgcatatatctatatataatatgacgcagaaataaatctatgagaaatcta

SEQ ID NO: 24474 - DNA, 3597 bp, Homo sapiens
cagagagcaaatcccatttattggaatttcactgacaacaaattgagaggaaggcttccccctcccctgaaacatgccatcctctctgccctcagggctcagcacagggataagacccccactccgcatgtccccagagggcagcactccaggggggtgggggggaggggaggggtgctctacgccaggctggggagctgggacaggagggaagacgtgcaccctcacctcttggctcaatccctctccccgggacctggtgctgcccccagtccctggggtgggctggcagacagggctcatgcaacaatgagtagacaggaggtggcacggaaacgtggccttggtgccccttggcgggggcgggaggactaaaggggccatgctgtggccacagcgggtccaaatggaagtatctgcagtgtacatacaggagggttggagagaggcatccttttccctaggctgtgcctggggacaagagagaggggaagtacagctggcactgccgtgccaggggcagggtccaggccagccgtgccacctgagcgggcacagcgagctggagctcggctactccttggcgcggccaatgatggtgaggatgtacaggaagatgttgatgatgtctgtgtacaggttcagcgcagcaaacacatactcttctgggctcagggacagctgcttgttccccagcagcagctgggtgtccactgcgaggaagcaggtgaagagcagagcgcccagtgaggcgtacacgatctccaggatgcggttccggatgaagatgcagagaatggcgaagatgaagagcaccaccatgctcaccaggagcacgcccatgcatgaggtgaagtcgtagcgggtctgcatggagaagatgacgacggtgaagcagacggctgtggtgatgcccacggccatgatgactgcctcggtgttgtagaagctggcgatcatccccaccatgtacgacaggctggcggtcaggaccgacagtgcaacaaggttccaggggtgctttcgccggaagtccccacaacagctgaggacgatgagagagatgaagaagacagcataggagacatagtaggtccagacattctcccggacaaagcccttcacctccgcaacaaaagtgaacacagacaccgtggacagggtcaccgacagctgcaaggtcagcactaggaacaccttgcggatgaaggcctgtcggatgctcttgtcatcccagttggtggcagggaagtcctggttgtcatagtaggatgggggaccctcctcctggtagtttccatgctggggtgagtcagggtcttgtcctgggaagacctgtggctgtccataggggttgggggggaaggggctctggggatatggcccctgggggtagcccccttgggggtaggggccctgtgggtagccctcttgtgggtaggggccctgtgggtagcccccttgggggtagggaccctgtgggtagcccccttgggggtaggggctggggccatgggggtaccctggctgaccgtagggggagggctggaaagggggctgtgggtaaggggccccagggtagggaggctgagcataggggggcatgggtggctggggcccccccggatatccagggttggggggaggatagttgtccccagacaccaaaaaactcttttcatgggacatggcctcgggttccgcggtccgccccggtggccgggcgccgcaggccggtacgcacggtgtccgctgcgcggccgcgcggtgatggccgatgcgcccgcacccgcacccgctcggagcgactcttcagggaggtggcaggaaaggcttggaacagctgccggaggtgacggagcggcggccccgcccggtgcgctggaggtcgaagcttccaggtagcggcccgcagagcctgacccaggctctggacatcctgagcccaagtcccccacactcagtgcagtgatgagtgcggaagtgaaggtgacagggcagaaccaggagcaatttctgctcctagccaagtcggccaagggggcagcgctggccacactcatccatcaggtgctggaggcccctggtgtctacgtgtttggagaactgctggacatgcccaatgttagagagctggctgagagtgactttgcctctaccttccggctgctcacagtgtttgcttatgggacatacgctgactacttagctgaagcccggaatcttcctccactaacagaggctcagaagaataagcttcgacacctctcagttgtcaccctggctgctaaagtaaagtgtatcccatatgcagtgttgctggaggctcttgccctgcgtaatgtgcggcagctggaagaccttgtgattgaggctgtgtatgctgacgtgcttcgtggctccctggaccagcgcaaccagcggctcgaggttgactacagcatcgggcgggacatccagcgccaggacctcagtgccattgtgtgtgggctgtgaggtcgtgctgtcaggcattgaggagcaggtgagccgtgccaaccaacacaaggagcagcagctgggcctgaagcagcagattgagagtgaggttgccaaccttaaaaaaaccattaaagttacgacggcagcagcagccgcagccacatctcaggaccctgagcaacacctgactgagctgagggaaccagctcctggcaccaaccagcgccagcccagcaagaaagcctcaaagggcaaggggctccgagggagcgccaagatttggtccaagtcgaattgaaagaactgtcgtttcctccctggggatgtggggtcccagctgcctgcctgcctcttaggagtcctcagagagccttctgtgcccctggccagctgataatcctaggttcatgacccttcacctcccctaaccccaaacatagatcacaccttctctagggaggagtcaaatgtaggtcatgtttttgttggtactttctgttttttgtgacttcatgtgttccattgctccccgctgccatgctctctcccttgtttccttaagagctcagcatctgtccctgttcattacatgtcattgagtaggtgggtagccctgatgggggtcgctctgtctggagcataacccacaggcgttttttctgccaccccatccctgcatgcctgatccccagttcctataccctacccctgacctattgagcagcctctgaagagccatagggcccccacctttactcacaccctgagaattctgggagccagtctgccatgccaggagtcactggacatgttcatcctagaatcctgtcacactacagtcatttcttttcctctctctggcccttgggtcctgggaatgctgctgcttcaaccccagagcctaagaatggcagccgtttcttaacatgttgagagatgattctttcttggccctggccatctcgggaagcttgatggcaatcctggaagggtttaatctccttttgtgagtttggtggggaagggaagggtatatagattgtattaaaaaaaaaaaggtatatatgcatatatctatatataatatgacgcagaaataaatctatgagaaatcta

SEQ ID NO: 24475 - DNA, 3086 bp, Homo sapiens
cagagagcaaatcccatttattggaatttcactgacaacaaattgagaggaaggcttccccctcccctgaaacatgccatcctctctgccctcagggctcagcacagggataagacccccactccgcatgtccccagagggcagcactccaggggggtgggggggaggggaggggtgctctacgccaggctggggagctgggacaggagggaagacgtgcaccctcacctcttggctcaatccctctccccgggacctggtgctgcccccagtccctggggtgggctggcagacagggctcatgcaacaatgagtagacaggaggtggcacggaaacgtggccttggtgccccttggcgggggcgggaggactaaaggggccatgctgtggccacagcgggtccaaatggaagtatctgcagtgtacatacaggagggttggagagaggcatccttttccctaggctgtgcctggggacaagagagaggggaagtacagctggcactgccgtgccaggggcagggtccaggccagccgtgccacctgagcgggcacagcgagctggagctcggctactccttggcgcggccaatgatggtgaggatgtacaggaagatgttgatgatgtctgtgtacaggttcagcgcagcaaacacatactcttctgggctcagggacagctgcttgttccccagcagcagctgggtgtccactgcgaggaagcaggtgaagagcagagcgcccagtgaggcgtacacgatctccaggatgcggttccggatgaagatgcagagaatggcgaagatgaagagcaccaccatgctcaccaggagcacgcccatgcatgaggtgaagtcgtagcgggtctgcatggagaagatgacgacggtgaagcagacggctgtggtgatgcccacggccatgatgactgcctcggtgttgtagaagctggcgatcatccccaccatgtacgacaggctggcggtcaggaccgacagtgcaacaaggttccaggggtgctttcgccggaagtccccacaacagctgaggacgatgagagagatgaagaagacagcataggagacatagtaggtccagacattctcccggacaaagcccttcacctccgcaacaaaagtgaacacagacaccgtggacagggtcaccgacagctgcaaggtcagcactaggaacaccttgcggatgaaggcctgtcggatgctcttgtcatcccagttggtggcagggaagtcctggttgtcatagtaggatgggggaccctcctcctggtagtttccatgctggggtgagtcagggtcttgtcctgggaagacctgtggctgtccataggggttgggggggaaggggctctggggatatggcccctgggggtagcccccttgggggtaggggccctgtgggtagccctcttgtgggtaggggccctgtgggtagcccccttgggggtagggaccctgtgggtagcccccttgggggtaggggctggggccatgggggtaccctggctgaccgtagggggagggctggaaagggggctgtgggtaaggggccccagggtagggaggctgagcataggggggcatgggtggctggggcccccccggatatccagggttggggggaggatagttgtccccagacaccaaaaaactcttttcatgggacatggcctcgggttccgcggtccgccccggtggccgggcgccgcaggccggtacgcacggtgtccgctgcgcggccgcgcggtgatggccgatgcgcccgcacccgcacccgctcggagcgactcttcagggaggtggcaggaaaggcttggaacagctgccggaggtgacggagcggcggccccgcccggtgcgctggaggtcgaagcttccaggtagcggcccgcagagcctgacccagggtacgacgaagcagtcggcgggagcccacggtcgctgggcggtgtctttaagggagggggcggagccacgtctctggacatcctgagcccaagtcccccacactcagtgcagtgatgagtgcggaagtgaaggtgacagggcagaaccaggagcaatttctgctcctagccaagtcggccaagggggcagcgctggccacactcatccatcaggtgctggaggcccctggtgtctacgtgtttggagaatcctggcaccaaccagcgccagcccagcaagaaagcctcaaagggcaaggggctccgagggagcgccaagatttggtccaagtcgaattgaaagaactgtcgtttcctccctggggatgtggggtcccagctgcctgcctgcctcttaggagtcctcagagagccttctgtgcccctggccagctgataatcctaggttcatgacccttcacctcccctaaccccaaacatagatcacaccttctctagggaggagtcaaatgtaggtcatgtttttgttggtactttctgttttttgtgacttcatgtgttccattgctccccgctgccatgctctctcccttgtttccttaagagctcagcatctgtccctgttcattacatgtcattgagtaggtgggtagccctgatgggggtcgctctgtctggagcataacccacaggcgttttttctgccaccccatccctgcatgcctgatccccagttcctataccctacccctgacctattgagcagcctctgaagagccatagggcccccacctttactcacaccctgagaattctgggagccagtctgccatgccaggagtcactggacatgttcatcctagaatcctgtcacactacagtcatttcttttcctctctctggcccttgggtcctgggaatgctgctgcttcaaccccagagcctaagaatggcagccgtttcttaacatgttgagagatgattctttcttggccctggccatctcgggaagcttgatggcaatcctggaagggtttaatctccttttgtgagtttggtggggaagggaagggtatatagattgtattaaaaaaaaaaaggtatatatgcatatatctatatataatatgacgcagaaataaatctatgagaaatcta

SEQ ID NO: 24476 - DNA, 1373 bp, Homo sapiens
cgccatagagtttagtggccagaagcgactcttcagggaggtggcaggaaaggcttggaacagctgccggaggtgacggagcggcggccccgcccggtgcgctggaggtcgaagcttccaggtagcggcccgcagagcctgacccaggctctggacatcctgagcccaagtcccccacactcagtgcagtgatgagtgcggaagtgaaggtgacagggcagaaccaggagcaatttctgctcctagccaagtcggccaagggggcagcgctggccacactcatccatcaggtgctggaggcccctggtgtctacgtgtttggagaactgctggacatgcccaatgttagagagctggctgagagtgactttgcctctaccttccggctgctcacagtgtttgcttatgggacatacgctgactacttagctgaagcccggaatcttcctccactaacagaggctcagaagaataagcttcgacacctctcagttgtcaccctggctgctaaagtaaagtgtatcccatatgcagtgttgctggaggctcttgccctgcgtaatgtgcggcagctggaagaccttgtgattgaggctgtgtatgctgacgtgcttcgtggctccctggaccagcgcaaccagcggctcgaggttgactacagcatcgggcgggacatccagcgccaggacctcagtgccattgcccgaaccctgcaggaatggtgtgtgggctgtgaggtcgtgctgtcaggcattgaggagcaggtgagccgtgccaaccaacacaaggagcagcagctgggcctgaagcagcagattgagagtgaggttgccaaccttaaaaaaaccattaaagttacgacggcagcagcagccgcagccacatctcaggaccctgagcaacacctgactgagctgagggaaccagctcctggcaccaaccagcgccagcccagcaagaaagcctcaaagggcaaggggctccgagggagcgccaagatttggtccaagtcgaattgaaagaactgtcgtttcctccctggggatgtggggtcccagctgcctgcctgcctcttaggagtcctcagagagccttctgtgcccctggccagctgataatcctaggttcatgacccttcacctcccctaaccccagagcctaagaatggcagccgtttcttaacatgttgagagatgattctttcttggccctggccatctcgggaagcttgatggcaatcctggaagggtttaatctccttttgtgagtttggtggggaagggaagggtatatagattgtattaaaaaaaaaaaggtatatatgcatatatctatatataatatgacgcagaaataaatctatgagaaatcta

SEQ ID NO: 24477 - DNA, 1357 bp, Homo sapiens
cgccatagagtttagtggccagaagcgactcttcagggaggtggcaggaaaggcttggaacagctgccggaggtgacggagcggcggccccgcccggtgcgctggaggtcgaagcttccaggtagcggcccgcagagcctgacccaggctctggacatcctgagcccaagtcccccacactcagtgcagtgatgagtgcggaagtgaaggtgacagggcagaaccaggagcaatttctgctcctagccaagtcggccaagggggcagcgctggccacactcatccatcaggtgctggaggcccctggtgtctacgtgtttggagaactgctggacatgcccaatgttagagagctggctgagagtgactttgcctctaccttccggctgctcacagtgtttgcttatgggacatacgctgactacttagctgaagcccggaatcttcctccactaacagaggctcagaagaataagcttcgacacctctcagttgtcaccctggctgctaaagtaaagtgtatcccatatgcagtgttgctggaggctcttgccctgcgtaatgtgcggcagctggaagaccttgtgattgaggctgtgtatgctgacgtgcttcgtggctccctggaccagcgcaaccagcggctcgaggttgactacagcatcgggcgggacatccagcgccaggacctcagtgccattgcccgaaccctgcaggaatggtgtgtgggctgtgaggtcgtgctgtcaggcattgaggagcaggtgagccgtgccaaccaacacaaggagcagcagctgggcctgaagcagcagattgagagtgaggttgccaaccttaaaaaaaccattaaagttacgacggcagcagcagccgcagccacatctcaggaccctgagcaacacctgactgagctgagggaaccagctcctggcaccaaccagcgccagcccagcaagaaagcctcaaagggcaaggggctccgagggagcgccaagatttggtccaagtcgaattgaaagaactgtcgtttcctccctggggatgtggggtcccagctgcctgcctgcctcttaggagtcctcagagagccttctgtgcccccttgggtcctgggaatgctgctgcttcaaccccagagcctaagaatggcagccgtttcttaacatgttgagagatgattctttcttggccctggccatctcgggaagcttgatggcaatcctggaagggtttaatctccttttgtgagtttggtggggaagggaagggtatatagattgtattaaaaaaaaaaaggtatatatgcatatatctatatataatatgacgcagaaataaatctatgagaaatcta

SEQ ID NO: 24478 - DNA, 347 bp, Homo sapiens
atttggacagtggctgtagcagacaaccagatgagcaggggctggaaggttctggaaccttccttgctatccccattcctttcatcctggtaggttgccaaccttaaaaaaaccattaaagttacgacggcagcagcagccgcagccacatctcaggaccctgagcaacacctgactgagctgagggaaccagctcctggcaccaaccagcgccagcccagcaagaaagcctcaaagggcaaggggtgagccagggtagcaggaactgctcacttgcagggtgccctgcttttaccccagggacctcactgtcctcatttccttcagttatttgcatgggagtaggg

SEQ ID NO: 24479 - DNA, 411 bp, Homo sapiens
ccctacccctgacctattgagcagcctctgaagagccatagggcccccacctttactcacaccctgagaattctgggagccagtctgccatgccaggagtcactggacatgttcatcctagaatcctgtcacactacagtcatttcttttcctctctctggcccttgggtcctgggaatgctgctgcttcaaccccagagcctaagaatggcagccgtttcttaacatgttgagagatgattctttcttggccctggccatctcgggaagcttgatggcaatcctggaagggtttaatctccttttgtgagtttggtggggaagggaagggtatatagattgtattaaaaaaaaaaaggtatatatgcatatatctatatataatatgacgcagaaataaatctatgagaa

SEQ ID NO: 24480 - DNA, 1880 bp, Homo sapiens
gcacacattacaggagagagctgaacgttctctcagcccagagcagcaaacaaatgatatattagagacttctgactttccggacgcgtggggagcgactcttcagggaggtggcaggaaaggcttggaacagctgccggaggtgacggagcggcggccccgcccggtgcgctggaggtcgaagcttccagctctggacatcctgagcccaagtcccccacactcagtgcagtgatgagtgcggaagtgaaggtgacagggcagaaccaggagcaatttctgctcctagccaagtcggccaagggggcagcgctggccacactcatccatcaggtgctggaggcccctggtgtctacgtgtttggagaactgctggacatgcccaatgttagagagctggctgagagtgactttgcctctaccttccggctgctcacagtgtttgcttatgggacatacgctgactacttagctgaagcccggaatcttcctccactaacagaggctcagaagaataagcttcgacacctctcagttgtcaccctggctgctaaagtaaagtgtatcccatatgcagtgttgctggaggctcttgccctgcgtaatgtgcggcagctggaagaccttgtgattgaggctgtgtatgctgacgtgcttcgtggctccctggaccagcgcaaccagcggctcgaggttgactacagcatcgggcgggacatccagcgccaggacctcagtgccattgcccgaaccctgcaggaatggtgtgtgggctgtgaggtcgtgctgtcaggcattgaggagcaggtgagccgtgccaaccaacacaaggagcagcagctgggcctgaagcagcagattgagagtgaggttgccaaccttaaaaaaaccattaaagttacgacggcagcagcagccgcagccacatctcaggaccctgagcaacacctgactgagctgagggaaccagctcctggcaccaaccagcgccagcccagcaagaaagcctcaaagggcaaggggctccgagggagcgccaagatttggtccaagtcgaattgaaagaactgtcgtttcctccctggggatgtggggtcccagctgcctgcctgcctcttaggagtcctcagagagccttctgtgcccctggccagctgataatcctaggttcatgacccttcacctcccctaaccccaaacatagatcacaccttctctagggaggagtcaaatgtaggtcatgtttttgttggtactttctgttttttgtgacttcatgtgttccattgctccccgctgccatgctctctcccttgtttccttaagagctcagcatctgtccctgttcattacatgtcattgagtaggtgggtagccctgatgggggtcgctctgtctggagcataacccacaggcgttttttctgccaccccatccctgcatgcctgatccccagttcctataccctacccctgacctattgagcagcctctgaagagccatagggcccccacctttactcacaccctgagaattctgggagccagtctgccatgccaggagtcactggacatgttcatcctagaatcctgtcacactacagtcatttcttttcctctctctggcccttgggtcctgggaatgctgctgcttcaaccccagagcctaagaatggcagccgtttcttaacatgttgagagatgattctttcttggccctggccatctcgggaagcttgatggcaatcctggaagggtttaatctccttttgtgagtttggtggggaagggaagggtatatagattgtattaaaaaaaaaaaggtatatatgcatatatctatatataatatgacgcagaaataaatctatgagaaatcta

SEQ ID NO: 24481 - DNA, 2012 bp, Homo sapiens
gtgcggggcagcaatggagagctgagggagcgtcgtcagggtggacaccatgcgacacccatttctcctttgcatcctgtgtcttggggttcaatggggtgcacgtgatggggcttggggttaggcccaggggagggggtgggtgtggcagccttgcgaagtggctgactttaggattcctagatcagaattttagaccgctccatgtctgattcctcaccgcagaaccgacttagtgcctttacaatccagtccctcagccttgtgcttcccatccgaccagccatcggggacctctagcttcacatcctctttccttgcagctctggacatcctgagcccaagtcccccacactcagtgcagtgatgagtgcggaagtgaaggtgacagggcagaaccaggagcaatttctgctcctagccaagtcggccaagggggcagcgctggccacactcatccatcaggtgctggaggcccctggtgtctacgtgtttggagaactgctggacatgcccaatgttagagagctggctgagagtgactttgcctctaccttccggctgctcacagtgtttgcttatgggacatacgctgactacttagctgaagcccggaatcttcctccactaacagaggctcagaagaataagcttcgacacctctcagttgtcaccctggctgctaaagtaaagtgtatcccatatgcagtgttgctggaggctcttgccctgcgtaatgtgcggcagctggaagaccttgtgattgaggctgtgtatgctgacgtgcttcgtggctccctggaccagcgcaaccagcggctcgaggttgactacagcatcgggcgggacatccagcgccaggacctcagtgccattgcccgaaccctgcaggaatggtgtgtgggctgtgaggtcgtgctgtcaggcattgaggagcaggtgagccgtgccaaccaacacaaggagcagcagctgggcctgaagcagcagattgagagtgaggttgccaaccttaaaaaaaccattaaagttacgacggcagcagcagccgcagccacatctcaggaccctgagcaacacctgactgagctgagggaaccagctcctggcaccaaccagcgccagcccagcaagaaagcctcaaagggcaaggggctccgagggagcgccaagatttggtccaagtcgaattgaaagaactgtcgtttcctccctggggatgtggggtcccagctgcctgcctgcctcttaggagtcctcagagagccttctgtgcccctggccagctgataatcctaggttcatgacccttcacctcccctaaccccaaacatagatcacaccttctctagggaggagtcaaatgtaggtcatgtttttgttggtactttctgttttttgtgacttcatgtgttccattgctccccgctgccatgctctctcccttgtttccttaagagctcagcatctgtccctgttcattacatgtcattgagtaggtgggtagccctgatgggggtcgctctgtctggagcataacccacaggcgttttttctgccaccccatccctgcatgcctgatccccagttcctataccctacccctgacctattgagcagcctctgaagagccatagggcccccacctttactcacaccctgagaattctgggagccagtctgccatgccaggagtcactggacatgttcatcctagaatcctgtcacactacagtcatttcttttcctctctctggcccttgggtcctgggaatgctgctgcttcaaccccagagcctaagaatggcagccgtttcttaacatgttgagagatgattctttcttggccctggccatctcgggaagcttgatggcaatcctggaagggtttaatctccttttgtgagtttggtggggaagggaagggtatatagattgtattaaaaaaaaaaaggtatatatgcatatatctatatataatatgacgcagaaataaatctatgagaaatcta

SEQ ID NO: 24482 - DNA, 1772 bp, Homo sapiens
gtgcggggcagcaatggagagctgagggagcgtcgtcagggtggacaccatgcgacacccatttctcctttgcatcctgtgtcctctggacatcctgagcccaagtcccccacactcagtgcagtgatgagtgcggaagtgaaggtgacagggcagaaccaggagcaatttctgctcctagccaagtcggccaagggggcagcgctggccacactcatccatcaggtgctggaggcccctggtgtctacgtgtttggagaactgctggacatgcccaatgttagagagctggctgagagtgactttgcctctaccttccggctgctcacagtgtttgcttatgggacatacgctgactacttagctgaagcccggaatcttcctccactaacagaggctcagaagaataagcttcgacacctctcagttgtcaccctggctgctaaagtaaagtgtatcccatatgcagtgttgctggaggctcttgccctgcgtaatgtgcggcagctggaagaccttgtgattgaggctgtgtatgctgacgtgcttcgtggctccctggaccagcgcaaccagcggctcgaggttgactacagcatcgggcgggacatccagcgccaggacctcagtgccattgcccgaaccctgcaggaatggtgtgtgggctgtgaggtcgtgctgtcaggcattgaggagcaggtgagccgtgccaaccaacacaaggagcagcagctgggcctgaagcagcagattgagagtgaggttgccaaccttaaaaaaaccattaaagttacgacggcagcagcagccgcagccacatctcaggaccctgagcaacacctgactgagctgagggaaccagctcctggcaccaaccagcgccagcccagcaagaaagcctcaaagggcaaggggctccgagggagcgccaagatttggtccaagtcgaattgaaagaactgtcgtttcctccctggggatgtggggtcccagctgcctgcctgcctcttaggagtcctcagagagccttctgtgcccctggccagctgataatcctaggttcatgacccttcacctcccctaaccccaaacatagatcacaccttctctagggaggagtcaaatgtaggtcatgtttttgttggtactttctgttttttgtgacttcatgtgttccattgctccccgctgccatgctctctcccttgtttccttaagagctcagcatctgtccctgttcattacatgtcattgagtaggtgggtagccctgatgggggtcgctctgtctggagcataacccacaggcgttttttctgccaccccatccctgcatgcctgatccccagttcctataccctacccctgacctattgagcagcctctgaagagccatagggcccccacctttactcacaccctgagaattctgggagccagtctgccatgccaggagtcactggacatgttcatcctagaatcctgtcacactacagtcatttcttttcctctctctggcccttgggtcctgggaatgctgctgcttcaaccccagagcctaagaatggcagccgtttcttaacatgttgagagatgattctttcttggccctggccatctcgggaagcttgatggcaatcctggaagggtttaatctccttttgtgagtttggtggggaagggaagggtatatagattgtattaaaaaaaaaaaggtatatatgcatatatctatatataatatgacgcagaaataaatctatgagaaatcta

SEQ ID NO: 24483 - DNA, 1788 bp, Homo sapiens
gaaggtcacttgatcagtgcggcgcgtgccgcgcaccaatgaagagctgaaggatcgtcgtcagtctctgctaaatacagactcgccaaatcccccactagctcaggtgtcacttcgaattaagttgcagagaagccaagggtgacagcggcagcagaccatggagccaattctctggatccatatcctagaagtctcgaccaacggggagtcatcgcatgcgccaaaattcatccatcaggtgctggaggcccctggtgtctacgtgtttggagaactgctggacatgcccaatgttagagagctggctgagagtgactttgcctctaccttccggctgctcacagtgtttgcttatgggacatacgctgactacttagctgaagcccggaatcttcctccactaacagaggctcagaagaataagcttcgacacctctcagttgtcaccctggctgctaaagtaaagtgtatcccatatgcagtgttgctggaggctcttgccctgcgtaatgtgcggcagctggaagaccttgtgattgaggctgtgtatgctgacgtgcttcgtggctccctggaccagcgcaaccagcggctcgaggttgactacagcatcgggcgggacatccagcgccaggacctcagtgccattgcccgaaccctgcaggaatggtgtgtgggctgtgaggtcgtgctgtcaggcattgaggagcaggtgagccgtgccaaccaacacaaggagcagcagctgggcctgaagcagcagattgagagtgaggttgccaaccttaaaaaaaccattaaagttacgacggcagcagcagccgcagccacatctcaggaccctgagcaacacctgactgagctgagggaaccagctcctggcaccaaccagcgccagcccagcaagaaagcctcaaagggcaaggggctccgagggagcgccaagatttggtccaagtcgaattgaaagaactgtcgtttcctccctggggatgtggggtcccagctgcctgcctgcctcttaggagtcctcagagagccttctgtgcccctggccagctgataatcctaggttcatgacccttcacctcccctaaccccaaacatagatcacaccttctctagggaggagtcaaatgtaggtcatgtttttgttggtactttctgttttttgtgacttcatgtgttccattgctccccgctgccatgctctctcccttgtttccttaagagctcagcatctgtccctgttcattacatgtcattgagtaggtgggtagccctgatgggggtcgctctgtctggagcataacccacaggcgttttttctgccaccccatccctgcatgcctgatccccagttcctataccctacccctgacctattgagcagcctctgaagagccatagggcccccacctttactcacaccctgagaattctgggagccagtctgccatgccaggagtcactggacatgttcatcctagaatcctgtcacactacagtcatttcttttcctctctctggcccttgggtcctgggaatgctgctgcttcaaccccagagcctaagaatggcagccgtttcttaacatgttgagagatgattctttcttggccctggccatctcgggaagcttgatggcaatcctggaagggtttaatctccttttgtgagtttggtggggaagggaagggtatatagattgtattaaaaaaaaaaaggtatatatgcatatatctatatataatatgacgcagaaataaatctatgagaaatcta

SEQ ID NO: 24484 - DNA, 1859 bp, Homo sapiens
gtgcggggcagcaatggagagctgagggagcgtcgtcaggctctggacatcctgagcccaagtcccccacactcagtgcagtgatgagtgcggaagtgaaggtgacagggcagaaccaggagcaatttctgctcctagccaagtcggccaagggggcagcgctggccacactcatccatcaggtgctggaggcccctggtgtctacgtgtttggagaactgctggacatgcccaatgttagagagggtaggaattggatgacgtatggagcaagagggcattgtggtttgggagaatagtgtaaacaaaagcctgaaggtggaaatgagcccttcctatgtgaagagtgatcagagaggcagagaactccttttgctggctgagagtgactttgcctctaccttccggctgctcacagtgtttgcttatgggacatacgctgactacttagctgaagcccggaatcttcctccactaacagaggctcagaagaataagcttcgacacctctcagttgtcaccctggctgctaaagtaaagtgtatcccatatgcagtgttgctggaggctcttgccctgcgtaatgtgcggcagctggaagaccttgtgattgaggctgtgtatgctgacgtgcttcgtggctccctggaccagcgcaaccagcggctcgaggttgactacagcatcgggcgggacatccagcgccaggacctcagtgccattgcccgaaccctgcaggaatggtgtgtgggctgtgaggtcgtgctgtcaggcattgaggagcaggtgagccgtgccaaccaacacaaggagcagcagctgggcctgaagcagcagattgagagtgaggttgccaaccttaaaaaaaccattaaagttacgacggcagcagcagccgcagccacatctcaggaccctgagcaacacctgactgagctgagggaaccagctcctggcaccaaccagcgccagcccagcaagaaagcctcaaagggcaaggggctccgagggagcgccaagatttggtccaagtcgaattgaaagaactgtcgtttcctccctggggatgtggggtcccagctgcctgcctgcctcttaggagtcctcagagagccttctgtgcccctggccagctgataatcctaggttcatgacccttcacctcccctaaccccaaacatagatcacaccttctctagggaggagtcaaatgtaggtcatgtttttgttggtactttctgttttttgtgacttcatgtgttccattgctccccgctgccatgctctctcccttgtttccttaagagctcagcatctgtccctgttcattacatgtcattgagtaggtgggtagccctgatgggggtcgctctgtctggagcataacccacaggcgttttttctgccaccccatccctgcatgcctgatccccagttcctataccctacccctgacctattgagcagcctctgaagagccatagggcccccacctttactcacaccctgagaattctgggagccagtctgccatgccaggagtcactggacatgttcatcctagaatcctgtcacactacagtcatttcttttcctctctctggcccttgggtcctgggaatgctgctgcttcaaccccagagcctaagaatggcagccgtttcttaacatgttgagagatgattctttcttggccctggccatctcgggaagcttgatggcaatcctggaagggtttaatctccttttgtgagtttggtggggaagggaagggtatatagattgtattaaaaaaaaaaaggtatatatgcatatatctatatataatatgacgcagaaataaatctatgagaaatcta

SEQ ID NO: 24485 - DNA, 3563 bp, Homo sapiens
cagagagcaaatcccatttattggaatttcactgacaacaaattgagaggaaggcttccccctcccctgaaacatgccatcctctctgccctcagggctcagcacagggataagacccccactccgcatgtccccagagggcagcactccaggggggtgggggggaggggaggggtgctctacgccaggctggggagctgggacaggagggaagacgtgcaccctcacctcttggctcaatccctctccccgggacctggtgctgcccccagtccctggggtgggctggcagacagggctcatgcaacaatgagtagacaggaggtggcacggaaacgtggccttggtgccccttggcgggggcgggaggactaaaggggccatgctgtggccacagcgggtccaaatggaagtatctgcagtgtacatacaggagggttggagagaggcatccttttccctaggctgtgcctggggacaagagagaggggaagtacagctggcactgccgtgccaggggcagggtccaggccagccgtgccacctgagcgggcacagcgagctggagctcggctactccttggcgcggccaatgatggtgaggatgtacaggaagatgttgatgatgtctgtgtacaggttcagcgcagcaaacacatactcttctgggctcagggacagctgcttgttccccagcagcagctgggtgtccactgcgaggaagcaggtgaagagcagagcgcccagtgaggcgtacacgatctccaggatgcggttccggatgaagatgcagagaatggcgaagatgaagagcaccaccatgctcaccaggagcacgcccatgcatgaggtgaagtcgtagcgggtctgcatggagaagatgacgacggtgaagcagacggctgtggtgatgcccacggccatgatgactgcctcggtgttgtagaagctggcgatcatccccaccatgtacgacaggctggcggtcaggaccgacagtgcaacaaggttccaggggtgctttcgccggaagtccccacaacagctgaggacgatgagagagatgaagaagacagcataggagacatagtaggtccagacattctcccggacaaagcccttcacctccgcaacaaaagtgaacacagacaccgtggacagggtcaccgacagctgcaaggtcagcactaggaacaccttgcggatgaaggcctgtcggatgctcttgtcatcccagttggtggcagggaagtcctggttgtcatagtaggatgggggaccctcctcctggtagtttccatgctggggtgagtcagggtcttgtcctgggaagacctgtggctgtccataggggttgggggggaaggggctctggggatatggcccctgggggtagcccccttgggggtaggggccctgtgggtagccctcttgtgggtaggggccctgtgggtagcccccttgggggtagggaccctgtgggtagcccccttgggggtaggggctggggccatgggggtaccctggctgaccgtagggggagggctggaaagggggctgtgggtaaggggccccagggtagggaggctgagcataggggggcatgggtggctggggcccccccggatatccagggttggggggaggatagttgtccccagacaccaaaaaactcttttcatgggacatggcctcgggttccgcggtccgccccggtggccgggcgccgcaggccggtacgcacggtgtccgctgcgcggccgcgcggtgatggccgatgcgcccgcacccgcacccgctcggagcgactcttcagggaggtggcaggaaaggcttggaacagctgccggaggtgacggagcggcggccccgcccggtgcgctggaggtcgaagcttccaggtagcggcccgcagagcctgacccaggctctggacatcctgagcccaagtcccccacactcagtgcagtgatgagtgcggaagtgaaggtgacagggcagaaccaggagcaatttctgctcctagccaagtcggccaagggggcagcgctggccacactcatccatcaggtgctggaggcccctggtgtctacgtgtttggagaactgctggacatgcccaatgttagagagctggctgagagtgactttgcctctaccttccggctgctcacagtgtttgcttatgggacatacgctgactacttagctgaagcccggaatcttcctccactaacagaggctcagaagaataagcttcgacacctctcagttgtcaccctggctgctaaagtaaagctggaagaccttgtgattgaggctgtgtatgctgacgtgcttcgtggctccctggaccagcgcaaccagcggctcgaggttgactacagcatcgggcgggacatccagcgccaggacctcagtgccattgcccgaaccctgcaggaatggtgtgtgggctgtgaggtcgtgctgtcaggcattgaggagcaggtgagccgtgccaaccaacacaaggagcagcagctgggcctgaagcagcagattgagagtgaggttgccaaccttaaaaaaaccattaaagttacgacggcagcagcagccgcagccacatctcaggaccctgagcaacacctgactgagctgagggaaccagctcctggcaccaaccagcgccagcccagcaagaaagcctcaaagggcaaggggctccgagggagcgccaagatttggtccaagtcgaattgaaagaactgtcgtttcctccctggggatgtggggtcccagctgcctgcctgcctcttaggagtcctcagagagccttctgtgcccctggccagctgataatcctaggttcatgacccttcacctcccctaaccccaaacatagatcacaccttctctagggaggagtcaaatgtaggtcatgtttttgttggtactttctgttttttgtgacttcatgtgttccattgctccccgctgccatgctctctcccttgtttccttaagagctcagcatctgtccctgttcattacatgtcattgagtaggtgggtagccctgatgggggtcgctctgtctggagcataacccacaggcgttttttctgccaccccatccctgcatgcctgatccccagttcctataccctacccctgacctattgagcagcctctgaagagccatagggcccccacctttactcacaccctgagaattctgggagccagtctgccatgccaggagtcactggacatgttcatcctagaatcctgtcacactacagtcatttcttttcctctctctggcccttgggtcctgggaatgctgctgcttcaaccccagagcctaagaatggcagccgtttcttaacatgttgagagatgattctttcttggccctggccatctcgggaagcttgatggcaatcctggaagggtttaatctccttttgtgagtttggtggggaagggaagggtatatagattgtattaaaaaaaaaaaggtatatatgcatatatctatatataatatgacgcagaaataaatctatgagaaatcta

SEQ ID NO: 24486 - DNA, 1539 bp, Homo sapiens
tccacctgtttgttctggtggaggagacgttagtactagaaagaggaacaaaagtacaagagaaaaaggcgtagaacaaaagaagaggtgaaatgaggacacagcggacctggctgagagtgactttgcctctaccttccggctgctcacagtgtttgcttatgggacatacgctgactacttagctgaagcccggaatcttcctccactaacagaggctcagaagaataagcttcgacacctctcagttgtcaccctggctgctaaagtaaagctggaagaccttgtgattgaggctgtgtatgctgacgtgcttcgtggctccctggaccagcgcaaccagcggctcgaggttgactacagcatcgggcgggacatccagcgccaggacctcagtgccattgcccgaaccctgcaggaatggtgtgtgggctgtgaggtcgtgctgtcaggcattgaggagcaggtgagccgtgccaaccaacacaaggagcagcagctgggcctgaagcagcagattgagagtgaggttgccaaccttaaaaaaaccattaaagttacgacggcagcagcagccgcagccacatctcaggaccctgagcaacacctgactgagctgagggaaccagctcctggcaccaaccagcgccagcccagcaagaaagcctcaaagggcaaggggctccgagggagcgccaagatttggtccaagtcgaattgaaagaactgtcgtttcctccctggggatgtggggtcccagctgcctgcctgcctcttaggagtcctcagagagccttctgtgcccctggccagctgataatcctaggttcatgacccttcacctcccctaaccccaaacatagatcacaccttctctagggaggagtcaaatgtaggtcatgtttttgttggtactttctgttttttgtgacttcatgtgttccattgctccccgctgccatgctctctcccttgtttccttaagagctcagcatctgtccctgttcattacatgtcattgagtaggtgggtagccctgatgggggtcgctctgtctggagcataacccacaggcgttttttctgccaccccatccctgcatgcctgatccccagttcctataccctacccctgacctattgagcagcctctgaagagccatagggcccccacctttactcacaccctgagaattctgggagccagtctgccatgccaggagtcactggacatgttcatcctagaatcctgtcacactacagtcatttcttttcctctctctggcccttgggtcctgggaatgctgctgcttcaaccccagagcctaagaatggcagccgtttcttaacatgttgagagatgattctttcttggccctggccatctcgggaagcttgatggcaatcctggaagggtttaatctccttttgtgagtttggtggggaagggaagggtatatagattgtattaaaaaaaaaaaggtatatatgcatatatctatatataatatgacgcagaaataaatctatgagaaatcta

SEQ ID NO: 24487 - DNA, 1531 bp, Homo sapiens
cgatctagaggatccctttaggttggcactcactctcaaactgctggacatgcccaatgttagagagctggctgagagtgactttgcctctaccttccggctgctcacagtgtttgcttatgggacatacgctgactacttagctgaagcccggaatcttcctccactaacagaggctcagaagaataagcttcgacacctctcagttgtcaccctggctgctaaagtaaagtgtatcccatatgcagtgttgctggaggctcttgccctgcgtaatgtgcggcagctggaagaccttgtgattgaggctgtgtatgctgacgtgcttcgtggctccctggaccagcgcaaccagcggctcgaggttgactacagcatcgggcgggacatccagcgccaggacctcagtgccattgtgtgtgggctgtgaggtcgtgctgtcaggcattgaggagcaggtgagccgtgccaaccaacacaaggagcagcagctgggcctgaagcagcagattgagagtgaggttgccaaccttaaaaaaaccattaaagttacgacggcagcagcagccgcagccacatctcaggaccctgagcaacacctgactgagctgagggaaccagctcctggcaccaaccagcgccagcccagcaagaaagcctcaaagggcaaggggctccgagggagcgccaagatttggtccaagtcgaattgaaagaactgtcgtttcctccctggggatgtggggtcccagctgcctgcctgcctcttaggagtcctcagagagccttctgtgcccctggccagctgataatcctaggttcatgacccttcacctcccctaaccccaaacatagatcacaccttctctagggaggagtcaaatgtaggtcatgtttttgttggtactttctgttttttgtgacttcatgtgttccattgctccccgctgccatgctctctcccttgtttccttaagagctcagcatctgtccctgttcattacatgtcattgagtaggtgggtagccctgatgggggtcgctctgtctggagcataacccacaggcgttttttctgccaccccatccctgcatgcctgatccccagttcctataccctacccctgacctattgagcagcctctgaagagccatagggcccccacctttactcacaccctgagaattctgggagccagtctgccatgccaggagtcactggacatgttcatcctagaatcctgtcacactacagtcatttcttttcctctctctggcccttgggtcctgggaatgctgctgcttcaaccccagagcctaagaatggcagccgtttcttaacatgttgagagatgattctttcttggccctggccatctcgggaagcttgatggcaatcctggaagggtttaatctccttttgtgagtttggtggggaagggaagggtatatagattgtattaaaaaaaaaaaggtatatatgcatatatctatatataatatgacgcagaaataaatctatgagaaatcta

SEQ ID NO: 24488 - DNA, 875 bp, Homo sapiens
  misc_feature (828)..(828): n is a, c, g, or t
  misc_feature (834)..(834): n is a, c, g, or t
cgccatagagtttagtggccagaagcgactcttcagggaggtggcaggaaaggcttggaacagctgccggaggtgacggagcggcggccccgcccggtgcgctggaggtcgaagcttccaggtagcggcccgcagagcctgacccaggctctggacatcctgagcccaagtcccccacactcagtgcagtgatgagtgcggaagtgaaggtgacagggcagaaccaggagcaatttctgctcctagccaagtcggccaagggggcagcgctggccacactcatccatcaggtgctggaggcccctggtgtctacgtgtttggagaactgctggacatgcccaatgttagagagctggctgagagtgactttgcctctaccttccggctgctcacagtgtttgcttatgggacatacgctgactacttagctgaagcccggaatcttcctccactaacagaggctcagaagaataagcttcgacacctctcagttgtcaccctggctgctaaagtaaagtgtatcccatatgcagtgttgctggaggctcttgccctgcgtaatgtgcggcagctggaagaccttgtgattgaggctgtgtatgctgacgtgcttcgtggctccctggaccagcgcaaccagcggctcgaggttgactacagcatcgggcgggacatccagcgccaggacctcagtgccattgcccgaaccctgcaggaatggtgtgtgggctgtgaggtcgtgctgtcaggcattgaggagcaggtgagccgtgccaaccaacacaaggagcagcagctgggcctgaagcagcagattgagagtgagnttccancctaaaaacccaaaggacacaggcgcagcagcgcgacccat

SEQ ID NO: 24489 - DNA, 2751 bp, Homo sapiens
cagagagcaaatcccatttattggaatttcactgacaacaaattgagaggaaggcttccccctcccctgaaacatgccatcctctctgccctcagggctcagcacagggataagacccccactccgcatgtccccagagggcagcactccaggggggtgggggggaggggaggggtgctctacgccaggctggggagctgggacaggagggaagacgtgcaccctcacctcttggctcaatccctctccccgggacctggtgctgcccccagtccctggggtgggctggcagacagggctcatgcaacaatgagtagacaggaggtggcacggaaacgtggccttggtgccccttggcgggggcgggaggactaaaggggccatgctgtggccacagcgggtccaaatggaagtatctgcagtgtacatacaggagggttggagagaggcatccttttccctaggctgtgcctggggacaagagagaggggaagtacagctggcactgccgtgccaggggcagggtccaggccagccgtgccacctgagcgggcacagcgagctggagctcggctactccttggcgcggccaatgatggtgaggatgtacaggaagatgttgatgatgtctgtgtacaggttcagcgcagcaaacacatactcttctgggctcagggacagctgcttgttccccagcagcagctgggtgtccactgcgaggaagcaggtgaagagcagagcgcccagtgaggcgtacacgatctccaggatgcggttccggatgaagatgcagagaatggcgaagatgaagagcaccaccatgctcaccaggagcacgcccatgcatgaggtgaagtcgtagcgggtctgcatggagaagatgacgacggtgaagcagacggctgtggtgatgcccacggccatgatgactgcctcggtgttgtagaagctggcgatcatccccaccatgtacgacaggctggcggtcaggaccgacagtgcaacaaggttccaggggtgctttcgccggaagtccccacaacagctgaggacgatgagagagatgaagaagacagcataggagacatagtaggtccagacattctcccggacaaagcccttcacctccgcaacaaaagtgaacacagacaccgtggacagggtcaccgacagctgcaaggtcagcactaggaacaccttgcggatgaaggcctgtcggatgctcttgtcatcccagttggtggcagggaagtcctggttgtcatagtaggatgggggaccctcctcctggtagtttccatgctggggtgagtcagggtcttgtcctgggaagacctgtggctgtccataggggttgggggggaaggggctctggggatatggcccctgggggtagcccccttgggggtaggggccctgtgggtagccctcttgtgggtaggggccctgtgggtagcccccttgggggtagggaccctgtgggtagcccccttgggggtaggggctggggccatgggggtaccctggctgaccgtagggggagggctggaaagggggctgtgggtaaggggccccagggtagggaggctgagcataggggggcatgggtggctggggcccccccggatatccagggttggggggaggatagttgtccccagacaccaaaaaactcttttcatgggacatggcctcgggttccgcggtccgccccggtggccgggcgccgcaggccggtacgcacggtgtccgctgcgcggccgcgcggtgatggccgatgcgcccgcacccgcacccgctcggagcgactcttcagggaggtggcaggaaaggcttggaacagctgccggaggtgacggagcggcggccccgcccggtgcgctggaggtcgaagcttccaggtagcggcccgcagagcctgacccagggtacgacgaagcagtcggcgggagcccacggtcgctgggcggtgtctttaagggagggggcggagccacgtctctggacatcctgagcccaagtcccccacactcagtgcagtgatgagtgcggaagtgaaggtgacagggcagaaccaggagcaatttctgctcctagccaagtcggccaagggggcagcgctggccacactcatccatcaggtgctggaggcccctggtgtctacgtgtttggagaactgctggacatgcccaatgttagagagctggctgagagtgactttgcctctaccttccggctgctcacagtgtttgcttatgggacatacgctgactacttagctgaagcccggaatcttcctccactaacagaggctcagaagaataagcttcgacacctctcagttgtcaccctggctgctaaagtaaagtgtatcccatatgcagtgttgctggaggctcttgccctgcgtaatgtgcggcagctggaagaccttgtgattgaggctgtgtatgctgacgtgcttcgtggctccctggaccagcgcaaccagcggctcgaggttgactacagcatcgggcgggacatccagcgccaggacctcagtgccattgcccgaaccctgcaggaatggtgtgtgggctgtgaggtcgtgctgtcaggcattgaggagcaggtgagccgtgccaaccaacacaaggagcagcagctgggcctgaagcagcagattgagagtgagggtgccaaccttaaaaaaccttaaagtcgacgggagagcgggcaatttaggaccggaaacgttggtgggaccg

SEQ ID NO: 24490 - DNA, 1833 bp, Homo sapiens
  misc_feature (40)..(40): n is a, c, g, or t
  misc_feature (50)..(51): n is a, c, g, or t
  misc_feature (55)..(56): n is a, c, g, or t
  misc_feature (88)..(89): n is a, c, g, or t
  misc_feature (91)..(91): n is a, c, g, or t
  misc_feature (98)..(98): n is a, c, g, or t
  misc_feature (107)..(107): n is a, c, g, or t
  misc_feature (111)..(111): n is a, c, g, or t
  misc_feature (115)..(115): n is a, c, g, or t
  misc_feature (120)..(121): n is a, c, g, or t
  misc_feature (127)..(127): n is a, c, g, or t
  misc_feature (143)..(143): n is a, c, g, or t
  misc_feature (210)..(210): n is a, c, g, or t
  misc_feature (224)..(224): n is a, c, g, or t
  misc_feature (235)..(235): n is a, c, g, or t
  misc_feature (240)..(240): n is a, c, g, or t
  misc_feature (250)..(250): n is a, c, g, or t
  misc_feature (260)..(260): n is a, c, g, or t
  misc_feature (264)..(264): n is a, c, g, or t
gaatggagtctccagactgtcacccaggctggagtgcagnggcacggtcnnggcnnactgcaacctccgcctcccgggttcaagcganncncctgccncagcctccngagnagcngggannacaggngcatgccaccacgccnggctaattttttttgtagggatagggttgtgccaggttgatctcaaactgctgtcctcaagtgatcngcccacctcggccncccaaagtgcnggganttacaggcgngagccacggngccnggccagattttcttgaatgaatatttctccatttgctgtatgcccttaagagaattggcaaatactttaaattacggtattttataatttttactagttaaaatgttgttttgctggaaagagggcatgccagcctccttactccaccatcttagaaatcctgctttggcttgaacactttataagaaaactcaataatctttttgagctaaacttctgatttttttttaacattggtgtttaaaagcaaaggaagaaatataggaaagaccgtacatacatacacacccttaggtaatacactcacttgctttaaagtatcccaagaataagtgaaacaaaaccttaactcctcagtccctctctttccaaaggtgaccactgttaatagtttaatgtgtgtccttaggtattcttcagaacctgcagaaagagagcctcagattaagaaaaagtaagtgatgtatgaactgcttctctgaaaatcactgctgtttctattgtgtttctagtcattcatacctagagaaattccttaccgagcagatgatggaaaggagggaggatgtatggcttccactcatctcctatagaaattcattagtcactgggggtgaagatgatagaatgtctgtgaacagtggaagtagcagcagcaaaacctcatcagtaaggaataagaaaggacgacctccacttcataaaaaacgagtagaaggtaagtctgcctttacactataagaaacaatttgcctggttttaaagagataaagtagtaaataatcttttgaagcaagataatagtatcaggcacatgattttcttgtatattttattcacaatgagatgttaaggcaaaaaggttgaaacagatgaagtaagacagaaaagcatcaaggaaaaagaagttgaggaagcatggagcacaaaggaagacagaccaaaagaggaaaaaattagctaggtctataaaatcaatccccatactatatgcctctaatacattaaaatataaagtaagatagtcacaatgctattctattaaaattcttcctaatataggtgagatacaggtaatttgagggtagatttctgcagcaaattgaatataccagaatagttgttttccagttctaccacttggttggaacagtaagacagtgatggcctccaggtgcggtggctcacatccgtaatcccagttactcaggagaccaaggaaggaggatcaggaaattaaggccagaaattcgagaccagcccgggaaacatagcaagactcccatctctaagaaaaaaaaaattttaaatgggtggcatgcacctgtagtcccagccacctgggaagccgaggcgggagaatcacctgagcccagaagtctgaggttgcagtgagccacgatcatgccaccgcactccagcctgggcgacagaggaagactcccatcatttaattttttaaaaaggcagtaatggctaaatctggttttataaccctcttggactatggggaatgggaagttaaattgtcatgaaaatctgatcaacagtaggtattcctatatgtta

SEQ ID NO: 24491 - DNA, 235 bp, Homo sapiens
tgagtgcctccctaggagtgacagttacctccggagtatgtggctaggactctgcatgacagtcaaggggaagtcaggctgaagtgtttgaaagctctgcagagtctatataccaatagagaattattccccaaattggaactattcactaaccgattcaagcagtccccaacctttttggcaccagggaccagtttcatggaagacagtttttctgtggaccaaggtgggggtt

SEQ ID NO: 24492 - DNA, 6183 bp, Homo sapiens
ggctgtgacactaatacttaacatggtggttgtgtctctttatgcctgactcaatcagttgaaatccaaaagtaagttcttccttgatttacctgccaagacctgagttcaggccctcagggtgctgaggttttcctttaatgccaccagatggcgggttaggattgcagctccgttgaaggcgcggcccccgctcccgaacccccggcgaccaccccgtaacaacccccccacatcgggaataacacaccggagacttttggggggaaactaggtcgatggtcggcggcgcccggatgggcagctgaggattgcctttgaggttattttaaaagttttgagttgtacagcacttgattattttgctgcattgtgaaaggacctctccagcaatgattacttcagaattaccagtgttacaggattcaactaatgaaactactgcccattccgatgctggcagcgagcttgaagaaacagaggtcaaaggaaaaagaaaaaggggtcgtcctggccggcctccatctacaaataagaaacctcgaaaatctccaggtgagaagagcagaattgaagctggaattagaggagcaggccgtggaagagctaatggacaccctcaacagaatggggaaggggagcctgtcacattatttgaggtggtgaaactggggaaaagtgcaatgcagtccgtggtggatgactggattgaatcatataaacaagacagggacatcgcacttctggatttaatcaacttttttatccagtgttcaggatgtcgaggtactgtgagaatagagatgtttcgaaatatgcagaatgcagaaatcatcagaaaaatgactgaagaatttgatgaggacagtggtgattatcctcttaccatgcctggacctcagtggaaaaaatttcgttcaaacttttgtgaatttattggagtcctgattcgacagtgtcagtatagcataatttatgatgagtatatgatggacacagtaatctcccttttgacgggtttgtcagactcccaggtcagagcttttaggcatacaagtaccctggctgccatgaagctcatgactgctctggtgaatgttgccttaaacctcagtattcatcaggataatacccagagacaatatgaagccgagagaaataaaatgattgggaagagagccaatgaaaggttggagttactacttcagaaacgcaaagagctgcaagaaaatcaggatgaaatcgaaaatatgatgaactctatttttaagggtatatttgttcatagataccgtgatgctattgctgagattagagccatttgtattgaagaaattggagtatggatgaaaatgtatagtgatgccttcctaaatgacagttacctaaaatatgttggctggactcttcatgacaggcaaggggaagtcaggctgaagtgtttgaaagctctgcagagtctatataccaatagagaattattccccaaattggaactattcactaaccgattcaaggatcgcattgtatcaatgacacttgataaagaatatgatgttgctgtggaagctattcgattggttactctgatacttcatggaagtgaagaagctctttccaatgaagactgtgaaaatgtttaccacttggtgtactcggcacatcgccctgttgctgtggcagctggagagttccttcacaaaaagctatttagcagacatgacccacaagcagaagaagcattagcaaagaggaggggaagaaacagcccgaatggaaacctcattaggatgctggttcttttctttcttgaaagtgagttacatgaacatgcagcctacttggtggacagtttatgggagagctctcaagaactgttgaaagactgggaatgtatgacagagttgctattagaagaacctgttcaaggagaggaagcaatgtctgatcgtcaagagagtgctcttatagagctaatggtttgtacaattcgtcaagctgctgaggcacatcctccagtgggaaggggtaccggcaagagagtgctaactgccaaagaaaggaaaactcaaattgatgatagaaacaaattgactgaacattttattattacacttcctatgttactgtcaaagtattctgcagatgcagagaaggtagcaaacttgctacaaatcccacagtattttgatttagaaatctacagcacaggtagaatggaaaagcatctggatgctttattaaaacagattaagtttgttgtggagaaacacgtagaatcagatgttctagaagcctgcagtaaaacctatagtatcttatgcagtgaagaatataccatccagaacagagttgacatagctcgaagccagctgattgatgagtttgtagatcgattcaatcattctgtggaagacctattgcaagagggagaagaagctgatgatgatgacatttacaatgttctttctacattaaagcggttaacttcttttcacaatgcacatgatctcacaaaatgggatctctttggtaattgctacagattattgaagactggaattgaacatggagccatgccagaacagatagtcgtgcaagcactgcagtgttcccattattcgattctttggcagttggtgaaaattactgatggctctccttccaaagaggatttgttggtattgaggaaaacggtgaaatcctttttggctgtttgccagcagtgcctgtctaatgttaatactccagtgaaagaacaggctttcatgttactctgtgatcttctgatgattttcagccaccaattaatgacaggtggcagagagggccttcagcctttggtgttcaatccagatactggactccaatctgaactcctcagttttgtgatggatcacgtttttattgaccaagacgaggagaaccagagcatggagggtgatgaagaagatgaagctaataaaattgaggccttacataaaagaaggaatctacttgctgctttcagcaaacttatcatttatgacattgttgacatgcatgcagctgcagacatcttcaaacactacatgaagtattacaatgactatggtgatattattaaggaaacactgagtaaaaccaggcagattgataaaattcagtgtgccaagactctcattctcagtttgcaacagttatttaatgaacttgttcaagagcaaggtcccaacctagataggacatctgcccatgtcagtggcattaaagaactggcacgtcgctttgcccttacatttggattggaccagattaagacacgagaagcagttgccacacttcacaaggatggcatagagtttgcatttaaataccaaaatcagaaaggacaagagtatccacctcctaatctggcttttcttgaagtactaagtgaattttcttctaaacttcttcgacaggacaaaaagacagttcattcatacctagagaaattccttaccgagcagatgatggaaaggagggaggatgtatggcttccactcatctcctatagaaattcattagtcactgggggtgaagatgatagaatgtctgtgaacagtggaagtagcagcagcaaaacctcatcagtaaggaataagaaaggacgacctccacttcataaaaaacgagtagaagatgagagtctggataacacatggctaaacaggactgacaccatgattcagactcctggccccctgccagcaccacaactcacatccactgtactgcgggagaacagtcggcccatgggagaccagattcaagaacctgagtctgaacatggttctgaaccagactttttacacaatcctcagatgcagatctcttggttaggccagccgaagttagaagacttaaatcggaaggacagaacaggaatgaactacatgaaagtgagaactggagtgaggcatgctgttcggggtctaatggaggaagatgctgagcccatctttgaagatgtgatgatgtcatcccgaagccagttagaagatatgaatgaagaatttgaggacaccatggttattgatctgcctccatcaagaaatcggcgagagagagctgagctaaggccagacttctttgactctgcagctatcatagaagatgattcaggatttggaatgcctatgttctgaagtctgaagaaaatttacaaatctggaactctattatttagagctagaggcctatatactgtgatagcttgtatggggaaaaacacttttgatgtgatctgatttgttttttaatcaaatgattaaggtcaatccctttttgcagtgacagaagaggagcatgtaaattacccaagggaatgttggtgaatgtcaactcagaaagactgacctgaaaatcatttgtgtcctactgttggacttatcccaatacagatgtgtgtgtttttctggagggaggaagaaattttaaatttttaaaacagctgtcaagataaacactgttatacacctgttttatgaaaactcaacattgagtaaaaaaaaacatatttttaactttattttcctgttgtacaatttaaaaaccgttttaacattttgcctttttatgttttaaaagctaaccatttttattaaacctatgagtaagcagctcatcctaattgcgaagagtgttttggagttcactggatttggttgacctttgtggaacacaaataatgaaggagcagaacattgacaagctaagatgaaattctgacatagtacatctctgccaaaaaccacacaccctctgtggatatggatatgaattcccagattttatatactcttgaataaaaggtttatttttatttataagtgggcataaaataagaaatgtccatgcagccatttttccaacagatgctgtacaccgttcattttatatagactagggagattcaaatacagtgcattttctattggtatttgttctgtgcatttttagcaacttctaccagcaaataaagtattctcagtaaaacgaaaatgattctcaagttatcagtttgctgtttttaccacttatttcatgccctgccaaattcaagttacacagacttccattttcttaagataatcaatcatgaagaaatcctttatcaatcattcaaaagtaattttaagtgtaacataactgtgtttacttcccatgcacttaatacccttatgcgctaattttgtgaattaagtttactgattatagaagtatgtgctgcatagaagtctgtgcttagagggtgaagttcctaagcttaccttgaattacagctacatttcagtgttaaatgtgcatattaagaataattcttttggggaaagaaattatgaatcttcaggacagtctacaatggtttagagttacattctgcctagacttttatgacttgctgctattgttttaaaaaccccacttagtctcttcctttctgatttctaaagtaagcctcagaatttccaaaccaattcatccacagctgtttctgggctggtttttaaagtagctgcaacagaatcatgaggctttccctttttatcaaatacgaaaaacattttttaaaattctgcacacccagtgatcatcttttgtgcgggaaagcaagatgatgatggatgattttattcatccttttagtaaagacacaaaacatttttctcaacatttgtacagttctgaaaaaaacctggtcaccaaaaatatcttctctgctaattcagcaattcttgggctccagttaggggagctggggcctcactttctcccagaattgtgggcttcactggaagtgaaggtgcaggaatgactggactgtccaccccagccctgcctgcctgtggttttggccagggagcaagccatgaggtgccctggcacatgcacaaattgatcctttgcgtgacagtcttgtatggaaaacagatgctgacagaattgtagactaccatgccacacaaaaaggctaaatatctactccaatgggtttccagttcagtttgaagtcaatcaaatttttgtattttcggtgtctccttgattggttttgctagtaattctgtaaattgtacatttgcaatatgaggttttttttccttttgtacaatttgaaactgatgcttcacctttcctttaataaactattcaaaatca

SEQ ID NO: 24493 - DNA, 6552 bp, Homo sapiens
  misc_feature (6383)..(6383): n is a, c, g, or t
  misc_feature (6398)..(6398): n is a, c, g, or t
ggctgtgacactaatacttaacatggtggttgtgtctctttatgcctgactcaatcagttgaaatccaaaagtaagttcttccttgatttacctgccaagacctgagttcaggccctcagggtgctgaggttttcctttaatgccaccagatggcgggttaggattgcagctccgttgaaggcgcggcccccgctcccgaacccccggcgaccaccccgtaacaacccccccacatcgggaataacacaccggagacttttggggggaaactaggtcgatggtcggcggcgcccggatgggcagctgaggattgcctttgaggttattttaaaagttttgagttgtacagcacttgattattttgctgcattgtgaaaggacctctccagcaatgattacttcagaattaccagtgttacaggattcaactaatgaaactactgcccattccgatgctggcagcgagcttgaagaaacagaggtcaaaggaaaaagaaaaaggggtcgtcctggccggcctccatctacaaataagaaacctcgaaaatctccaggtgagaagagcagaattgaagctggaattagaggagcaggccgtggaagagctaatggacaccctcaacagaatggggaaggggagcctgtcacattatttgaggtggtgaaactggggaaaagtgcaatgcagtccgtggtggatgactggattgaatcatataaacaagacagggacatcgcacttctggatttaatcaacttttttatccagtgttcaggatgtcgaggtactgtgagaatagagatgtttcgaaatatgcagaatgcagaaatcatcagaaaaatgactgaagaatttgatgaggacagtggtgattatcctcttaccatgcctggacctcagtggaaaaaatttcgttcaaacttttgtgaatttattggagtcctgattcgacagtgtcagtatagcataatttatgatgagtatatgatggacacagtaatctcccttttgacgggtttgtcagactcccaggtcagagcttttaggcatacaagtaccctggctgccatgaagctcatgactgctctggtgaatgttgccttaaacctcagtattcatcaggataatacccagagacaatatgaagccgagagaaataaaatgattgggaagagagccaatgaaaggttggagttactacttcagaaacgcaaagagctgcaagaaaatcaggatgaaatcgaaaatatgatgaactctatttttaagggtatatttgttcatagataccgtgatgctattgctgagattagagccatttgtattgaagaaattggagtatggatgaaaatgtatagtgatgccttcctaaatgacagttacctaaaatatgttggctggactcttcatgacaggcaaggggaagtcaggctgaagtgtttgaaagctctgcagagtctatataccaatagagaattattccccaaattggaactattcactaaccgattcaaggatcgcattgtatcaatgacacttgataaagaatatgatgttgctgtggaagctattcgattggttactctgatacttcatggaagtgaagaagctctttccaatgaagactgtgaaaatgtttaccacttggtgtactcggcacatcgccctgttgctgtggcagctggagagttccttcacaaaaagctatttagcagacatgacccacaagcagaagaagcattagcaaagaggaggggaagaaacagcccgaatggaaacctcattaggatgctggttcttttctttcttgaaagtgagttacatgaacatgcagcctacttggtggacagtttatgggagagctctcaagaactgttgaaagactgggaatgtatgacagagttgctattagaagaacctgttcaaggagaggaagcaatgtctgatcgtcaagagagtgctcttatagagctaatggtttgtacaattcgtcaagctgctgaggcacatcctccagtgggaaggggtaccggcaagagagtgctaactgccaaagaaaggaaaactcaaattgatgatagaaacaaattgactgaacattttattattacacttcctatgttactgtcaaagtattctgcagatgcagagaaggtagcaaacttgctacaaatcccacagtattttgatttagaaatctacagcacaggtagaatggaaaagcatctggatgctttattaaaacagattaagtttgttgtggagaaacacgtagaatcagatgttctagaagcctgcagtaaaacctatagtatcttatgcagtgaagaatataccatccagaacagagttgacatagctcgaagccagctgattgatgagtttgtagatcgattcaatcattctgtggaagacctattgcaagagggagaagaagctgatgatgatgacatttacaatgttctttctacattaaagcggttaacttcttttcacaatgcacatgatctcacaaaatgggatctctttggtaattgctacagattattgaagactggaattgaacatggagccatgccagaacagatagtcgtgcaagcactgcagtgttcccattattcgattctttggcagttggtgaaaattactgatggctctccttccaaagaggatttgttggtattgaggaaaacggtgaaatcctttttggctgtttgccagcagtgcctgtctaatgttaatactccagtgaaagaacaggctttcatgttactctgtgatcttctgatgattttcagccaccaattaatgacaggtggcagagagggccttcagcctttggtgttcaatccagatactggactccaatctgaactcctcagttttgtgatggatcacgtttttattgaccaagacgaggagaaccagagcatggagggtgatgaagaagatgaagctaataaaattgaggccttacataaaagaaggaatctacttgctgctttcagcaaacttatcatttatgacattgttgacatgcatgcagctgcagacatcttcaaacactacatgaagtattacaatgactatggtgatattattaaggaaacactgagtaaaaccaggcagattgataaaattcagtgtgccaagactctcattctcagtttgcaacagttatttaatgaacttgttcaagagcaaggtcccaacctagataggacatctgcccatgtcagtggcattaaagaactggcacgtcgctttgcccttacatttggattggaccagattaagacacgagaagcagttgccacacttcacaaggatggcatagagtttgcatttaaataccaaaatcagaaaggacaagagtatccacctcctaatctggcttttcttgaagtactaagtgaattttcttctaaacttcttcgacaggacaaaaagacagttcattcatacctagagaaattccttaccgagcagatgatggaaaggagggaggatgtatggcttccactcatctcctatagaaattcattagtcactgggggtgaagatgatagaatgtctgtgaacagtggaagtagcagcagcaaaacctcatcagtaaggaataagaaaggacgacctccacttcataaaaaacgagtagaagatgagagtctggataacacatggctaaacaggactgacaccatgattcagactcctggccccctgccagcaccacaactcacatccactgtactgcgggagaacagtcggcccatgggagaccagattcaagaacctgagtctgaacatggttctgaaccagactttttacacaatcctcagatgcagatctcttggttaggccagccgaagttagaagacttaaatcggaaggacagaacaggaatgaactacatgaaagtgagaactggagtgaggcatgctgttcggggtctaatggaggaagatgctgagcccatctttgaagatgtgatgatgtcatcccgaagccagttagaagatatgaatgaagaatttgaggacaccatggttattgatctgcctccatcaagaaatcggcgagagagagctgagctaaggccagacttctttgactctgcagctatcatagaagatgattcaggatttggaatgcctatgttctgaagtctgaagaaaatttacaaatctggaactctattatttagagctagaggcctatatactgtgatagcttgtatggggaaaaacacttttgatgtgatctgatttgttttttaatcaaatgattaaggtcaatccctttttgcagtgacagaagaggagcatgtaaattacccaagggaatgttggtgaatgtcaactcagaaagactgacctgaaaatcatttgtgtcctactgttggacttatcccaatacagatgtgtgtgtttttctggagggaggaagaaattttaaatttttaaaacagctgtcaagataaacactgttatacacctgttttatgaaaactcaacattgagtaaaaaaaaacatatttttaactttattttcctgttgtacaatttaaaaaccgttttaacattttgcctttttatgttttaaaagctaaccatttttattaaacctatgagtaagcagctcatcctaattgcgaagagtgttttggagttcactggatttggttgacctttgtggaacacaaataatgaaggagcagaacattgacaagctaagatgaaattctgacatagtacatctctgccaaaaaccacacaccctctgtggatatggatatgaattcccagattttatatactcttgaataaaaggtttatttttatttataagtgggcataaaataagaaatgtccatgcagccatttttccaacagatgctgtacaccgttcattttatatagactagggagattcaaatacagtgcattttctattggtatttgttctgtgcatttttagcaacttctaccagcaaataaagtattctcagtaaaacgaaaatgattctcaagttatcagtttgctgtttttaccacttatttcatgccctgccaaattcaagttacacagacttccattttcttaagataatcaatcatgaagaaatcctttatcaatcattcaaaagtaattttaagtgtaacataactgtgtttacttcccatgcacttaatacccttatgcgctaattttgtgaattaagtttactgattatagaagtatgtgctgcatagaagtctgtgcttagagggtgaagttcctaagcttaccttgaattacagctacatttcagtgttaaatgtgcatattaagaataattcttttggggaaagaaattatgaatcttcaggacagtctacaatggtttagagttacattctgcctagacttttatgacttgctgctattgttttaaaaaccccacttagtctcttcctttctgatttctaaagtaagcctcagaatttccaaaccaattcatccacagctgtttctgggctggtttttaaagtagctgcaacagaatcatgaggctttccctttttatcaaatacgaaaaacattttttaaaattctgcacacccagtgatcatcttttgtgcgggaaagcaagatgatgatggatgattttattcatccttttagtaaagacacaaaacatttttctcaacatttgtacagttctgaaaaaaacctggtcaccaaaaatatcttctctgctaattcagcaattcttgggctccagttaggggagctggggcctcactttctcccagaattgtgggcttcactggaagtgaaggtgcaggaatgactggactgtccaccccagccctgcctgcctgtggttttggccagggagcaagccatgaggtgccctggcacatgcacaaattgatcctttgcgtgacagtcttgtatggaaaacagatgctgacagaattgtagactaccatgccacacaaaaaggctaaatatctactccaatgggtttccagttcagtttgaagtcaatcaaatttttgtattttcggtgtctccttgattggttttgctagtaattctgtaaattgtacatttgcaatatgaggttttttttccttttgtacaatttgaaactgatgcttcacctttcctttaataaactattcaaaatcaaaaaaaaaaaaaaaaaaaactcgagactcttttagcaaccccagtattccttcactatttcgcttcctgcattagcaaattttacttacagtcaaaagtgcagatttatactcctgacgtgtctcattcacagctaaataataggccataggacttttggtaggtttaaacttttaattctgtatttcatgattataagncttgctagaattttntctaatctttagtagatttgattaaataatgattcacagaatttagtaacagaatcaaactaagccatgtatgagggtaatcgagatgaggatattaactcaaaagaaatagggtgattttaaaggattaataaaatcctgaaatgttaagtag

SEQ ID NO: 24494 - DNA, 6956 bp, Homo sapiens
aggaggtggtcacagatattttataatggaggcaaggtcaaaccggaattggagtcccatagctctgagcccaggaaactggatgaatttatctattagtatggactgggactggcatctttaacaacatggaaagcttgaaacagtctttgtggaaaataggagatcagccagagattagaagaaaacgcaagaaaattataagtaggagtccagtcacgaattcatatccaatctggtcagttatgacttcctccagcgaaaagccacacatcttgcaaaccctggtgaaagcgcttgtcagccgtaaatcgcgaatacaatgctaagctctgaggcccttgctaaatccaagtaggagcagggatctgcgcggcctcaccctcgggtttccgcagggcgtctcgagagctgcggatgggggcagcaggagccgggcgggaacagaggaaagcgccggccctgagacctagggaggagcctcggtgaaggaacccggggcgggttcctgcctagatctccaagaagctccaaaaatggcgggcggcaactcggcgagccggacgcgcaggcgccaccgtggccgtccttccgccagccgcgggcggcccaagaaccgtccacagcgcccttatccagaagcctacgcctctcgcgattggctgaactgcgcgagcgctccgtgtgggggcggggccgccacgcagcggccacgtttcccgccccgctggtgcgcgtgcgcgcaatccccactggaaagcgtttgcgcgcgcccctgccgcggcccctagctcgcgcctcagctccctcccctttccgggcaggcccgtcccgtcagcaaggcagtgagcaccgcggccagcagagggcggtccggacccaagtctgcagcggcgccattggcgtgtggaaaatgccaccagatggcgggttaggattgcagctccgttgaaggcgcggcccccgctcccgaacccccggcgaccaccccgtaacaacccccccacatcgggaataacacaccggagacttttggggggaaactaggtcgatggtcggcggcgcccggatgggcagctgaggattgcctttgaggttattttaaaagttttgagttgtacagcacttgattattttgctgcattgtgaaaggacctctccagcaatgattacttcagaattaccagtgttacaggattcaactaatgaaactactgcccattccgatgctggcagcgagcttgaagaaacagaggtcaaaggaaaaagaaaaaggggtcgtcctggccggcctccatctacaaataagaaacctcgaaaatctccaggtgagaagagcagaattgaagctggaattagaggagcaggccgtggaagagctaatggacaccctcaacagaatggggaaggggagcctgtcacattatttgaggtggtgaaactggggaaaagtgcaatgcagtccgtggtggatgactggattgaatcatataaacaagacagggacatcgcacttctggatttaatcaacttttttatccagtgttcaggatgtcgaggtactgtgagaatagagatgtttcgaaatatgcagaatgcagaaatcatcagaaaaatgactgaagaatttgatgaggacagtggtgattatcctcttaccatgcctggacctcagtggaaaaaatttcgttcaaacttttgtgaatttattggagtcctgattcgacagtgtcagtatagcataatttatgatgagtatatgatggacacagtaatctcccttttgacgggtttgtcagactcccaggtcagagcttttaggcatacaagtaccctggctgccatgaagctcatgactgctctggtgaatgttgccttaaacctcagtattcatcaggataatacccagagacaatatgaagccgagagaaataaaatgattgggaagagagccaatgaaaggttggagttactacttcagaaacgcaaagagctgcaagaaaatcaggatgaaatcgaaaatatgatgaactctatttttaagggtatatttgttcatagataccgtgatgctattgctgagattagagccatttgtattgaagaaattggagtatggatgaaaatgtatagtgatgccttcctaaatgacagttacctaaaatatgttggctggactcttcatgacaggcaaggggaagtcaggctgaagtgtttgaaagctctgcagagtctatataccaatagagaattattccccaaattggaactattcactaaccgattcaaggatcgcattgtatcaatgacacttgataaagaatatgatgttgctgtggaagctattcgattggttactctgatacttcatggaagtgaagaagctctttccaatgaagactgtgaaaatgtttaccacttggtgtactcggcacatcgccctgttgctgtggcagctggagagttccttcacaaaaagctatttagcagacatgacccacaagcagaagaagcattagcaaagaggaggggaagaaacagcccgaatggaaacctcattaggatgctggttcttttctttcttgaaagtgagttacatgaacatgcagcctacttggtggacagtttatgggagagctctcaagaactgttgaaagactgggaatgtatgacagagttgctattagaagaacctgttcaaggagaggaagcaatgtctgatcgtcaagagagtgctcttatagagctaatggtttgtacaattcgtcaagctgctgaggcacatcctccagtgggaaggggtaccggcaagagagtgctaactgccaaagaaaggaaaactcaaattgatgatagaaacaaattgactgaacattttattattacacttcctatgttactgtcaaagtattctgcagatgcagagaaggtagcaaacttgctacaaatcccacagtattttgatttagaaatctacagcacaggtagaatggaaaagcatctggatgctttattaaaacagattaagtttgttgtggagaaacacgtagaatcagatgttctagaagcctgcagtaaaacctatagtatcttatgcagtgaagaatataccatccagaacagagttgacatagctcgaagccagctgattgatgagtttgtagatcgattcaatcattctgtggaagacctattgcaagagggagaagaagctgatgatgatgacatttacaatgttctttctacattaaagcggttaacttcttttcacaatgcacatgatctcacaaaatgggatctctttggtaattgctacagattattgaagactggaattgaacatggagccatgccagaacagatagtcgtgcaagcactgcagtgttcccattattcgattctttggcagttggtgaaaattactgatggctctccttccaaagaggatttgttggtattgaggaaaacggtgaaatcctttttggctgtttgccagcagtgcctgtctaatgttaatactccagtgaaagaacaggctttcatgttactctgtgatcttctgatgattttcagccaccaattaatgacaggtggcagagagggccttcagcctttggtgttcaatccagatactggactccaatctgaactcctcagttttgtgatggatcacgtttttattgaccaagacgaggagaaccagagcatggagggtgatgaagaagatgaagctaataaaattgaggccttacataaaagaaggaatctacttgctgctttcagcaaacttatcatttatgacattgttgacatgcatgcagctgcagacatcttcaaacactacatgaagtattacaatgactatggtgatattattaaggaaacactgagtaaaaccaggcagattgataaaattcagtgtgccaagactctcattctcagtttgcaacagttatttaatgaacttgttcaagagcaaggtcccaacctagataggacatctgcccatgtcagtggcattaaagaactggcacgtcgctttgcccttacatttggattggaccagattaagacacgagaagcagttgccacacttcacaaggatggcatagagtttgcatttaaataccaaaatcagaaaggacaagagtatccacctcctaatctggcttttcttgaagtactaagtgaattttcttctaaacttcttcgacaggacaaaaagacagttcattcatacctagagaaattccttaccgagcagatgatggaaaggagggaggatgtatggcttccactcatctcctatagaaattcattagtcactgggggtgaagatgatagaatgtctgtgaacagtggaagtagcagcagcaaaacctcatcagtaaggaataagaaaggacgacctccacttcataaaaaacgagtagaagatgagagtctggataacacatggctaaacaggactgacaccatgattcagactcctggccccctgccagcaccacaactcacatccactgtactgcgggagaacagtcggcccatgggagaccagattcaagaacctgagtctgaacatggttctgaaccagactttttacacaatcctcagatgcagatctcttggttaggccagccgaagttagaagacttaaatcggaaggacagaacaggaatgaactacatgaaagtgagaactggagtgaggcatgctgttcggggtctaatggaggaagatgctgagcccatctttgaagatgtgatgatgtcatcccgaagccagttagaagatatgaatgaagaatttgaggacaccatggttattgatctgcctccatcaagaaatcggcgagagagagctgagctaaggccagacttctttgactctgcagctatcatagaagatgattcaggatttggaatgcctatgttctgaagtctgaagaaaatttacaaatctggaactctattatttagagctagaggcctatatactgtgatagcttgtatggggaaaaacacttttgatgtgatctgatttgttttttaatcaaatgattaaggtcaatccctttttgcagtgacagaagaggagcatgtaaattacccaagggaatgttggtgaatgtcaactcagaaagactgacctgaaaatcatttgtgtcctactgttggacttatcccaatacagatgtgtgtgtttttctggagggaggaagaaattttaaatttttaaaacagctgtcaagataaacactgttatacacctgttttatgaaaactcaacattgagtaaaaaaaaacatatttttaactttattttcctgttgtacaatttaaaaaccgttttaacattttgcctttttatgttttaaaagctaaccatttttattaaacctatgagtaagcagctcatcctaattgcgaagagtgttttggagttcactggatttggttgacctttgtggaacacaaataatgaaggagcagaacattgacaagctaagatgaaattctgacatagtacatctctgccaaaaaccacacaccctctgtggatatggatatgaattcccagattttatatactcttgaataaaaggtttatttttatttataagtgggcataaaataagaaatgtccatgcagccatttttccaacagatgctgtacaccgttcattttatatagactagggagattcaaatacagtgcattttctattggtatttgttctgtgcatttttagcaacttctaccagcaaataaagtattctcagtaaaacgaaaatgattctcaagttatcagtttgctgtttttaccacttatttcatgccctgccaaattcaagttacacagacttccattttcttaagataatcaatcatgaagaaatcctttatcaatcattcaaaagtaattttaagtgtaacataactgtgtttacttcccatgcacttaatacccttatgcgctaattttgtgaattaagtttactgattatagaagtatgtgctgcatagaagtctgtgcttagagggtgaagttcctaagcttaccttgaattacagctacatttcagtgttaaatgtgcatattaagaataattcttttggggaaagaaattatgaatcttcaggacagtctacaatggtttagagttacattctgcctagacttttatgacttgctgctattgttttaaaaaccccacttagtctcttcctttctgatttctaaagtaagcctcagaatttccaaaccaattcatccacagctgtttctgggctggtttttaaagtagctgcaacagaatcatgaggctttccctttttatcaaatacgaaaaacattttttaaaattctgcacacccagtgatcatcttttgtgcgggaaagcaagatgatgatggatgattttattcatccttttagtaaagacacaaaacatttttctcaacatttgtacagttctgaaaaaaacctggtcaccaaaaatatcttctctgctaattcagcaattcttgggctccagttaggggagctggggcctcactttctcccagaattgtgggcttcactggaagtgaaggtgcaggaatgactggactgtccaccccagccctgcctgcctgtggttttggccagggagcaagccatgaggtgccctggcacatgcacaaattgatcctttgcgtgacagtcttgtatggaaaacagatgctgacagaattgtagactaccatgccacacaaaaaggctaaatatctactccaatgggtttccagttcagtttgaagtcaatcaaatttttgtattttcggtgtctccttgattggttttgctagtaattctgtaaattgtacatttgcaatatgaggttttttttccttttgtacaatttgaaactgatgcttcacctttcctttaataaactattcaaaatca

SEQ ID NO: 24495 - DNA, 3421 bp, Homo sapiens
aggaggtggtcacagatattttataatggaggcaaggtcaaaccggaattggagtcccatagctctgagcccaggaaactggatgaatttatctattagtatggactgggactggcatctttaacaacatggaaagcttgaaacagtctttgtggaaaataggagatcagccagagattagaagaaaacgcaagaaaattataagtaggagtccagtcacgaattcatatccaatctggtcagttatgacttcctccagcgaaaagccacacatcttgcaaacccttgagagagaaaacacaaataggggtaacctactggagacaggcccttaagactataaagtagttgagcgattccatactgaaatagagttggctatagcgatagagaagttagtcatatatgggcctaatgatccaggagagtaaggattcacttttgtggtgaaaagttgtaagcaggtgaaaggtagggatccatggccacggacgggcaggtggagatcagggaagaggcgacgttaaacataaatagtttgttaatgatttcaccttactgattatttctcttttggcatctagaaggctaagattctcatgtgtatttcagagctactgaaagtagtcctaggttgtggagggagaaatccactttcacagctgagtctatcttctcagtctagttatattctcctctcacaaactagccaatgctgccgccttatgcaaagccgacaccacggaaagatgtgctttacagaggcaggatgacgccaatcggcctagggccggcggtgtttcgtctagattaatggcgagggaagtccccaatagtccttttgaaaccttttcactcttgcctggtgaaagcgcttgtcagccgtaaatcgcgaatacaatgctaagctctgaggcccttgctaaatccaagtaggagcagggatctgcgcggcctcaccctcgggtttccgcagggcgtctcgagagctgcggatgggggcagcaggagccgggcgggaacagaggaaagcgccggccctgagacctagggaggagcctcggtgaaggaacccggggcgggttcctgcctagatctccaagaagctccaaaaatggcgggcggcaactcggcgagccggacgcgcaggcgccaccgtggccgtccttccgccagccgcgggcggcccaagaaccgtccacagcgcccttatccagaagcctacgcctctcgcgattggctgaactgcgcgagcgctccgtgtgggggcggggccgccacgcagcggccacgtttcccgccccgctggtgcgcgtgcgcgcaatccccactggaaagcgtttgcgcgcgcccctgccgcggcccctagctcgcgcctcagctccctcccctttccgggcaggcccgtcccgtcagcaaggcagtgagcaccgcggccagcagagggcggtccggacccaagtctgcagcggcgccattggcgtgtggaaaatgccaccagatggcgggttaggattgcagctccgttgaaggcgcggcccccgctcccgaacccccggcgaccaccccgtaacaacccccccacatcgggaataacacaccggagacttttggggggaaactaggtcgatggtcggcggcgcccggatgggcagctgaggattgcctttgaggttattttaaaagttttgagttgtacagcacttgattattttgctgcattgtgaaaggacctctccagcaatgattacttcagaattaccagtgttacaggattcaactaatgaaactactgcccattccgatgctggcagcgagcttgaagaaacagaggtcaaaggaaaaagaaaaaggggtcgtcctggccggcctccatctacaaataagaaacctcgaaaatctccaggtgagaagagcagaattgaagctggaattagaggagcaggccgtggaagagctaatggacaccctcaacagaatggggaaggggagcctgtcacattatttgaggtggtgaaactggggaaaagtgcaatgcagtccgtggtggatgactggattgaatcatataaacaagacagggacatcgcacttctggatttaatcaacttttttatccagtgttcaggatgtcgaggtactgtgagaatagagatgtttcgaaatatgcagaatgcagaaatcatcagaaaaatgactgaagaatttgatgaggacagtggtgattatcctcttaccatgcctggacctcagtggaaaaaatttcgttcaaacttttgtgaatttattggagtcctgattcgacagtgtcagtatagcataatttatgatgagtatatgatggacacagtaatctcccttttgacgggtttgtcagactcccaggtcagagcttttaggcatacaagtaccctggctgccatgaagctcatgactgctctggtgaatgttgccttaaacctcagtattcatcaggataatacccagagacaatatgaagccgagagaaataaaatgattgggaagagagccaatgaaaggttggagttactacttcagaaacgcaaagagctgcaagaaaatcaggatgaaatcgaaaatatgatgaactctatttttaagggtatatttgttcatagataccgtgatgctattgctgagattagagccatttgtattgaagaaattggagtatggatgaaaatgtatagtgatgccttcctaaatgacagttacctaaaatatgttggctggactcttcatgacaggcaaggggaagtcaggctgaagtgtttgaaagctctgcagagtctatataccaatagagaattattccccaaattggaactattcactaaccgattcaaggatcgcattgtatcaatgacacttgataaagaatatgatgttgctgtggaagctattcgattggttactctgatacttcatggaagtgaagaagctctttccaatgaagactgtgaaaatgtttaccacttggtgtactcggcacatcgccctgttgctgtggcagctggagagttccttcacaaaaagctatttagcagacatgacccacaagcagaagaagcattagcaaagaggaggggaagaaacagcccgaatggaaacctcattaggatgctggttcttttctttcttgaaagtgaggtaaaaaatgttttaagataattccttatttcttttattatattacattttaaatgtcaattcattttaatttttttcaatcaaataaaaacaagtctgtttcttataaagttaccttcatgaattgcatgatatagaatcagtcctttaccttttgtggaaaggtgttctgaatatatatgtaggtgtggatcaacactgaatacagactggcaattgttaaacttttacagtattgcaatactgcata

SEQ ID NO: 24496 - DNA, 2797 bp, Homo sapiens
aggaggtggtcacagatattttataatggaggcaaggtcaaaccggaattggagtcccatagctctgagcccaggaaactggatgaatttatctattagtatggactgggactggcatctttaacaacatggaaagcttgaaacagtctttgtggaaaataggagatcagccagagattagaagaaaacgcaagaaaattataagtaggagtccagtcacgaattcatatccaatctggtcagttatgacttcctccagcgaaaagccacacatcttgcaaacccttgagagagaaaacacaaataggggtaacctactggagacaggcccttaagactataaagtagttgagcgattccatactgaaatagagttggctatagcgatagagaagttagtcatatatgggcctaatgatccaggagagtaaggattcacttttgtggtgaaaagttgtaagcaggtgaaaggtagggatccatggccacggacgggcaggtggagatcagggaagaggcgacgttaaacataaatagtttgttaatgatttcaccttactgattatttctcttttggcatctagaaggctaagattctcatgtgtatttcagagctactgaaagtagtcctaggttgtggagggagaaatccactttcacagctgagtctatcttctcagtctagttatattctcctctcacaaactagccaatgctgccgccttatgcaaagccgacaccacggaaagatgtgctttacagaggcaggatgacgccaatcggcctagggccggcggtgtttcgtctagattaatggcgagggaagtccccaatagtccttttgaaaccttttcactcttgcctggtgaaagcgcttgtcagccgtaaatcgcgaatacaatgctaagctctgaggcccttgctaaatccaagtaggagcagggatctgcgcggcctcaccctcgggtttccgcagggcgtctcgagagctgcggatgggggcagcaggagccgggcgggaacagaggaaagcgccggccctgagacctagggaggagcctcggtgaaggaacccggggcgggttcctgcctagatctccaagaagctccaaaaatggcgggcggcaactcggcgagccggacgcgcaggcgccaccgtggccgtccttccgccagccgcgggcggcccaagaaccgtccacagcgcccttatccagaagcctacgcctctcgcgattggctgaactgcgcgagcgctccgtgtgggggcggggccgccacgcagcggccacgtttcccgccccgctggtgcgcgtgcgcgcaatccccactggaaagcgtttgcgcgcgcccctgccgcggcccctagctcgcgcctcagctccctcccctttccgggcaggcccgtcccgtcagcaaggcagtgagcaccgcggccagcagagggcggtccggacccaagtctgcagcggcgccattggcgtgtggaaaatgccaccagatggcgggttaggattgcagctccgttgaaggcgcggcccccgctcccgaacccccggcgaccaccccgtaacaacccccccacatcgggaataacacaccggagacttttggggggaaactaggtcgatggtcggcggcgcccggatgggcagctgaggattgcctttgaggttattttaaaagttttgagttgtacagcacttgattattttgctgcattgtgaaaggacctctccagcaatgattacttcagaattaccagtgttacaggattcaactaatgaaactactgcccattccgatgctggcagcgagcttgaagaaacagaggtcaaaggaaaaagaaaaaggggtcgtcctggccggcctccatctacaaataagaaacctcgaaaatctccaggtgagaagagcagaattgaagctggaattagaggagcaggccgtggaagagctaatggacaccctcaacagaatggggaaggggagcctgtcacattatttgaggtggtgaaactggggaaaagtgcaatgcagtccgtggtggatgactggattgaatcatataaacaagacagggacatcgcacttctggatttaatcaacttttttatccagtgttcaggatgtcgaggtactgtgagaatagagatgtttcgaaatatgcagaatgcagaaatcatcagaaaaatgactgaagaatttgatgaggacagtggtgattatcctcttaccatgcctggacctcagtggaaaaaatttcgttcaaacttttgtgaatttattggagtcctgattcgacagtgtcagtatagcataatttatgatgagtatatgatggacacagtaatctcccttttgacgggtttgtcagactcccaggtcagagcttttaggcatacaagtaccctggctggacaagtcttggggactagataaaatgggcaggaacatttaatcctctgcttcaaagactatgtgcatggacagttacaaggcagttatggccagatatgattatcggctttggaataaaatgctccttgacattgcttaaatcttagctgagaagagagacaatcaggttagttattttgtagggtacagatgtgatgagttccagagcttcataagtcatcagagtggtcttatcagtagtatttttaatctgttttccaaatatcccattttcctgttatgaattcaatatgtgtccctgttgtcagtgtttatgcattgcatttaattgtatacttttacatttttattaaaagttttttttatcattaaatag

SEQ ID NO: 24497 - DNA, 2172 bp, Homo sapiens
  misc_feature (2144)..(2144): n is a, c, g, or t
aggaggtggtcacagatattttataatggaggcaaggtcaaaccggaattggagtcccatagctctgagcccaggaaactggatgaatttatctattagtatggactgggactggcatctttaacaacatggaaagcttgaaacagtctttgtggaaaataggagatcagccagagattagaagaaaacgcaagaaaattataagtaggagtccagtcacgaattcatatccaatctggtcagttatgacttcctccagcgaaaagccacacatcttgcaaacccttgagagagaaaacacaaataggggtaacctactggagacaggcccttaagactataaagtagttgagcgattccatactgaaatagagttggctatagcgatagagaagttagtcatatatgggcctaatgatccaggagagtaaggattcacttttgtggtgaaaagttgtaagcaggtgaaaggtagggatccatggccacggacgggcaggtggagatcagggaagaggcgacgttaaacataaatagtttgttaatgatttcaccttactgattatttctcttttggcatctagaaggctaagattctcatgtgtatttcagagctactgaaagtagtcctaggttgtggagggagaaatccactttcacagctgagtctatcttctcagtctagttatattctcctctcacaaactagccaatgctgccgccttatgcaaagccgacaccacggaaagatgtgctttacagaggcaggatgacgccaatcggcctagggccggcggtgtttcgtctagattaatggcgagggaagtccccaatagtccttttgaaaccttttcactcttgcctggtgaaagcgcttgtcagccgtaaatcgcgaatacaatgctaagctctgaggcccttgctaaatccaagtaggagcagggatctgcgcggcctcaccctcgggtttccgcagggcgtctcgagagctgcggatgggggcagcaggagccgggcgggaacagaggaaagcgccggccctgagacctagggaggagcctcggtgaaggaacccggggcgggttcctgcctagatctccaagaagctccaaaaatggcgggcggcaactcggcgagccggacgcgcaggcgccaccgtggccgtccttccgccagccgcgggcggcccaagaaccgtccacagcgcccttatccagaagcctacgcctctcgcgattggctgaactgcgcgagcgctccgtgtgggggcggggccgccacgcagcggccacgtttcccgccccgctggtgcgcgtgcgcgcaatccccactggaaagcgtttgcgcgcgcccctgccgcggcccctagctcgcgcctcagctccctcccctttccgggcaggcccgtcccgtcagcaaggcagtgagcaccgcggccagcagagggcggtccggacccaagtctgcagcggcgccattggcgtgtggaaaatgccaccagatggcgggttaggattgcagctccgttgaaggcgcggcccccgctcccgaacccccggcgaccaccccgtaacaacccccccacatcgggaataacacaccggagacttttggggggaaactaggtcgatggtcggcggcgcccggatgggcagctgaggattgcctttgaggttattttaaaagttttgagttgtacagcacttgattattttgctgcattgtgaaaggacctctccagcaatgattacttcagaattaccagtgttacaggattcaactaatgaaactactgcccattccgatgctggcagcgagcttgaagaaacagaggtcaaaggaaaaagaaaaaggggtcgtcctggccggcctccatctacaaataagaaacctcgaaaatctccaggtgagaagagcagaattgaagctggaattagaggagcaggccgtggaagagctaatggacaccctcaacagaatggggaaggggagcctgtcacattatttgaggtggtgaaactggggaaaagtgcaatgcagagatgttgacctttcaaataggtcagtgttgtccaggctgacctcgaacttctgggcccaagtgatcctccccggcctgagcctctcgagtagctgggactacngagccttcatgttgttgcattcacttgg

SEQ ID NO: 24498 - DNA, 331 bp, Homo sapiens
ctccccctttttgttgttgttgttgttaaacactgaaatgatttgtgtgttgagggaagactaaagttcatattcatgtaactttgcaatgccctgtttttcatttccaggctatttagcagacatgacccacaagcagaagaagcattagcaaagaggaggggaagaaacagcccgaatggaaacctcattaggatgctggttcttttctttcttgaaagtgaggtaaaaaatgttttaagataattccttatttcttttattatattacattttaaatgtcaattcattttaatttttttcaatcaaataaaaacaagtctgtttctta

SEQ ID NO: 24499 - DNA, 725 bp, Homo sapiens
ctctcagaaagctccaaatgtcattgtctagcccagtgaaaatagagtaattgggtcaaaatagtttaatagaagctttttttttccagtttggtattattagtgtttattttatagaaaacatgaaaaacagaagatacttaagttggaggccattcagaatgcaaatatatacaaacagcattagaaatatttattgcttatggaaagcgagtatgaatgcattctagctttgtatattaatttgagattgtcttttttttctctctctagtgatgctattgctgagattagagccatttgtattgaagaaattggagtatggatgaaaatgtatagtgatgccttcctaaatgacagttacctaaaatatgttggctggactcttcatgacagggtaagttactctgttctaagctttgatggaagttatgtttgtctcagtactaaaatgctgggaatcaaaatgacagtagttgatttttcaggagttgtaatcatgtggaaattttaagatgatgcagctgaataactatttacttgatgattgtgatgaaactggaagcatttgcccaggggtgaagaccctatcttgtttagttacaatattgtcttgaaccaagtttgacaacctggtatatataaagttttcagagaaagaaaatcattatattctttttctaattcagaatcaaaggagatttcttttttcttaatatataaaa

SEQ ID NO: 24500 - DNA, 7534 bp, Homo sapiens
aggaggtggtcacagatattttataatggaggcaaggtcaaaccggaattggagtcccatagctctgagcccaggaaactggatgaatttatctattagtatggactgggactggcatctttaacaacatggaaagcttgaaacagtctttgtggaaaataggagatcagccagagattagaagaaaacgcaagaaaattataagtaggagtccagtcacgaattcatatccaatctggtcagttatgacttcctccagcgaaaagccacacatcttgcaaacccttgagagagaaaacacaaataggggtaacctactggagacaggcccttaagactataaagtagttgagcgattccatactgaaatagagttggctatagcgatagagaagttagtcatatatgggcctaatgatccaggagagtaaggattcacttttgtggtgaaaagttgtaagcaggtgaaaggtagggatccatggccacggacgggcaggtggagatcagggaagaggcgacgttaaacataaatagtttgttaatgatttcaccttactgattatttctcttttggcatctagaaggctaagattctcatgtgtatttcagagctactgaaagtagtcctaggttgtggagggagaaatccactttcacagctgagtctatcttctcagtctagttatattctcctctcacaaactagccaatgctgccgccttatgcaaagccgacaccacggaaagatgtgctttacagaggcaggatgacgccaatcggcctagggccggcggtgtttcgtctagattaatggcgagggaagtccccaatagtccttttgaaaccttttcactcttgcctggtgaaagcgcttgtcagccgtaaatcgcgaatacaatgctaagctctgaggcccttgctaaatccaagtaggagcagggatctgcgcggcctcaccctcgggtttccgcagggcgtctcgagagctgcggatgggggcagcaggagccgggcgggaacagaggaaagcgccggccctgagacctagggaggagcctcggtgaaggaacccggggcgggttcctgcctagatctccaagaagctccaaaaatggcgggcggcaactcggcgagccggacgcgcaggcgccaccgtggccgtccttccgccagccgcgggcggcccaagaaccgtccacagcgcccttatccagaagcctacgcctctcgcgattggctgaactgcgcgagcgctccgtgtgggggcggggccgccacgcagcggccacgtttcccgccccgctggtgcgcgtgcgcgcaatccccactggaaagcgtttgcgcgcgcccctgccgcggcccctagctcgcgcctcagctccctcccctttccgggcaggcccgtcccgtcagcaaggcagtgagcaccgcggccagcagagggcggtccggacccaagtctgcagcggcgccattggcgtgtggaaaatgccaccagatggcgggttaggattgcagctccgttgaaggcgcggcccccgctcccgaacccccggcgaccaccccgtaacaacccccccacatcgggaataacacaccggagacttttggggggaaactaggtcgatggtcggcggcgcccggatgggcagctgaggattgcctttgaggttattttaaaagttttgagttgtacagcacttgattattttgctgcattgtgaaaggacctctccagcaatgattacttcagaattaccagtgttacaggattcaactaatgaaactactgcccattccgatgctggcagcgagcttgaagaaacagaggtcaaaggaaaaagaaaaaggggtcgtcctggccggcctccatctacaaataagaaacctcgaaaatctccaggtgagaagagcagaattgaagctggaattagaggagcaggccgtggaagagctaatggacaccctcaacagaatggggaaggggagcctgtcacattatttgaggtggtgaaactggggaaaagtgcaatgcagtccgtggtggatgactggattgaatcatataaacaagacagggacatcgcacttctggatttaatcaacttttttatccagtgttcaggatgtcgaggtactgtgagaatagagatgtttcgaaatatgcagaatgcagaaatcatcagaaaaatgactgaagaatttgatgaggacagtggtgattatcctcttaccatgcctggacctcagtggaaaaaatttcgttcaaacttttgtgaatttattggagtcctgattcgacagtgtcagtatagcataatttatgatgagtatatgatggacacagtaatctcccttttgacgggtttgtcagactcccaggtcagagcttttaggcatacaagtaccctggctgccatgaagctcatgactgctctggtgaatgttgccttaaacctcagtattcatcaggataatacccagagacaatatgaagccgagagaaataaaatgattgggaagagagccaatgaaaggttggagttactacttcagaaacgcaaagagctgcaagaaaatcaggatgaaatcgaaaatatgatgaactctatttttaagggtatatttgttcatagataccgtgatgctattgctgagattagagccatttgtattgaagaaattggagtatggatgaaaatgtatagtgatgccttcctaaatgacagttacctaaaatatgttggctggactcttcatgacaggcaaggggaagtcaggctgaagtgtttgaaagctctgcagagtctatataccaatagagaattattccccaaattggaactattcactaaccgattcaaggatcgcattgtatcaatgacacttgataaagaatatgatgttgctgtggaagctattcgattggttactctgatacttcatggaagtgaagaagctctttccaatgaagactgtgaaaatgtttaccacttggtgtactcggcacatcgccctgttgctgtggcagctggagagttccttcacaaaaagctatttagcagacatgacccacaagcagaagaagcattagcaaagaggaggggaagaaacagcccgaatggaaacctcattaggatgctggttcttttctttcttgaaagtgagttacatgaacatgcagcctacttggtggacagtttatgggagagctctcaagaactgttgaaagactgggaatgtatgacagagttgctattagaagaacctgttcaaggagaggaagcaatgtctgatcgtcaagagagtgctcttatagagctaatggtttgtacaattcgtcaagctgctgaggcacatcctccagtgggaaggggtaccggcaagagagtgctaactgccaaagaaaggaaaactcaaattgatgatagaaacaaattgactgaacattttattattacacttcctatgttactgtcaaagtattctgcagatgcagagaaggtagcaaacttgctacaaatcccacagtattttgatttagaaatctacagcacaggtagaatggaaaagcatctggatgctttattaaaacagattaagtttgttgtggagaaacacgtagaatcagatgttctagaagcctgcagtaaaacctatagtatcttatgcagtgaagaatataccatccagaacagagttgacatagctcgaagccagctgattgatgagtttgtagatcgattcaatcattctgtggaagacctattgcaagagggagaagaagctgatgatgatgacatttacaatgttctttctacattaaagcggttaacttcttttcacaatgcacatgatctcacaaaatgggatctctttggtaattgctacagattattgaagactggaattgaacatggagccatgccagaacagatagtcgtgcaagcactgcagtgttcccattattcgattctttggcagttggtgaaaattactgatggctctccttccaaagaggatttgttggtattgaggaaaacggtgaaatcctttttggctgtttgccagcagtgcctgtctaatgttaatactccagtgaaagaacaggctttcatgttactctgtgatcttctgatgattttcagccaccaattaatgacaggtggcagagagggccttcagcctttggtgttcaatccagatactggactccaatctgaactcctcagttttgtgatggatcacgtttttattgaccaagacgaggagaaccagagcatggagggtgatgaagaagatgaagctaataaaattgaggccttacataaaagaaggaatctacttgctgctttcagcaaacttatcatttatgacattgttgacatgcatgcagctgcagacatcttcaaacactacatgaagtattacaatgactatggtgatattattaaggaaacactgagtaaaaccaggcagattgataaaattcagtgtgccaagactctcattctcagtttgcaacagttatttaatgaacttgttcaagagcaaggtcccaacctagataggacatctgcccatgtcagtggcattaaagaactggcacgtcgctttgcccttacatttggattggaccagattaagacacgagaagcagttgccacacttcacaaggatggcatagagtttgcatttaaataccaaaatcagaaaggacaagagtatccacctcctaatctggcttttcttgaagtactaagtgaattttcttctaaacttcttcgacaggacaaaaagacagttcattcatacctagagaaattccttaccgagcagatgatggaaaggagggaggatgtatggcttccactcatctcctatagaaattcattagtcactgggggtgaagatgatagaatgtctgtgaacagtggaagtagcagcagcaaaacctcatcagtaaggaataagaaaggacgacctccacttcataaaaaacgagtagaagatgagagtctggataacacatggctaaacaggactgacaccatgattcagactcctggccccctgccagcaccacaactcacatccactgtactgcgggagaacagtcggcccatgggagaccagattcaagaacctgagtctgaacatggttctgaaccagactttttacacaatcctcagatgcagatctcttggttaggccagccgaagttagaagacttaaatcggaaggacagaacaggaatgaactacatgaaagtgagaactggagtgaggcatgctgttcggggtctaatggaggaagatgctgagcccatctttgaagatgtgatgatgtcatcccgaagccagttagaagatatgaatgaagaatttgaggacaccatggttattgatctgcctccatcaagaaatcggcgagagagagctgagctaaggccagacttctttgactctgcagctatcatagaagatgattcaggatttggaatgcctatgttctgaagtctgaagaaaatttacaaatctggaactctattatttagagctagaggcctatatactgtgatagcttgtatggggaaaaacacttttgatgtgatctgatttgttttttaatcaaatgattaaggtcaatccctttttgcagtgacagaagaggagcatgtaaattacccaagggaatgttggtgaatgtcaactcagaaagactgacctgaaaatcatttgtgtcctactgttggacttatcccaatacagatgtgtgtgtttttctggagggaggaagaaattttaaatttttaaaacagctgtcaagataaacactgttatacacctgttttatgaaaactcaacattgagtaaaaaaaaacatatttttaactttattttcctgttgtacaatttaaaaaccgttttaacattttgcctttttatgttttaaaagctaaccatttttattaaacctatgagtaagcagctcatcctaattgcgaagagtgttttggagttcactggatttggttgacctttgtggaacacaaataatgaaggagcagaacattgacaagctaagatgaaattctgacatagtacatctctgccaaaaaccacacaccctctgtggatatggatatgaattcccagattttatatactcttgaataaaaggtttatttttatttataagtgggcataaaataagaaatgtccatgcagccatttttccaacagatgctgtacaccgttcattttatatagactagggagattcaaatacagtgcattttctattggtatttgttctgtgcatttttagcaacttctaccagcaaataaagtattctcagtaaaacgaaaatgattctcaagttatcagtttgctgtttttaccacttatttcatgccctgccaaattcaagttacacagacttccattttcttaagataatcaatcatgaagaaatcctttatcaatcattcaaaagtaattttaagtgtaacataactgtgtttacttcccatgcacttaatacccttatgcgctaattttgtgaattaagtttactgattatagaagtatgtgctgcatagaagtctgtgcttagagggtgaagttcctaagcttaccttgaattacagctacatttcagtgttaaatgtgcatattaagaataattcttttggggaaagaaattatgaatcttcaggacagtctacaatggtttagagttacattctgcctagacttttatgacttgctgctattgttttaaaaaccccacttagtctcttcctttctgatttctaaagtaagcctcagaatttccaaaccaattcatccacagctgtttctgggctggtttttaaagtagctgcaacagaatcatgaggctttccctttttatcaaatacgaaaaacattttttaaaattctgcacacccagtgatcatcttttgtgcgggaaagcaagatgatgatggatgattttattcatccttttagtaaagacacaaaacatttttctcaacatttgtacagttctgaaaaaaacctggtcaccaaaaatatcttctctgctaattcagcaattcttgggctccagttaggggagctggggcctcactttctcccagaattgtgggcttcactggaagtgaaggtgcaggaatgactggactgtccaccccagccctgcctgcctgtggttttggccagggagcaagccatgaggtgccctggcacatgcacaaattgatcctttgcgtgacagtcttgtatggaaaacagatgctgacagaattgtagactaccatgccacacaaaaaggctaaatatctactccaatgggtttccagttcagtttgaagtcaatcaaatttttgtattttcggtgtctccttgattggttttgctagtaattctgtaaattgtacatttgcaatatgaggttttttttccttttgtacaatttgaaactgatgcttcacctttcctttaataaactattcaaaatca

SEQ ID NO: 24501 - DNA, 6087 bp, Homo sapiens
  misc_feature (14)..(14): n is a, c, g, or t
acatttgtgcaatngaggtggtacggtcggattccgggttgtaaatgccaccagatggcgggttaggattgcagctccgttgaaggcgcggcccccgctcccgaacccccggcgaccaccccgtaacaacccccccacatcgggaataacacaccggagacttttggggggaaactaggtcgatggtcggcggcgcccggatgggcagctgaggattgcctttgaggttattttaaaagttttgagttgtacagcacttgattattttgctgcattgtgaaaggacctctccagcaatgattacttcagaattaccagtgttacaggattcaactaatgaaactactgcccattccgatgctggcagcgagcttgaagaaacagaggtcaaaggaaaaagaaaaaggggtcgtcctggccggcctccatctacaaataagaaacctcgaaaatctccaggtgagaagagcagaattgaagctggaattagaggagcaggccgtggaagagctaatggacaccctcaacagaatggggaaggggagcctgtcacattatttgaggtggtgaaactggggaaaagtgcaatgcagtccgtggtggatgactggattgaatcatataaacaagacagggacatcgcacttctggatttaatcaacttttttatccagtgttcaggatgtcgaggtactgtgagaatagagatgtttcgaaatatgcagaatgcagaaatcatcagaaaaatgactgaagaatttgatgaggacagtggtgattatcctcttaccatgcctggacctcagtggaaaaaatttcgttcaaacttttgtgaatttattggagtcctgattcgacagtgtcagtatagcataatttatgatgagtatatgatggacacagtaatctcccttttgacgggtttgtcagactcccaggtcagagcttttaggcatacaagtaccctggctgccatgaagctcatgactgctctggtgaatgttgccttaaacctcagtattcatcaggataatacccagagacaatatgaagccgagagaaataaaatgattgggaagagagccaatgaaaggttggagttactacttcagaaacgcaaagagctgcaagaaaatcaggatgaaatcgaaaatatgatgaactctatttttaagggtatatttgttcatagataccgtgatgctattgctgagattagagccatttgtattgaagaaattggagtatggatgaaaatgtatagtgatgccttcctaaatgacagttacctaaaatatgttggctggactcttcatgacaggcaaggggaagtcaggctgaagtgtttgaaagctctgcagagtctatataccaatagagaattattccccaaattggaactattcactaaccgattcaaggatcgcattgtatcaatgacacttgataaagaatatgatgttgctgtggaagctattcgattggttactctgatacttcatggaagtgaagaagctctttccaatgaagactgtgaaaatgtttaccacttggtgtactcggcacatcgccctgttgctgtggcagctggagagttccttcacaaaaagctatttagcagacatgacccacaagcagaagaagcattagcaaagaggaggggaagaaacagcccgaatggaaacctcattaggatgctggttcttttctttcttgaaagtgagttacatgaacatgcagcctacttggtggacagtttatgggagagctctcaagaactgttgaaagactgggaatgtatgacagagttgctattagaagaacctgttcaaggagaggaagcaatgtctgatcgtcaagagagtgctcttatagagctaatggtttgtacaattcgtcaagctgctgaggcacatcctccagtgggaaggggtaccggcaagagagtgctaactgccaaagaaaggaaaactcaaattgatgatagaaacaaattgactgaacattttattattacacttcctatgttactgtcaaagtattctgcagatgcagagaaggtagcaaacttgctacaaatcccacagtattttgatttagaaatctacagcacaggtagaatggaaaagcatctggatgctttattaaaacagattaagtttgttgtggagaaacacgtagaatcagatgttctagaagcctgcagtaaaacctatagtatcttatgcagtgaagaatataccatccagaacagagttgacatagctcgaagccagctgattgatgagtttgtagatcgattcaatcattctgtggaagacctattgcaagagggagaagaagctgatgatgatgacatttacaatgttctttctacattaaagcggttaacttcttttcacaatgcacatgatctcacaaaatgggatctctttggtaattgctacagattattgaagactggaattgaacatggagccatgccagaacagatagtcgtgcaagcactgcagtgttcccattattcgattctttggcagttggtgaaaattactgatggctctccttccaaagaggatttgttggtattgaggaaaacggtgaaatcctttttggctgtttgccagcagtgcctgtctaatgttaatactccagtgaaagaacaggctttcatgttactctgtgatcttctgatgattttcagccaccaattaatgacaggtggcagagagggccttcagcctttggtgttcaatccagatactggactccaatctgaactcctcagttttgtgatggatcacgtttttattgaccaagacgaggagaaccagagcatggagggtgatgaagaagatgaagctaataaaattgaggccttacataaaagaaggaatctacttgctgctttcagcaaacttatcatttatgacattgttgacatgcatgcagctgcagacatcttcaaacactacatgaagtattacaatgactatggtgatattattaaggaaacactgagtaaaaccaggcagattgataaaattcagtgtgccaagactctcattctcagtttgcaacagttatttaatgaacttgttcaagagcaaggtcccaacctagataggacatctgcccatgtcagtggcattaaagaactggcacgtcgctttgcccttacatttggattggaccagattaagacacgagaagcagttgccacacttcacaaggatggcatagagtttgcatttaaataccaaaatcagaaaggacaagagtatccacctcctaatctggcttttcttgaagtactaagtgaattttcttctaaacttcttcgacaggacaaaaagacagttcattcatacctagagaaattccttaccgagcagatgatggaaaggagggaggatgtatggcttccactcatctcctatagaaattcattagtcactgggggtgaagatgatagaatgtctgtgaacagtggaagtagcagcagcaaaacctcatcagtaaggaataagaaaggacgacctccacttcataaaaaacgagtagaagatgagagtctggataacacatggctaaacaggactgacaccatgattcagactcctggccccctgccagcaccacaactcacatccactgtactgcgggagaacagtcggcccatgggagaccagattcaagaacctgagtctgaacatggttctgaaccagactttttacacaatcctcagatgcagatctcttggttaggccagccgaagttagaagacttaaatcggaaggacagaacaggaatgaactacatgaaagtgagaactggagtgaggcatgctgttcggggtctaatggaggaagatgctgagcccatctttgaagatgtgatgatgtcatcccgaagccagttagaagatatgaatgaagaatttgaggacaccatggttattgatctgcctccatcaagaaatcggcgagagagagctgagctaaggccagacttctttgactctgcagctatcatagaagatgattcaggatttggaatgcctatgttctgaagtctgaagaaaatttacaaatctggaactctattatttagagctagaggcctatatactgtgatagcttgtatggggaaaaacacttttgatgtgatctgatttgttttttaatcaaatgattaaggtcaatccctttttgcagtgacagaagaggagcatgtaaattacccaagggaatgttggtgaatgtcaactcagaaagactgacctgaaaatcatttgtgtcctactgttggacttatcccaatacagatgtgtgtgtttttctggagggaggaagaaattttaaatttttaaaacagctgtcaagataaacactgttatacacctgttttatgaaaactcaacattgagtaaaaaaaaacatatttttaactttattttcctgttgtacaatttaaaaaccgttttaacattttgcctttttatgttttaaaagctaaccatttttattaaacctatgagtaagcagctcatcctaattgcgaagagtgttttggagttcactggatttggttgacctttgtggaacacaaataatgaaggagcagaacattgacaagctaagatgaaattctgacatagtacatctctgccaaaaaccacacaccctctgtggatatggatatgaattcccagattttatatactcttgaataaaaggtttatttttatttataagtgggcataaaataagaaatgtccatgcagccatttttccaacagatgctgtacaccgttcattttatatagactagggagattcaaatacagtgcattttctattggtatttgttctgtgcatttttagcaacttctaccagcaaataaagtattctcagtaaaacgaaaatgattctcaagttatcagtttgctgtttttaccacttatttcatgccctgccaaattcaagttacacagacttccattttcttaagataatcaatcatgaagaaatcctttatcaatcattcaaaagtaattttaagtgtaacataactgtgtttacttcccatgcacttaatacccttatgcgctaattttgtgaattaagtttactgattatagaagtatgtgctgcatagaagtctgtgcttagagggtgaagttcctaagcttaccttgaattacagctacatttcagtgttaaatgtgcatattaagaataattcttttggggaaagaaattatgaatcttcaggacagtctacaatggtttagagttacattctgcctagacttttatgacttgctgctattgttttaaaaaccccacttagtctcttcctttctgatttctaaagtaagcctcagaatttccaaaccaattcatccacagctgtttctgggctggtttttaaagtagctgcaacagaatcatgaggctttccctttttatcaaatacgaaaaacattttttaaaattctgcacacccagtgatcatcttttgtgcgggaaagcaagatgatgatggatgattttattcatccttttagtaaagacacaaaacatttttctcaacatttgtacagttctgaaaaaaacctggtcaccaaaaatatcttctctgctaattcagcaattcttgggctccagttaggggagctggggcctcactttctcccagaattgtgggcttcactggaagtgaaggtgcaggaatgactggactgtccaccccagccctgcctgcctgtggttttggccagggagcaagccatgaggtgccctggcacatgcacaaattgatcctttgcgtgacagtcttgtatggaaaacagatgctgacagaattgtagactaccatgccacacaaaaaggctaaatatctactccaatgggtttccagttcagtttgaagtcaatcaaatttttgtattttcggtgtctccttgattggttttgctagtaattctgtaaattgtacatttgcaatatgaggttttttttccttttgtacaatttgaaactgatgcttcacctttcctttaataaactattcaaaatca

SEQ ID NO: 24502 - DNA, 4863 bp, Homo sapiens
tgtggtgatctagaggatccctatggatgaaaatgtatagtgatgccttcctaaatgacagttacctaaaatatgttggctggactcttcatgacaggcaaggggaagtcaggctgaagtgtttgaaagctctgcagagtctatataccaatagagaattattccccaaattggaactattcactaaccgattcaaggatcgcattgtatcaatgacacttgataaagaatatgatgttgctgtggaagctattcgattggttactctgatacttcatggaagtgaagaagctctttccaatgaagactgtgaaaatgtttaccacttggtgtactcggcacatcgccctgttgctgtggcagctggagagttccttcacaaaaagctatttagcagacatgacccacaagcagaagaagcattagcaaagaggaggggaagaaacagcccgaatggaaacctcattaggatgctggttcttttctttcttgaaagtgagttacatgaacatgcagcctacttggtggacagtttatgggagagctctcaagaactgttgaaagactgggaatgtatgacagagttgctattagaagaacctgttcaaggagaggaagcaatgtctgatcgtcaagagagtgctcttatagagctaatggtttgtacaattcgtcaagctgctgaggcacatcctccagtgggaaggggtaccggcaagagagtgctaactgccaaagaaaggaaaactcaaattgatgatagaaacaaattgactgaacattttattattacacttcctatgttactgtcaaagtattctgcagatgcagagaaggtagcaaacttgctacaaatcccacagtattttgatttagaaatctacagcacaggtagaatggaaaagcatctggatgctttattaaaacagattaagtttgttgtggagaaacacgtagaatcagatgttctagaagcctgcagtaaaacctatagtatcttatgcagtgaagaatataccatccagaacagagttgacatagctcgaagccagctgattgatgagtttgtagatcgattcaatcattctgtggaagacctattgcaagagggagaagaagctgatgatgatgacatttacaatgttctttctacattaaagcggttaacttcttttcacaatgcacatgatctcacaaaatgggatctctttggtaattgctacagattattgaagactggaattgaacatggagccatgccagaacagatagtcgtgcaagcactgcagtgttcccattattcgattctttggcagttggtgaaaattactgatggctctccttccaaagaggatttgttggtattgaggaaaacggtgaaatcctttttggctgtttgccagcagtgcctgtctaatgttaatactccagtgaaagaacaggctttcatgttactctgtgatcttctgatgattttcagccaccaattaatgacaggtggcagagagggccttcagcctttggtgttcaatccagatactggactccaatctgaactcctcagttttgtgatggatcacgtttttattgaccaagacgaggagaaccagagcatggagggtgatgaagaagatgaagctaataaaattgaggccttacataaaagaaggaatctacttgctgctttcagcaaacttatcatttatgacattgttgacatgcatgcagctgcagacatcttcaaacactacatgaagtattacaatgactatggtgatattattaaggaaacactgagtaaaaccaggcagattgataaaattcagtgtgccaagactctcattctcagtttgcaacagttatttaatgaacttgttcaagagcaaggtcccaacctagataggacatctgcccatgtcagtggcattaaagaactggcacgtcgctttgcccttacatttggattggaccagattaagacacgagaagcagttgccacacttcacaaggatggcatagagtttgcatttaaataccaaaatcagaaaggacaagagtatccacctcctaatctggcttttcttgaagtactaagtgaattttcttctaaacttcttcgacaggacaaaaagacagttcattcatacctagagaaattccttaccgagcagatgatggaaaggagggaggatgtatggcttccactcatctcctatagaaattcattagtcactgggggtgaagatgatagaatgtctgtgaacagtggaagtagcagcagcaaaacctcatcagtaaggaataagaaaggacgacctccacttcataaaaaacgagtagaagatgagagtctggataacacatggctaaacaggactgacaccatgattcagactcctggccccctgccagcaccacaactcacatccactgtactgcgggagaacagtcggcccatgggagaccagattcaagaacctgagtctgaacatggttctgaaccagactttttacacaatcctcagatgcagatctcttggttaggccagccgaagttagaagacttaaatcggaaggacagaacaggaatgaactacatgaaagtgagaactggagtgaggcatgctgttcggggtctaatggaggaagatgctgagcccatctttgaagatgtgatgatgtcatcccgaagccagttagaagatatgaatgaagaatttgaggacaccatggttattgatctgcctccatcaagaaatcggcgagagagagctgagctaaggccagacttctttgactctgcagctatcatagaagatgattcaggatttggaatgcctatgttctgaagtctgaagaaaatttacaaatctggaactctattatttagagctagaggcctatatactgtgatagcttgtatggggaaaaacacttttgatgtgatctgatttgttttttaatcaaatgattaaggtcaatccctttttgcagtgacagaagaggagcatgtaaattacccaagggaatgttggtgaatgtcaactcagaaagactgacctgaaaatcatttgtgtcctactgttggacttatcccaatacagatgtgtgtgtttttctggagggaggaagaaattttaaatttttaaaacagctgtcaagataaacactgttatacacctgttttatgaaaactcaacattgagtaaaaaaaaacatatttttaactttattttcctgttgtacaatttaaaaaccgttttaacattttgcctttttatgttttaaaagctaaccatttttattaaacctatgagtaagcagctcatcctaattgcgaagagtgttttggagttcactggatttggttgacctttgtggaacacaaataatgaaggagcagaacattgacaagctaagatgaaattctgacatagtacatctctgccaaaaaccacacaccctctgtggatatggatatgaattcccagattttatatactcttgaataaaaggtttatttttatttataagtgggcataaaataagaaatgtccatgcagccatttttccaacagatgctgtacaccgttcattttatatagactagggagattcaaatacagtgcattttctattggtatttgttctgtgcatttttagcaacttctaccagcaaataaagtattctcagtaaaacgaaaatgattctcaagttatcagtttgctgtttttaccacttatttcatgccctgccaaattcaagttacacagacttccattttcttaagataatcaatcatgaagaaatcctttatcaatcattcaaaagtaattttaagtgtaacataactgtgtttacttcccatgcacttaatacccttatgcgctaattttgtgaattaagtttactgattatagaagtatgtgctgcatagaagtctgtgcttagagggtgaagttcctaagcttaccttgaattacagctacatttcagtgttaaatgtgcatattaagaataattcttttggggaaagaaattatgaatcttcaggacagtctacaatggtttagagttacattctgcctagacttttatgacttgctgctattgttttaaaaaccccacttagtctcttcctttctgatttctaaagtaagcctcagaatttccaaaccaattcatccacagctgtttctgggctggtttttaaagtagctgcaacagaatcatgaggctttccctttttatcaaatacgaaaaacattttttaaaattctgcacacccagtgatcatcttttgtgcgggaaagcaagatgatgatggatgattttattcatccttttagtaaagacacaaaacatttttctcaacatttgtacagttctgaaaaaaacctggtcaccaaaaatatcttctctgctaattcagcaattcttgggctccagttaggggagctggggcctcactttctcccagaattgtgggcttcactggaagtgaaggtgcaggaatgactggactgtccaccccagccctgcctgcctgtggttttggccagggagcaagccatgaggtgccctggcacatgcacaaattgatcctttgcgtgacagtcttgtatggaaaacagatgctgacagaattgtagactaccatgccacacaaaaaggctaaatatctactccaatgggtttccagttcagtttgaagtcaatcaaatttttgtattttcggtgtctccttgattggttttgctagtaattctgtaaattgtacatttgcaatatgaggttttttttccttttgtacaatttgaaactgatgcttcacctttcctttaataaactattcaaaatca

SEQ ID NO: 24503 - DNA, 4527 bp, Homo sapiens
tgatggtacacgcattgagctttgcgctggagagtttcttcaccgcgaagctatttagcagacatgacccacaagcagaagaagcattagcaaagaggaggggaagaaacagcccgaatggaaacctcattaggatgctggttcttttctttcttgaaagtgagttacatgaacatgcagcctacttggtggacagtttatgggagagctctcaagaactgttgaaagactgggaatgtatgacagagttgctattagaagaacctgttcaaggagaggaagcaatgtctgatcgtcaagagagtgctcttatagagctaatggtttgtacaattcgtcaagctgctgaggcacatcctccagtgggaaggggtaccggcaagagagtgctaactgccaaagaaaggaaaactcaaattgatgatagaaacaaattgactgaacattttattattacacttcctatgttactgtcaaagtattctgcagatgcagagaaggtagcaaacttgctacaaatcccacagtattttgatttagaaatctacagcacaggtagaatggaaaagcatctggatgctttattaaaacagattaagtttgttgtggagaaacacgtagaatcagatgttctagaagcctgcagtaaaacctatagtatcttatgcagtgaagaatataccatccagaacagagttgacatagctcgaagccagctgattgatgagtttgtagatcgattcaatcattctgtggaagacctattgcaagagggagaagaagctgatgatgatgacatttacaatgttctttctacattaaagcggttaacttcttttcacaatgcacatgatctcacaaaatgggatctctttggtaattgctacagattattgaagactggaattgaacatggagccatgccagaacagatagtcgtgcaagcactgcagtgttcccattattcgattctttggcagttggtgaaaattactgatggctctccttccaaagaggatttgttggtattgaggaaaacggtgaaatcctttttggctgtttgccagcagtgcctgtctaatgttaatactccagtgaaagaacaggctttcatgttactctgtgatcttctgatgattttcagccaccaattaatgacaggtggcagagagggccttcagcctttggtgttcaatccagatactggactccaatctgaactcctcagttttgtgatggatcacgtttttattgaccaagacgaggagaaccagagcatggagggtgatgaagaagatgaagctaataaaattgaggccttacataaaagaaggaatctacttgctgctttcagcaaacttatcatttatgacattgttgacatgcatgcagctgcagacatcttcaaacactacatgaagtattacaatgactatggtgatattattaaggaaacactgagtaaaaccaggcagattgataaaattcagtgtgccaagactctcattctcagtttgcaacagttatttaatgaacttgttcaagagcaaggtcccaacctagataggacatctgcccatgtcagtggcattaaagaactggcacgtcgctttgcccttacatttggattggaccagattaagacacgagaagcagttgccacacttcacaaggatggcatagagtttgcatttaaataccaaaatcagaaaggacaagagtatccacctcctaatctggcttttcttgaagtactaagtgaattttcttctaaacttcttcgacaggacaaaaagacagttcattcatacctagagaaattccttaccgagcagatgatggaaaggagggaggatgtatggcttccactcatctcctatagaaattcattagtcactgggggtgaagatgatagaatgtctgtgaacagtggaagtagcagcagcaaaacctcatcagtaaggaataagaaaggacgacctccacttcataaaaaacgagtagaagatgagagtctggataacacatggctaaacaggactgacaccatgattcagactcctggccccctgccagcaccacaactcacatccactgtactgcgggagaacagtcggcccatgggagaccagattcaagaacctgagtctgaacatggttctgaaccagactttttacacaatcctcagatgcagatctcttggttaggccagccgaagttagaagacttaaatcggaaggacagaacaggaatgaactacatgaaagtgagaactggagtgaggcatgctgttcggggtctaatggaggaagatgctgagcccatctttgaagatgtgatgatgtcatcccgaagccagttagaagatatgaatgaagaatttgaggacaccatggttattgatctgcctccatcaagaaatcggcgagagagagctgagctaaggccagacttctttgactctgcagctatcatagaagatgattcaggatttggaatgcctatgttctgaagtctgaagaaaatttacaaatctggaactctattatttagagctagaggcctatatactgtgatagcttgtatggggaaaaacacttttgatgtgatctgatttgttttttaatcaaatgattaaggtcaatccctttttgcagtgacagaagaggagcatgtaaattacccaagggaatgttggtgaatgtcaactcagaaagactgacctgaaaatcatttgtgtcctactgttggacttatcccaatacagatgtgtgtgtttttctggagggaggaagaaattttaaatttttaaaacagctgtcaagataaacactgttatacacctgttttatgaaaactcaacattgagtaaaaaaaaacatatttttaactttattttcctgttgtacaatttaaaaaccgttttaacattttgcctttttatgttttaaaagctaaccatttttattaaacctatgagtaagcagctcatcctaattgcgaagagtgttttggagttcactggatttggttgacctttgtggaacacaaataatgaaggagcagaacattgacaagctaagatgaaattctgacatagtacatctctgccaaaaaccacacaccctctgtggatatggatatgaattcccagattttatatactcttgaataaaaggtttatttttatttataagtgggcataaaataagaaatgtccatgcagccatttttccaacagatgctgtacaccgttcattttatatagactagggagattcaaatacagtgcattttctattggtatttgttctgtgcatttttagcaacttctaccagcaaataaagtattctcagtaaaacgaaaatgattctcaagttatcagtttgctgtttttaccacttatttcatgccctgccaaattcaagttacacagacttccattttcttaagataatcaatcatgaagaaatcctttatcaatcattcaaaagtaattttaagtgtaacataactgtgtttacttcccatgcacttaatacccttatgcgctaattttgtgaattaagtttactgattatagaagtatgtgctgcatagaagtctgtgcttagagggtgaagttcctaagcttaccttgaattacagctacatttcagtgttaaatgtgcatattaagaataattcttttggggaaagaaattatgaatcttcaggacagtctacaatggtttagagttacattctgcctagacttttatgacttgctgctattgttttaaaaaccccacttagtctcttcctttctgatttctaaagtaagcctcagaatttccaaaccaattcatccacagctgtttctgggctggtttttaaagtagctgcaacagaatcatgaggctttccctttttatcaaatacgaaaaacattttttaaaattctgcacacccagtgatcatcttttgtgcgggaaagcaagatgatgatggatgattttattcatccttttagtaaagacacaaaacatttttctcaacatttgtacagttctgaaaaaaacctggtcaccaaaaatatcttctctgctaattcagcaattcttgggctccagttaggggagctggggcctcactttctcccagaattgtgggcttcactggaagtgaaggtgcaggaatgactggactgtccaccccagccctgcctgcctgtggttttggccagggagcaagccatgaggtgccctggcacatgcacaaattgatcctttgcgtgacagtcttgtatggaaaacagatgctgacagaattgtagactaccatgccacacaaaaaggctaaatatctactccaatgggtttccagttcagtttgaagtcaatcaaatttttgtattttcggtgtctccttgattggttttgctagtaattctgtaaattgtacatttgcaatatgaggttttttttccttttgtacaatttgaaactgatgcttcacctttcctttaataaactattcaaaatca

SEQ ID NO: 24504 - DNA, 5118 bp, Homo sapiens
  misc_feature (5112)..(5112): n is a, c, g, or t
aggaggtggtcacagatattttataatggaggcaaggtcaaaccggaattggagtcccatagctctgagcccaggaaactggatgaatttatctattagtatggactgggactggcatctttaacaacatggaaagcttgaaacagtctttgtggaaaataggagatcagccagagattagaagaaaacgcaagaaaattataagtaggagtccagtcacgaattcatatccaatctggtcagttatgacttcctccagcgaaaagccacacatcttgcaaacccttgagagagaaaacacaaataggggtaacctactggagacaggcccttaagactataaagtagttgagcgattccatactgaaatagagttggctatagcgatagagaagttagtcatatatgggcctaatgatccaggagagtaaggattcacttttgtggtgaaaagttgtaagcaggtgaaaggtagggatccatggccacggacgggcaggtggagatcagggaagaggcgacgttaaacataaatagtttgttaatgatttcaccttactgattatttctcttttggcatctagaaggctaagattctcatgtgtatttcagagctactgaaagtagtcctaggttgtggagggagaaatccactttcacagctgagtctatcttctcagtctagttatattctcctctcacaaactagccaatgctgccgccttatgcaaagccgacaccacggaaagatgtgctttacagaggcaggatgacgccaatcggcctagggccggcggtgtttcgtctagattaatggcgagggaagtccccaatagtccttttgaaaccttttcactcttgcctggtgaaagcgcttgtcagccgtaaatcgcgaatacaatgctaagctctgaggcccttgctaaatccaagtaggagcagggatctgcgcggcctcaccctcgggtttccgcagggcgtctcgagagctgcggatgggggcagcaggagccgggcgggaacagaggaaagcgccggccctgagacctagggaggagcctcggtgaaggaacccggggcgggttcctgcctagatctccaagaagctccaaaaatggcgggcggcaactcggcgagccggacgcgcaggcgccaccgtggccgtccttccgccagccgcgggcggcccaagaaccgtccacagcgcccttatccagaagcctacgcctctcgcgattggctgaactgcgcgagcgctccgtgtgggggcggggccgccacgcagcggccacgtttcccgccccgctggtgcgcgtgcgcgcaatccccactggaaagcgtttgcgcgcgcccctgccgcggcccctagctcgcgcctcagctccctcccctttccgggcaggcccgtcccgtcagcaaggcagtgagcaccgcggccagcagagggcggtccggacccaagtctgcagcggcgccattggcgtgtggaaaatgccaccagatggcgggttaggattgcagctccgttgaaggcgcggcccccgctcccgaacccccggcgaccaccccgtaacaacccccccacatcgggaataacacaccggagacttttggggggaaactaggtcgatggtcggcggcgcccggatgggcagctgaggattgcctttgaggttattttaaaagttttgagttgtacagcacttgattattttgctgcattgtgaaaggacctctccagcaatgattacttcagaattaccagtgttacaggattcaactaatgaaactactgcccattccgatgctggcagcgagcttgaagaaacagaggtcaaaggaaaaagaaaaaggggtcgtcctggccggcctccatctacaaataagaaacctcgaaaatctccaggtgagaagagcagaattgaagctggaattagaggagcaggccgtggaagagctaatggacaccctcaacagaatggggaaggggagcctgtcacattatttgaggtggtgaaactggggaaaagtgcaatgcagtccgtggtggatgactggattgaatcatataaacaagacagggacatcgcacttctggatttaatcaacttttttatccagtgttcaggatgtcgaggtactgtgagaatagagatgtttcgaaatatgcagaatgcagaaatcatcagaaaaatgactgaagaatttgatgaggacagtggtgattatcctcttaccatgcctggacctcagtggaaaaaatttcgttcaaacttttgtgaatttattggagtcctgattcgacagtgtcagtatagcataatttatgatgagtatatgatggacacagtaatctcccttttgacgggtttgtcagactcccaggtcagagcttttaggcatacaagtaccctggctgccatgaagctcatgactgctctggtgaatgttgccttaaacctcagtattcatcaggataatacccagagacaatatgaagccgagagaaataaaatgattgggaagagagccaatgaaaggttggagttactacttcagaaacgcaaagagctgcaagaaaatcaggatgaaatcgaaaatatgatgaactctatttttaagggtatatttgttcatagataccgtgatgctattgctgagattagagccatttgtattgaagaaattggagtatggatgaaaatgtatagtgatgccttcctaaatgacagttacctaaaatatgttggctggactcttcatgacaggcaaggggaagtcaggctgaagtgtttgaaagctctgcagagtctatataccaatagagaattattccccaaattggaactattcactaaccgattcaaggatcgcattgtatcaatgacacttgataaagaatatgatgttgctgtggaagctattcgattggttactctgatacttcatggaagtgaagaagctctttccaatgaagactgtgaaaatgtttaccacttggtgtactcggcacatcgccctgttgctgtggcagctggagagttccttcacaaaaagctatttagcagacatgacccacaagcagaagaagcattagcaaagaggaggggaagaaacagcccgaatggaaacctcattaggatgctggttcttttctttcttgaaagtgagttacatgaacatgcagcctacttggtggacagtttatgggagagctctcaagaactgttgaaagactgggaatgtatgacagagttgctattagaagaacctgttcaaggagaggaagcaatgtctgatcgtcaagagagtgctcttatagagctaatggtttgtacaattcgtcaagctgctgaggcacatcctccagtgggaaggggtaccggcaagagagtgctaactgccaaagaaaggaaaactcaaattgatgatagaaacaaattgactgaacattttattattacacttcctatgttactgtcaaagtattctgcagatgcagagaaggtagcaaacttgctacaaatcccacagtattttgatttagaaatctacagcacaggtagaatggaaaagcatctggatgctttattaaaacagattaagtttgttgtggagaaacacgtagaatcagatgttctagaagcctgcagtaaaacctatagtatcttatgcagtgaagaatataccatccagaacagagttgacatagctcgaagccagctgattgatgagtttgtagatcgattcaatcattctgtggaagacctattgcaagagggagaagaagctgatgatgatgacatttacaatgttctttctacattaaagcggttaacttcttttcacaatgcacatgatctcacaaaatgggatctctttggtaattgctacagattattgaagactggaattgaacatggagccatgccagaacagatagtcgtgcaagcactgcagtgttcccattattcgattctttggcagttggtgaaaattactgatggctctccttccaaagaggatttgttggtattgaggaaaacggtgaaatcctttttggctgtttgccagcagtgcctgtctaatgttaatactccagtgaaagaacaggctttcatgttactctgtgatcttctgatgattttcagccaccaattaatgacaggtggcagagagggccttcagcctttggtgttcaatccagatactggactccaatctgaactcctcagttttgtgatggatcacgtttttattgaccaagacgaggagaaccagagcatggagggtgatgaagaagatgaagctaataaaattgaggccttacataaaagaaggaatctacttgctgctttcagcaaacttatcatttatgacattgttgacatgcatgcagctgcagacatcttcaaacactacatgaagtattacaatgactatggtgatattattaaggaaacactgagtaaaaccaggcagattgataaaattcagtgtgccaagactctcattctcagtttgcaacagttatttaatgaacttgttcaagagcaaggtcccaacctagataggacatctgcccatgtcagtggcattaaagaactggcacgtcgctttgcccttacatttggattggaccagattaagacacgagaagcagttgccacacttcacaaggatggcatagagtttgcatttaaataccaaaatcagaaaggacaagagtatccacctcctaatctggcttttcttgaagtactaagtgaattttcttctacaagtttttgtgtgaactcatgttttcagttctcttgggtatatatctaggagtggaaatactgggtcacagggcaattctatgctttttgaggagctgccacactgtttttcacggaggctgcaccattttggattcccaccagcaacatatgagaactccgatttctccagaccctcaacaaaatttatctttcattttttgattatagtcatcttcatgggtatgaagtggtgtcttattgtggttttcacttacatttcactaatgattaataatgttgagcatcttttcatatacttatttgccatttgtgtttcttcttccttttncttttc

SEQ ID NO: 24505 - DNA, 3905 bp, Homo sapiens
aggaggtggtcacagatattttataatggaggcaaggtcaaaccggaattggagtcccatagctctgagcccaggaaactggatgaatttatctattagtatggactgggactggcatctttaacaacatggaaagcttgaaacagtctttgtggaaaataggagatcagccagagattagaagaaaacgcaagaaaattataagtaggagtccagtcacgaattcatatccaatctggtcagttatgacttcctccagcgaaaagccacacatcttgcaaacccttgagagagaaaacacaaataggggtaacctactggagacaggcccttaagactataaagtagttgagcgattccatactgaaatagagttggctatagcgatagagaagttagtcatatatgggcctaatgatccaggagagtaaggattcacttttgtggtgaaaagttgtaagcaggtgaaaggtagggatccatggccacggacgggcaggtggagatcagggaagaggcgacgttaaacataaatagtttgttaatgatttcaccttactgattatttctcttttggcatctagaaggctaagattctcatgtgtatttcagagctactgaaagtagtcctaggttgtggagggagaaatccactttcacagctgagtctatcttctcagtctagttatattctcctctcacaaactagccaatgctgccgccttatgcaaagccgacaccacggaaagatgtgctttacagaggcaggatgacgccaatcggcctagggccggcggtgtttcgtctagattaatggcgagggaagtccccaatagtccttttgaaaccttttcactcttgcctggtgaaagcgcttgtcagccgtaaatcgcgaatacaatgctaagctctgaggcccttgctaaatccaagtaggagcagggatctgcgcggcctcaccctcgggtttccgcagggcgtctcgagagctgcggatgggggcagcaggagccgggcgggaacagaggaaagcgccggccctgagacctagggaggagcctcggtgaaggaacccggggcgggttcctgcctagatctccaagaagctccaaaaatggcgggcggcaactcggcgagccggacgcgcaggcgccaccgtggccgtccttccgccagccgcgggcggcccaagaaccgtccacagcgcccttatccagaagcctacgcctctcgcgattggctgaactgcgcgagcgctccgtgtgggggcggggccgccacgcagcggccacgtttcccgccccgctggtgcgcgtgcgcgcaatccccactggaaagcgtttgcgcgcgcccctgccgcggcccctagctcgcgcctcagctccctcccctttccgggcaggcccgtcccgtcagcaaggcagtgagcaccgcggccagcagagggcggtccggacccaagtctgcagcggcgccattggcgtgtggaaaatgccaccagatggcgggttaggattgcagctccgttgaaggcgcggcccccgctcccgaacccccggcgaccaccccgtaacaacccccccacatcgggaataacacaccggagacttttggggggaaactaggtcgatggtcggcggcgcccggatgggcagctgaggattgcctttgaggttattttaaaagttttgagttgtacagcacttgattattttgctgcattgtgaaaggacctctccagcaatgattacttcagaattaccagtgttacaggattcaactaatgaaactactgcccattccgatgctggcagcgagcttgaagaaacagaggtcaaaggaaaaagaaaaaggggtcgtcctggccggcctccatctacaaataagaaacctcgaaaatctccaggtgagaagagcagaattgaagctggaattagaggagcaggccgtggaagagctaatggacaccctcaacagaatggggaaggggagcctgtcacattatttgaggtggtgaaactggggaaaagtgcaatgcagtccgtggtggatgactggattgaatcatataaacaagacagggacatcgcacttctggatttaatcaacttttttatccagtgttcaggatgtcgaggtactgtgagaatagagatgtttcgaaatatgcagaatgcagaaatcatcagaaaaatgactgaagaatttgatgaggacagtggtgattatcctcttaccatgcctggacctcagtggaaaaaatttcgttcaaacttttgtgaatttattggagtcctgattcgacagtgtcagtatagcataatttatgatgagtatatgatggacacagtaatctcccttttgacgggtttgtcagactcccaggtcagagcttttaggcatacaagtaccctggctgccatgaagctcatgactgctctggtgaatgttgccttaaacctcagtattcatcaggataatacccagagacaatatgaagccgagagaaataaaatgattgggaagagagccaatgaaaggttggagttactacttcagaaacgcaaagagctgcaagaaaatcaggatgaaatcgaaaatatgatgaactctatttttaagggtatatttgttcatagataccgtgatgctattgctgagattagagccatttgtattgaagaaattggagtatggatgaaaatgtatagtgatgccttcctaaatgacagttacctaaaatatgttggctggactcttcatgacaggcaaggggaagtcaggctgaagtgtttgaaagctctgcagagtctatataccaatagagaattattccccaaattggaactattcactaaccgattcaaggatcgcattgtatcaatgacacttgataaagaatatgatgttgctgtggaagctattcgattggttactctgatacttcatggaagtgaagaagctctttccaatgaagactgtgaaaatgtttaccacttggtgtactcggcacatcgccctgttgctgtggcagctggagagttccttcacaaaaagctatttagcagacatgacccacaagcagaagaagcattagcaaagaggaggggaagaaacagcccgaatggaaacctcattaggatgctggttcttttctttcttgaaagtgagttacatgaacatgcagcctacttggtggacagtttatgggagagctctcaagaactgttgaaagactgggaatgtatgacagagttgctattagaagaacctgttcaaggagaggaagcaatgtctgatcgtcaagagagtgctcttatagagctaatggtttgtacaattcgtcaagctgctgaggcacatcctccagtgggaaggggtaccggcaagagagtgctaactgccaaagaaaggaaaactcaaattgatgatagaaacaaattgactgaacattttattattacacttcctatgttactgtcaaagtattctgcagatgcagagaaggtagcaaacttgctacaaatcccacagtattttgatttagaaatctacagcacaggtagaatggaaaagcatctggatgctttattaaaacagattaagtttgttgtggagaaacacgtagaatcagatgttctagaagcctgcagtaaaacctatagtatcttatgcagtgaagaatataccatccagaacagagttgacatagctcgaagccagctgattgatgagtttgtagatcgattcaatcattctgtggaagacctattgcaagagggagaagaagctgatgatgatgacatttacaatgttctttctacattaaagcggttaacttcttttcacaagtacgttattttatttaaagtaaaggcaacgaggtggctcatgcctgtaacccc

SEQ ID NO: 24506 - DNA, 3030 bp, Homo sapiens
aggaggtggtcacagatattttataatggaggcaaggtcaaaccggaattggagtcccatagctctgagcccaggaaactggatgaatttatctattagtatggactgggactggcatctttaacaacatggaaagcttgaaacagtctttgtggaaaataggagatcagccagagattagaagaaaacgcaagaaaattataagtaggagtccagtcacgaattcatatccaatctggtcagttatgacttcctccagcgaaaagccacacatcttgcaaacccttgagagagaaaacacaaataggggtaacctactggagacaggcccttaagactataaagtagttgagcgattccatactgaaatagagttggctatagcgatagagaagttagtcatatatgggcctaatgatccaggagagtaaggattcacttttgtggtgaaaagttgtaagcaggtgaaaggtagggatccatggccacggacgggcaggtggagatcagggaagaggcgacgttaaacataaatagtttgttaatgatttcaccttactgattatttctcttttggcatctagaaggctaagattctcatgtgtatttcagagctactgaaagtagtcctaggttgtggagggagaaatccactttcacagctgagtctatcttctcagtctagttatattctcctctcacaaactagccaatgctgccgccttatgcaaagccgacaccacggaaagatgtgctttacagaggcaggatgacgccaatcggcctagggccggcggtgtttcgtctagattaatggcgagggaagtccccaatagtccttttgaaaccttttcactcttgcctggtgaaagcgcttgtcagccgtaaatcgcgaatacaatgctaagctctgaggcccttgctaaatccaagtaggagcagggatctgcgcggcctcaccctcgggtttccgcagggcgtctcgagagctgcggatgggggcagcaggagccgggcgggaacagaggaaagcgccggccctgagacctagggaggagcctcggtgaaggaacccggggcgggttcctgcctagatctccaagaagctccaaaaatggcgggcggcaactcggcgagccggacgcgcaggcgccaccgtggccgtccttccgccagccgcgggcggcccaagaaccgtccacagcgcccttatccagaagcctacgcctctcgcgattggctgaactgcgcgagcgctccgtgtgggggcggggccgccacgcagcggccacgtttcccgccccgctggtgcgcgtgcgcgcaatccccactggaaagcgtttgcgcgcgcccctgccgcggcccctagctcgcgcctcagctccctcccctttccgggcaggcccgtcccgtcagcaaggcagtgagcaccgcggccagcagagggcggtccggacccaagtctgcagcggcgccattggcgtgtggaaaatgccaccagatggcgggttaggattgcagctccgttgaaggcgcggcccccgctcccgaacccccggcgaccaccccgtaacaacccccccacatcgggaataacacaccggagacttttggggggaaactaggtcgatggtcggcggcgcccggatgggcagctgaggattgcctttgaggttattttaaaagttttgagttgtacagcacttgattattttgctgcattgtgaaaggacctctccagcaatgattacttcagaattaccagtgttacaggattcaactaatgaaactactgcccattccgatgctggcagcgagcttgaagaaacagaggtcaaaggaaaaagaaaaaggggtcgtcctggccggcctccatctacaaataagaaacctcgaaaatctccaggtgagaagagcagaattgaagctggaattagaggagcaggccgtggaagagctaatggacaccctcaacagaatggggaaggggagcctgtcacattatttgaggtggtgaaactggggaaaagtgcaatgcagtccgtggtggatgactggattgaatcatataaacaagacagggacatcgcacttctggatttaatcaacttttttatccagtgttcaggatgtcgaggtactgtgagaatagagatgtttcgaaatatgcagaatgcagaaatcatcagaaaaatgactgaagaatttgatgaggacagtggtgattatcctcttaccatgcctggacctcagtggaaaaaatttcgttcaaacttttgtgaatttattggagtcctgattcgacagtgtcagtatagcataatttatgatgagtatatgatggacacagtaatctcccttttgacgggtttgtcagactcccaggtcagagcttttaggcatacaagtaccctggctgccatgaagctcatgactgctctggtgaatgttgccttaaacctcagtattcatcaggataatacccagagacaatatgaagccgagagaaataaaatgattgggaagagagccaatgaaaggttggagttactacttcagaaacgcaaagagctgcaagaaaatcaggatgaaatcgaaaatatgatgaactctatttttaagggtatatttgttcatagataccggtaagagattttaaaaataattttgaaggcttttcacttaaacaattattgattttttttgtggcccaggctaactgtaaaactcactaattatgatttatgttttgttttctggaaaacaactttggctgtcaatgtcacactacaactatagaagaaattgtatgactgctgccactaccactgttatactcttccaaattcagaacatatgctgttggaagtagcttatgtacttggatttatactgatggaatattaattaataggatcataaactaatgtagctttaataagatattcttgttttcacatttaaaaaattaagtgccctacttcttgctctgtggtactcattttgttccatgggcaaattaataattta

SEQ ID NO: 24507 - DNA, 2068 bp, Homo sapiens
aggaggtggtcacagatattttataatggaggcaaggtcaaaccggaattggagtcccatagctctgagcccaggaaactggatgaatttatctattagtatggactgggactggcatctttaacaacatggaaagcttgaaacagtctttgtggaaaataggagatcagccagagattagaagaaaacgcaagaaaattataagtaggagtccagtcacgaattcatatccaatctggtcagttatgacttcctccagcgaaaagccacacatcttgcaaacccttgagagagaaaacacaaataggggtaacctactggagacaggcccttaagactataaagtagttgagcgattccatactgaaatagagttggctatagcgatagagaagttagtcatatatgggcctaatgatccaggagagtaaggattcacttttgtggtgaaaagttgtaagcaggtgaaaggtagggatccatggccacggacgggcaggtggagatcagggaagaggcgacgttaaacataaatagtttgttaatgatttcaccttactgattatttctcttttggcatctagaaggctaagattctcatgtgtatttcagagctactgaaagtagtcctaggttgtggagggagaaatccactttcacagctgagtctatcttctcagtctagttatattctcctctcacaaactagccaatgctgccgccttatgcaaagccgacaccacggaaagatgtgctttacagaggcaggatgacgccaatcggcctagggccggcggtgtttcgtctagattaatggcgagggaagtccccaatagtccttttgaaaccttttcactcttgcctggtgaaagcgcttgtcagccgtaaatcgcgaatacaatgctaagctctgaggcccttgctaaatccaagtaggagcagggatctgcgcggcctcaccctcgggtttccgcagggcgtctcgagagctgcggatgggggcagcaggagccgggcgggaacagaggaaagcgccggccctgagacctagggaggagcctcggtgaaggaacccggggcgggttcctgcctagatctccaagaagctccaaaaatggcgggcggcaactcggcgagccggacgcgcaggcgccaccgtggccgtccttccgccagccgcgggcggcccaagaaccgtccacagcgcccttatccagaagcctacgcctctcgcgattggctgaactgcgcgagcgctccgtgtgggggcggggccgccacgcagcggccacgtttcccgccccgctggtgcgcgtgcgcgcaatccccactggaaagcgtttgcgcgcgcccctgccgcggcccctagctcgcgcctcagctccctcccctttccgggcaggcccgtcccgtcagcaaggcagtgagcaccgcggccagcagagggcggtccggacccaagtctgcagcggcgccattggcgtgtggaaaatgccaccagatggcgggttaggattgcagctccgttgaaggcgcggcccccgctcccgaacccccggcgaccaccccgtaacaacccccccacatcgggaataacacaccggagacttttggggggaaactaggtcgatggtcggcggcgcccggatgggcagctgaggattgcctttgaggttattttaaaagttttgagttgtacagcacttgattattttgctgcattgtgaaaggacctctccagcaatgattacttcagaattaccagtgttacaggattcaactaatgaaactactgcccattccgatgctggcagcgagcttgaagaaacagaggtcaaaggaaaaagaaaaaggggtcgtcctggccggcctccatctacaaataagaaacctcgaaaatctccaggtgagaagagcagaattgaagctggaattagaggagcaggccgtggaagagctaatggacaccctcaacagaatggggaaggggagcctgtcacattatttgaggtggtgaaactggggaaaagtgcaatgcaggtaaattttaagtttttatttcacgtat

SEQ ID NO: 24508 - DNA, 406 bp, Homo sapiens
cgttgccattaccctcgtctgattatcatgtctcacctgcatcgttgtgatggatttctaattagatcctctgctgtatgtttacctccaacagtctagctcaacacagtagccagaataatcctttagaaatatgtcagatcaggccgggtgcagtggcctgtaatcccagcactttgggaggctgaggtgggtgaatgacctgaggttgggagtttgagaccagcctggccaacatggtgaaaccttgtctctactaaaaatacaaaaattagccaggtgtggggtgcatacctgtaatcccagctacttgggaggctgaggctcaagaacagcttgaacctgggaggcggaggttgcagtgagccaagattgcaccactgcactccagcctgagcgacagagt

SEQ ID NO: 24509 - DNA, 437 bp, Homo sapiens
gagttctcctttctcaaccatctattgaattggcaaaaacttaaaaagatggataaacttactgctggcagggatgtgggaaagggcactgtcatgcactgtttctggacatgtgtgttgtgtgttgttacagcctttttggaaaataatctggcaatatccacaataagcaaattaaacacacgatttgacccagaaatcctactccaagaactctattgtagagaaatcaagcttcagtgtgtaaggacgtgtatgtacataccacccccaagaatgtttattgtggtatttttctggaaataagttaatgcatattaatatattttgccaattcgtaggatggaatggtatgtaaccaataaaaataatgtattagttctatacagatttatactagttttgctttgagagagttccataatgcatttttttct

SEQ ID NO: 24510 - DNA, 467 bp, Homo sapiens
gtgtaacaggagtgtctagggaggtccaactattgtgggaggaatcaagggcaaactgggtatctcagagcaagagaatttgttgggattgtgagtagtcaggtggaggagaagtagttgaggaagaaagttctaaggagtgtgaagctaggagatgatagtggttagaaaggaaagggtgtggacatcaactaggaagtgtagaggtgacaaatatggtgggggggggagggggagacaaataaatatagtcagactggtttttgcaaacaaaaggtaagactaatttaaaaacaattccatttcacaatgcctgccaatgcttcaacaatttaaaatacttgtatgttgtattaaaagacagttcgggaagtgtattccatctcatgacaaattggtaagtcaacattgatagagcataaagcttattttggcctaaatttcagctccaaagtcttactattcta

SEQ ID NO: 24511 - DNA, 370 bp, Homo sapiens
gcaaacccaatccatgggtagaccagatagcaggtaggaatgatggtagcttggactaggctcatggcagtgaagatggagagaagaataaatttcagaggcatttaggaggtagagtagatagatcatagcaggagcttgaatatggaacctgagcaagacagaagagtagaggacagaaagaggcacattcactggtctagagaacacttcaagagaaccagtttggaaggcaagaggctgaactcattgtcttaaacctattgagtttgggagcgctttgagatgtccagatgaaatgtcagaagaatctgacagtaggatatgtgggtctggagtgtgcacaaggcaggcgattaataatcgtgtc

SEQ ID NO: 24512 - DNA, 717 bp, Homo sapiens
ctgcctgggcttggtcggccgcgcttcagcacccgccgagccggacagcgcctgctgcatggagctgcccgccgcggccggggacgcagtccggagtcccgccgccgccgccgccctcatcttccccgggggctccggggagctagaactggcgttagaggaggagctggcgctgctggcggccggggagcggccgtccgaccccggggaacaccctcaggccgagcctgggtctctggccgagggggccggaccgcagccgccgccctcccaggaccccgagctgctgtcggtgatccgacagaaggagaaggatctggtgttggcggcccggctgggtaaggcgctgctcgagaggaaccaggacatgagccggcagtacgagcagatgcataaggagctgacagacaagctcgagacaagatctcactctatcccccaggctgcagtggagtggctgatcatggcttactgcaccctcaagtgaccctcccactcagcctcctgagtagctgggactacaggcgcctactacacacctggctaattttgtaaaaatgtttcgtagagatggggtctcactatgttgccaaggctggtctcaaactacggggctcaagcagtcctcctgccctggccttccaaagtggtgggattacaggagtgaaccattgagcctggcctgtattttcaattaaatcaaacacttgggagtat

SEQ ID NO: 24513 - DNA, 2548 bp, Homo sapiens
tgagtgcaaagggaagatctggcctacggctgcaggtccagagctaaattccccccagctcccttgctgccgagctcaagcctagcatgtgatgtggtaccctttcttcaagagagacaggccctctcttgaagcaggatggcagtggaatgctaccagcttgcacccccacacatgtaccctggtcctgcctggggtctctttgttcctttttccctcttggagggaaaaccacccaggacagcagcagtgataccatattcattctcctgttaggtgacactgctgagtgtggagatgactgccctaaaagaggagagagaccgactcagagtcacttctgaggacaaggagccaaaggagcagcttcagaaggccatcagggaccgcgacgaggccattgcaaagaagaatgctgtggagctggaacttgccaagtgcaggatggatatgatgtctctgaacagccagttgctggatgccattcagcagaaactgaacctctcgcagcagctggaagcttggcagtttgcttcctcagggctttttactatctggctcctttggtttctgatctagtggcctttctcagttcccgtatcaacagctttagttgtacacccctcctgcctttgaggatgacatgcacagggtcattgaccggcagctgatggacacgcacctgaaagaacggagccagccggctgctgccctctgcaggggccacagcgctgggcggggggatgagcccagcatcgctgaaggcaaacgactcttctcattcttcaggaaaatttaagttgggaggagtcaggccaccaaagatgggtggactggaggcagctggaaaggcggtgcaggcaaggcctcccctgcagcttgcacctcagcagctgccctgcccctcatgctagggccccatgggtccgggagggcctgctccctttcgtcggtggggatggagacctagaggtgggggcctgccttggccactgaaggcttcccttggcccaccgcctggccaagcccacgcctgggcttctccaggaccacgtgcttgagcagggttaggccacctcccagaggggccccttggtgttgggctttgcagctcacacccaacagatcgcagcccacccccaggcactgctgcctccttgattttagcaaatggggaacagaaggaatggaggcccttctctgcatgcctcaggaggcctgagccccaggggcctagacctgtgggggcagcgggccaggcctgagcctccattccttccccagcccctggcccagggtcaaaggagagatggcagcccctcccccgcatgcatgcacctcagctggcaggaggccaagcctctggccgcagggtctaagagccggggcttacccaagctcagctgaggccacccgagccccagggaggaagaaggccctgtccccctgtcgccactgctctccctcccagccttcagtctctgccccttagcagggcctggccaggcagagtgttatcaccagtcatctgcaggctttagccatccagccctttcccctgctcagggctggggttggacggggtctcctcctcccacagctccctcctccacccctcacatacatacataatttcttggcctagccaaacaagtccaggccactgaatggcaccagaggggtctgtggtcagccaccccaccttgagggcagcacaggcaccacggggtggaggggagggggaggctgccggaagcctccagatgctgcctgcctgcctgcagaagcctgcagtggctgctgctcctgcctctgcagccgcccctcctcctccacccaggccccaactcagaggctccgcggcccggccagccctcagctgctcacaaccgattcagtctccctccctccctcacgtggggaaagcacagcagggatgcgcggcaagaatgtacctgtagatgtgtacataccacagtgctgtaattttgtatgtagcaatcatgtaaatacatgtatggattttataatatacatatataaaaatctataaaggcatatttttagaaaaacagcacaccactgcttcttttgaaaatagtctgaataagaataaaatgaatttctacagagaaaaaaaaaaagaaccgcaagacacacacacgaacaaaaacaaaaaacaaaaataaaaaaaaacaaacaaaaaaaaaaaaaacaaaaaaagaacacacaaaacagaaaaaacaacgaagagagcggcggagcggggcaggagacgaaagaaaaagaacaagcggcagggcggccacaaactaaaaaaagcgaacaacgaacgaaagaagaagcgagaaaagaaacaagagacgcagaaaaaaaagaaaagcagaggagataaaacaacagaaacacgacgcaccggagaagctaaacacaccagaacaacaacagagaaaagaaaaacagaaaaagaaagaaaaaaaacagagaggagagaaagaaaaaaaaaggaagagggagcgaacacacaaaacaaaaacaacaaaaacaa

SEQ ID NO: 24514 - DNA, 2418 bp, Homo sapiens
gagtcttcagaaacctcgtccgccaaggatgtgccagccggcagcttgcgcactgccctcaatgagctcaagagactgatacagagcattgtggatggcatggagcccacgggctcccggagacttgatgatgactccttagaagaacagataaggcagaccagtgaggactcgagagccctaagggagctcatggagggagagaggggtaaactgaggcaaagcctagaagagctgcagcgactccacagtcaggtgacactgctgagtgtggagatgactgccctaaaagaggagagagaccgactcagagtcacttctgaggacaaggagccaaaggagcagcttcagaaggccatcagggaccgcgacgaggccattgcaaagaagaatgctgtggagctggaacttgccaagtgcaggatggatatgatgtctctgaacagccagttgctggatgccattcagcagaaactgaacctctcgcagcagctggaagcttggcaggatgacatgcacagggtcattgaccggcagctgatggacacgcacctgaaagaacggagccagccggctgctgccctctgcaggggccacagcgctgggcggggggatgagcccagcatcgctgaaggcaaacgactcttctcattcttcaggaaaatttaagttgggaggagtcaggccaccaaagatgggtggactggaggcagctggaaaggcggtgcaggcaaggcctcccctgcagcttgcacctcagcagctgccctgcccctcatgctagggccccatgggtccgggagggcctgctccctttcgtcggtggggatggagacctagaggtgggggcctgccttggccactgaaggcttcccttggcccaccgcctggccaagcccacgcctgggcttctccaggaccacgtgcttgagcagggttaggccacctcccagaggggccccttggtgttgggctttgcagctcacacccaacagatcgcagcccacccccaggcactgctgcctccttgattttagcaaatggggaacagaaggaatggaggcccttctctgcatgcctcaggaggcctgagccccaggggcctagacctgtgggggcagcgggccaggcctgagcctccattccttccccagcccctggcccagggtcaaaggagagatggcagcccctcccccgcatgcatgcacctcagctggcaggaggccaagcctctggccgcagggtctaagagccggggcttacccaagctcagctgaggccacccgagccccagggaggaagaaggccctgtccccctgtcgccactgctctccctcccagccttcagtctctgccccttagcagggcctggccaggcagagtgttatcaccagtcatctgcaggctttagccatccagccctttcccctgctcagggctggggttggacggggtctcctcctcccacagctccctcctccacccctcacatacatacataatttcttggcctagccaaacaagtccaggccactgaatggcaccagaggggtctgtggtcagccaccccaccttgagggcagcacaggcaccacggggtggaggggagggggaggctgccggaagcctccagatgctgcctgcctgcctgcagaagcctgcagtggctgctgctcctgcctctgcagccgcccctcctcctccacccaggccccaactcagaggctccgcggcccggccagccctcagctgctcacaaccgattcagtctccctccctccctcacgtggggaaagcacagcagggatgcgcggcaagaatgtacctgtagatgtgtacataccacagtgctgtaattttgtatgtagcaatcatgtaaatacatgtatggattttataatatacatatataaaaatctataaaggcatatttttagaaaaacagcacaccactgcttcttttgaaaatagtctgaataagaataaaatgaatttctacagagaaaaaaaaaaagaaccgcaagacacacacacgaacaaaaacaaaaaacaaaaataaaaaaaaacaaacaaaaaaaaaaaaaacaaaaaaagaacacacaaaacagaaaaaacaacgaagagagcggcggagcggggcaggagacgaaagaaaaagaacaagcggcagggcggccacaaactaaaaaaagcgaacaacgaacgaaagaagaagcgagaaaagaaacaagagacgcagaaaaaaaagaaaagcagaggagataaaacaacagaaacacgacgcaccggagaagctaaacacaccagaacaacaacagagaaaagaaaaacagaaaaagaaagaaaaaaaacagagaggagagaaagaaaaaaaaaggaagagggagcgaacacacaaaacaaaaacaacaaaaacaa

SEQ ID NO: 24515 - DNA, 3565 bp, Homo sapiens
aaagacctgttttatgtaaactaatgatcttaattttgggtggtggggggagtcttaccactgcactccagcctgggcgacagagcaagactccatctcaaaaaaatcaaaaaggattttagttgtgggactcatttttagttgtttaaatgtatagttcaccaattgattagatgattggcaaatttcaagtgaactccctagtctagaacctcatgcctaaggataagaataaacataataactttaagtattttcagtaagaatggcgttctctttgtgaaaccaacttcttccctgctctggaagaaggaatatttttgtagctgtgaattcggcaacttgtcctatgtggtagggtgttttattgtgtctactgactaggaaaaagaaaagttgggacagcgcggagagaaaaaataaaaggctgtggaatttttatcagtgtttaaatcccttcacttttcacccagcacttagagcaagagaaacatgaattgagaagacgatttgagaaccgagaaggggagtgggaaggccgagtgtcagagctggagagtgatgtgaagcagctacaggatgagttggagaggcagcagattcatctgcgggaagcagatcgagaaaaatcacgggctgtccaggaactgtcggaacagaaccaaaggctattggatcagctcagcaggaaaattaagacttggatttactattctacctcagcccttcttgtatattgaaaataaaactaccaactcttcagttaccggaggaaaaagaacttctctgatatcatccctcagcactgatgttctcatgggagcagtgccgtgtctgcatgtgtttcaggcatcagaagttgagagacaactctccatgcaggtccacgccctcagagaagactttcgggagaaaaactcatcaaccaaccagcacattatccggctggagagccttcaggccgagatcaagatgctgtcagatcggaaacgggagctggagcatcgtctcagcgctactttagaggaaaatgacctgctccaagggaccgtggaggagctacaggaccgggtgctaatcctggagaggcagggccatgacaaggacctacagctgcaccaaagccagctggagcttcaggaggtgcgtctctcctgccgacagctgcaggtgaaggtggaagaactcactgaggagaggagtctgcagagctctgccgccaccagcacatccctcctgtcagagatcgagcagagcatggaggctgaggagctggagcaggagcgagagcaggtgacactgctgagtgtggagatgactgccctaaaagaggagagagaccgactcagagtcacttctgaggacaaggagccaaaggagcagcttcagaaggccatcagggaccgcgacgaggccattgcaaagaagaatgctgtggagctggaacttgccaagtgcaggatggatatgatgtctctgaacagccagttgctggatgccattcagcagaaactgaacctctcgcagcagctggaagcttggcagtttgcttcctcagggctttttactatctggctcctttggtttctgatctagtggcctttctcagttcccgtatcaacagctttagttgtacacccctcctgcctttgaggatgacatgcacagggtcattgaccggcagctgatggacacgcacctgaaagaacggagccagccggctgctgccctctgcaggggccacagcgctgggcggggggatgagcccagcatcgctgaaggcaaacgactcttctcattcttcaggaaaatttaagttgggaggagtcaggccaccaaagatgggtggactggaggcagctggaaaggcggtgcaggcaaggcctcccctgcagcttgcacctcagcagctgccctgcccctcatgctagggccccatgggtccgggagggcctgctccctttcgtcggtggggatggagacctagaggtgggggcctgccttggccactgaaggcttcccttggcccaccgcctggccaagcccacgcctgggcttctccaggaccacgtgcttgagcagggttaggccacctcccagaggggccccttggtgttgggctttgcagctcacacccaacagatcgcagcccacccccaggcactgctgcctccttgattttagcaaatggggaacagaaggaatggaggcccttctctgcatgcctcaggaggcctgagccccaggggcctagacctgtgggggcagcgggccaggcctgagcctccattccttccccagcccctggcccagggtcaaaggagagatggcagcccctcccccgcatgcatgcacctcagctggcaggaggccaagcctctggccgcagggtctaagagccggggcttacccaagctcagctgaggccacccgagccccagggaggaagaaggccctgtccccctgtcgccactgctctccctcccagccttcagtctctgccccttagcagggcctggccaggcagagtgttatcaccagtcatctgcaggctttagccatccagccctttcccctgctcagggctggggttggacggggtctcctcctcccacagctccctcctccacccctcacatacatacataatttcttggcctagccaaacaagtccaggccactgaatggcaccagaggggtctgtggtcagccaccccaccttgagggcagcacaggcaccacggggtggaggggagggggaggctgccggaagcctccagatgctgcctgcctgcctgcagaagcctgcagtggctgctgctcctgcctctgcagccgcccctcctcctccacccaggccccaactcagaggctccgcggcccggccagccctcagctgctcacaaccgattcagtctccctccctccctcacgtggggaaagcacagcagggatgcgcggcaagaatgtacctgtagatgtgtacataccacagtgctgtaattttgtatgtagcaatcatgtaaatacatgtatggattttataatatacatatataaaaatctataaaggcatatttttagaaaaacagcacaccactgcttcttttgaaaatagtctgaataagaataaaatgaatttctacagagaaaaaaaaaaagaaccgcaagacacacacacgaacaaaaacaaaaaacaaaaataaaaaaaaacaaacaaaaaaaaaaaaaacaaaaaaagaacacacaaaacagaaaaaacaacgaagagagcggcggagcggggcaggagacgaaagaaaaagaacaagcggcagggcggccacaaactaaaaaaagcgaacaacgaacgaaagaagaagcgagaaaagaaacaagagacgcagaaaaaaaagaaaagcagaggagataaaacaacagaaacacgacgcaccggagaagctaaacacaccagaacaacaacagagaaaagaaaaacagaaaaagaaagaaaaaaaacagagaggagagaaagaaaaaaaaaggaagagggagcgaacacacaaaacaaaaacaacaaaaacaa

SEQ ID NO: 24516 - DNA, 1301 bp, Homo sapiens
aaagacctgttttatgtaaactaatgatcttaattttgggtggtggggggagtcttaccactgcactccagcctgggcgacagagcaagactccatctcaaaaaaatcaaaaaggattttagttgtgggactcatttttagttgtttaaatgtatagttcaccaattgattagatgattggcaaatttcaagtgaactccctagtctagaacctcatgcctaaggataagaataaacataataactttaagtattttcagtaagaatggcgttctctttgtgaaaccaacttcttccctgctctggaagaaggaatatttttgtagctgtgaattcggcaacttgtcctatgtggtagggtgttttattgtgtctactgactaggaaaaagaaaagttgggacagcgcggagagaaaaaataaaaggctgtggaatttttatcagtgtttaaatcccttcacttttcacccagcacttagagcaagagaaacatgaattgagaagacgatttgagaaccgagaaggggagtgggaaggccgagtgtcagagctggagagtgatgtgaagcaccgcccctcctcctccacccaggccccaactcagaggctccgcggcccggccagccctcagctgctcacaaccgattcagtctccctccctccctcacgtggggaaagcacagcagggatgcgcggcaagaatgtacctgtagatgtgtacataccacagtgctgtaattttgtatgtagcaatcatgtaaatacatgtatggattttataatatacatatataaaaatctataaaggcatatttttagaaaaacagcacaccactgcttcttttgaaaatagtctgaataagaataaaatgaatttctacagagaaaaaaaaaaagaaccgcaagacacacacacgaacaaaaacaaaaaacaaaaataaaaaaaaacaaacaaaaaaaaaaaaaacaaaaaaagaacacacaaaacagaaaaaacaacgaagagagcggcggagcggggcaggagacgaaagaaaaagaacaagcggcagggcggccacaaactaaaaaaagcgaacaacgaacgaaagaagaagcgagaaaagaaacaagagacgcagaaaaaaaagaaaagcagaggagataaaacaacagaaacacgacgcaccggagaagctaaacacaccagaacaacaacagagaaaagaaaaacagaaaaagaaagaaaaaaaacagagaggagagaaagaaaaaaaaaggaagagggagcgaacacacaaaacaaaaacaacaaaaacaa

SEQ ID NO: 24517 - DNA, 1769 bp, Homo sapiens
aaagacctgttttatgtaaactaatgatcttaattttgggtggtggggggagtcttaccactgcactccagcctgggcgacagagcaagactccatctcaaaaaaatcaaaaaggattttagttgtgggactcatttttagttgtttaaatgtatagttcaccaattgattagatgattggcaaatttcaagtgaactccctagtctagaacctcatgcctaaggataagaataaacataataactttaagtattttcagtaagaatggcgttctctttgtgaaaccaacttcttccctgctctggaagaaggaatatttttgtagctgtgaattcggcaacttgtcctatgtggtagggtgttttattgtgtctactgactaggaaaaagaaaagttgggacagcgcggagagaaaaaataaaaggctgtggaatttttatcagtgtttaaatcccttcacttttcacccagcacttagagcaagagaaacatgaattgagaagacgatttgagaaccgagaaggggagtgggaaggccgagtgtcagagctggagagtgatgtgaagcagctacaggatgagttggagaggcagcagattcatctgcgggaagcagatcgagaaaaatcacgggctgtccaggaactgtcggaacagaaccaaaggctattggatcagctcagcaggaaaattaagacttggatttactattctacctcagcccttcttgtatattgaaaataaaactaccaactcttcagttaccggaggaaaaagaacttctctgatatcatccctcagcactgatgttctcatgggagcagtgccgtgtctgcatggtttcccatctggagaatccagtcaccatttgattgtctgggaagtaggaattggacagttcaggaagtcacttcacagagccagctcagtaacaggatttctgattcagttctaaaagcttttttcagcaactgggaatggaatctctatccttgtaaaaatttttatgtttttgactattttcattcattattcatgaaagattcaaccagagaggcctggctagattgatttatttgttcaaaaacatttaatacatactttgagtaagtgtttcttacggagacttatagaatgaatgcaacaaaccagaaaaattaaaggggaaattaagatttcttgggggctaagttcatgttacaaaataacatgagctaaagcagactctgccccgtgaaagataggtgaccaagagagacgaagggaaaaagcagatttcaacatgacatagcaaaagctcatggagcttggaatctgactctgttactcattaactgggggaccttgtttgtgcctcagtttccttttctttaaaatgggtgtaaaaattatgcctcatacaagtattattgaaatgaaaaatgagataatgtgtttatgttaaacagcgtgtgaaggtaaggatttgtttcagtgttgatggttgttttactaaagcagtgtctttataatttgttcactttgcctaatttcttatagaaaatcctgataagctgctcctaaaagaacgtaggaagataacatttctactagatctagatttttgttatcctttctggccttgaatataggcccttggtgagttttatagctttttcccttttttcaagcaggaccagcccctggggtttccatcagcagcaagtttagatagcgttttattaactgagtatccagcctgggcaacagagcaagaccccatcttta

SEQ ID NO: 24518 - DNA, 757 bp, Homo sapiens
aagccccgcaaagtaccactatggaacaggcgcaagatgtctcccatttctcaaaaacaattcccttatggaccacatcttcccctttgggattaaaaacgattcagtctccctccctccctcacgtggggaaagcacagcagggatgcgcggcaagaatgtacctgtagatgtgtacataccacagtgctgtaattttgtatgtagcaatcatgtaaatacatgtatggattttataatatacatatataaaaatctataaaggcatatttttagaaaaacagcacaccactgcttcttttgaaaatagtctgaataagaataaaatgaatttctacagagaaaaaaaaaaagaaccgcaagacacacacacgaacaaaaacaaaaaacaaaaataaaaaaaaacaaacaaaaaaaaaaaaaacaaaaaaagaacacacaaaacagaaaaaacaacgaagagagcggcggagcggggcaggagacgaaagaaaaagaacaagcggcagggcggccacaaactaaaaaaagcgaacaacgaacgaaagaagaagcgagaaaagaaacaagagacgcagaaaaaaaagaaaagcagaggagataaaacaacagaaacacgacgcaccggagaagctaaacacaccagaacaacaacagagaaaagaaaaacagaaaaagaaagaaaaaaaacagagaggagagaaagaaaaaaaaaggaagagggagcgaacacacaaaacaaaaacaacaaaaacaa

SEQ ID NO: 24519 - DNA, 3401 bp, Homo sapiens
ctgcctgggcttggtcggccgcgcttcagcacccgccgagccggacagcgcctgctgcatggagctgcccgccgcggccggggacgcagtccggagtcccgccgccgccgccgccctcatcttccccgggggctccggggagctagaactggcgttagaggaggagctggcgctgctggcggccggggagcggccgtccgaccccggggaacaccctcaggccgagcctgggtctctggccgagggggccggaccgcagccgccgccctcccaggaccccgagctgctgtcggtgatccgacagaaggagaaggatctggtgttggcggcccggctgggtaaggcgctgctcgagaggaaccaggacatgagccggcagtacgagcagatgcataaggagctgacagacaagctcgagcacttagagcaagagaaacatgaattgagaagacgatttgagaaccgagaaggggagtgggaaggccgagtgtcagagctggagagtgatgtgaagcagctacaggatgagttggagaggcagcagattcatctgcgggaagcagatcgagaaaaatcacgggctgtccaggaactgtcggaacagaaccaaaggctattggatcagctcagcaggaaaattaagacttggatttactattctacctcagcccttcttgtatattgaaaataaaactaccaactcttcagttaccggaggaaaaagaacttctctgatatcatccctcagcactgatgttctcatgggagcagtgccgtgtctgcatgtgtttcaggcatcagaagttgagagacaactctccatgcaggtccacgccctcagagaagactttcgggagaaaaactcatcaaccaaccagcacattatccggctggagagccttcaggccgagatcaagatgctgtcagatcggaaacgggagctggagcatcgtctcagcgctactttagaggaaaatgacctgctccaagggaccgtggaggagctacaggaccgggtgctaatcctggagaggcagggccatgacaaggacctacagctgcaccaaagccagctggagcttcaggaggtgcgtctctcctgccgacagctgcaggtgaaggtggaagaactcactgaggagaggagtctgcagagctctgccgccaccagcacatccctcctgtcagagatcgagcagagcatggaggctgaggagctggagcaggagcgagagcaggtgacactgctgagtgtggagatgactgccctaaaagaggagagagaccgactcagagtcacttctgaggacaaggagccaaaggagcagcttcagaaggccatcagggaccgcgacgaggccattgcaaagaagaatgctgtggagctggaacttgccaagtgcaggatggatatgatgtctctgaacagccagttgctggatgccattcagcagaaactgaacctctcgcagcagctggaagcttggcaggatgacatgcacagggtcattgaccggcagctgatggacacgcacctgaaagaacggagccagccggctgctgccctctgcaggggccacagcgctgggcggggggatgagcccagcatcgctgaaggcaaacgactcttctcattcttcaggaaaatttaagttgggaggagtcaggccaccaaagatgggtggactggaggcagctggaaaggcggtgcaggcaaggcctcccctgcagcttgcacctcagcagctgccctgcccctcatgctagggccccatgggtccgggagggcctgctccctttcgtcggtggggatggagacctagaggtgggggcctgccttggccactgaaggcttcccttggcccaccgcctggccaagcccacgcctgggcttctccaggaccacgtgcttgagcagggttaggccacctcccagaggggccccttggtgttgggctttgcagctcacacccaacagatcgcagcccacccccaggcactgctgcctccttgattttagcaaatggggaacagaaggaatggaggcccttctctgcatgcctcaggaggcctgagccccaggggcctagacctgtgggggcagcgggccaggcctgagcctccattccttccccagcccctggcccagggtcaaaggagagatggcagcccctcccccgcatgcatgcacctcagctggcaggaggccaagcctctggccgcagggtctaagagccggggcttacccaagctcagctgaggccacccgagccccagggaggaagaaggccctgtccccctgtcgccactgctctccctcccagccttcagtctctgccccttagcagggcctggccaggcagagtgttatcaccagtcatctgcaggctttagccatccagccctttcccctgctcagggctggggttggacggggtctcctcctcccacagctccctcctccacccctcacatacatacataatttcttggcctagccaaacaagtccaggccactgaatggcaccagaggggtctgtggtcagccaccccaccttgagggcagcacaggcaccacggggtggaggggagggggaggctgccggaagcctccagatgctgcctgcctgcctgcagaagcctgcagtggctgctgctcctgcctctgcagccgcccctcctcctccacccaggccccaactcagaggctccgcggcccggccagccctcagctgctcacaaccgattcagtctccctccctccctcacgtggggaaagcacagcagggatgcgcggcaagaatgtacctgtagatgtgtacataccacagtgctgtaattttgtatgtagcaatcatgtaaatacatgtatggattttataatatacatatataaaaatctataaaggcatatttttagaaaaacagcacaccactgcttcttttgaaaatagtctgaataagaataaaatgaatttctacagagaaaaaaaaaaagaaccgcaagacacacacacgaacaaaaacaaaaaacaaaaataaaaaaaaacaaacaaaaaaaaaaaaaacaaaaaaagaacacacaaaacagaaaaaacaacgaagagagcggcggagcggggcaggagacgaaagaaaaagaacaagcggcagggcggccacaaactaaaaaaagcgaacaacgaacgaaagaagaagcgagaaaagaaacaagagacgcagaaaaaaaagaaaagcagaggagataaaacaacagaaacacgacgcaccggagaagctaaacacaccagaacaacaacagagaaaagaaaaacagaaaaagaaagaaaaaaaacagagaggagagaaagaaaaaaaaaggaagagggagcgaacacacaaaacaaaaacaacaaaaacaa

SEQ ID NO: 24520 - DNA, 3358 bp, Homo sapiens
ctgcctgggcttggtcggccgcgcttcagcacccgccgagccggacagcgcctgctgcatggagctgcccgccgcggccggggacgcagtccggagtcccgccgccgccgccgccctcatcttccccgggggctccggggagctagaactggcgttagaggaggagctggcgctgctggcggccggggagcggccgtccgaccccggggaacaccctcaggccgagcctgggtctctggccgagggggccggaccgcagccgccgccctcccaggaccccgagctgctgtcggtgatccgacagaaggagaaggatctggtgttggcggcccggctgggtaaggcgctgctcgagaggaaccaggacatgagccggcagtacgagcagatgcataaggagctgacagacaagctcgagcacttagagcaagagaaacatgaattgagaagacgatttgagaaccgagaaggggagtgggaaggccgagtgtcagagctggagagtgatgtgaagcagctacaggatgagttggagaggcagcagattcatctgcgggaagcagatcgagaaaaatcacgggctgtccaggaactgtcggaacagaaccaaaggctattggatcagctcagcaggtgtttcaggcatcagaagttgagagacaactctccatgcaggtccacgccctcagagaagactttcgggagaaaaactcatcaaccaaccagcacattatccggctggagagccttcaggccgagatcaagatgctgtcagatcggaaacgggagctggagcatcgtctcagcgctactttagaggaaaatgacctgctccaagggaccgtggaggagctacaggaccgggtgctaatcctggagaggcagggccatgacaaggacctacagctgcaccaaagccagctggagcttcaggaggtgcgtctctcctgccgacagctgcaggtgaaggtggaagaactcactgaggagaggagtctgcagagctctgccgccaccagcacatccctcctgtcagagatcgagcagagcatggaggctgaggagctggagcaggagcgagagcaggtgacactgctgagtgtggagatgactgccctaaaagaggagagagaccgactcagagtcacttctgaggacaaggagccaaaggagcagcttcagaaggccatcagggaccgcgacgaggccattgcaaagaagaatgctgtggagctggaacttgccaagtgcaggatggatatgatgtctctgaacagccagttgctggatgccattcagcagaaactgaacctctcgcagcagctggaagcttggcagtttgcttcctcagggctttttactatctggctcctttggtttctgatctagtggcctttctcagttcccgtatcaacagctttagttgtacacccctcctgcctttgaggatgacatgcacagggtcattgaccggcagctgatggacacgcacctgaaagaacggagccagccggctgctgccctctgcaggggccacagcgctgggcggggggatgagcccagcatcgctgaaggcaaacgactcttctcattcttcaggaaaatttaagttgggaggagtcaggccaccaaagatgggtggactggaggcagctggaaaggcggtgcaggcaaggcctcccctgcagcttgcacctcagcagctgccctgcccctcatgctagggccccatgggtccgggagggcctgctccctttcgtcggtggggatggagacctagaggtgggggcctgccttggccactgaaggcttcccttggcccaccgcctggccaagcccacgcctgggcttctccaggaccacgtgcttgagcagggttaggccacctcccagaggggccccttggtgttgggctttgcagctcacacccaacagatcgcagcccacccccaggcactgctgcctccttgattttagcaaatggggaacagaaggaatggaggcccttctctgcatgcctcaggaggcctgagccccaggggcctagacctgtgggggcagcgggccaggcctgagcctccattccttccccagcccctggcccagggtcaaaggagagatggcagcccctcccccgcatgcatgcacctcagctggcaggaggccaagcctctggccgcagggtctaagagccggggcttacccaagctcagctgaggccacccgagccccagggaggaagaaggccctgtccccctgtcgccactgctctccctcccagccttcagtctctgccccttagcagggcctggccaggcagagtgttatcaccagtcatctgcaggctttagccatccagccctttcccctgctcagggctggggttggacggggtctcctcctcccacagctccctcctccacccctcacatacatacataatttcttggcctagccaaacaagtccaggccactgaatggcaccagaggggtctgtggtcagccaccccaccttgagggcagcacaggcaccacggggtggaggggagggggaggctgccggaagcctccagatgctgcctgcctgcctgcagaagcctgcagtggctgctgctcctgcctctgcagccgcccctcctcctccacccaggccccaactcagaggctccgcggcccggccagccctcagctgctcacaaccgattcagtctccctccctccctcacgtggggaaagcacagcagggatgcgcggcaagaatgtacctgtagatgtgtacataccacagtgctgtaattttgtatgtagcaatcatgtaaatacatgtatggattttataatatacatatataaaaatctataaaggcatatttttagaaaaacagcacaccactgcttcttttgaaaatagtctgaataagaataaaatgaatttctacagagaaaaaaaaaaagaaccgcaagacacacacacgaacaaaaacaaaaaacaaaaataaaaaaaaacaaacaaaaaaaaaaaaaacaaaaaaagaacacacaaaacagaaaaaacaacgaagagagcggcggagcggggcaggagacgaaagaaaaagaacaagcggcagggcggccacaaactaaaaaaagcgaacaacgaacgaaagaagaagcgagaaaagaaacaagagacgcagaaaaaaaagaaaagcagaggagataaaacaacagaaacacgacgcaccggagaagctaaacacaccagaacaacaacagagaaaagaaaaacagaaaaagaaagaaaaaaaacagagaggagagaaagaaaaaaaaaggaagagggagcgaacacacaaaacaaaaacaacaaaaacaa

SEQ ID NO: 24521 - DNA, 571 bp, Homo sapiens
gagtcttcagaaacctcgtccgccaaggatgtgccagccggcagcttgcgcactgccctcaatgagctcaagagactgatacagagcattgtggatggcatggagcccacgggctcccggagacttgatgatgactccttagaagaacagataaggcagaccagtgaggactcgagagccctaagggagctcatggagggagagaggggtaaactgaggcaaagcctagaagagctgcagcgactccacagtcaggtgagcaccccaaccttcagttcagtgcagggcatgtgcacctgcccctggctctcttgggacccttttgagtttctctctcccatttctgtgtgagaagtggctctccttcatcagatcatcaaggaatggtgacctgaagttgaggtaaactgaatgtcttcaagagaagaacccagtcctttagcccaaagtaaaattggcagggatgagaatggctggtcctccatttcctccagtgacactctgccttatacagagccaaagttaatctgactggtagatgctgacagccctcgggctacttatgggtgct

SEQ ID NO: 24522 - DNA, 511 bp, Homo sapiens
agtagagacggagtttcaccatgttggtcatgctggttgagaactcctgacctcaagtgattcacctacctgggcctcccaaagtgctgggattacaggcgtgagccaccacgcccggctctaatttttgtatttttagtagagacagagtttcgccatgttggccaggctggtcttgaactcctggcctcaagggattcacccacctgggtctcccaaagtgctgggattacaggtgtgagccacccaccacgccagccttaaatcacactttcaacttcacttcctttagatacttgcacttcaactgagttcaccggctgcaggcctgcggagttacctttgatatttatctgtccactccagtagcaaaggggctatgtctgagtgaatcgtccttttctttccattctcccccctcatgtaccctcaacccttcattctttcctcacgtgaacacagcacagttgaggcccagttgtgggtcagtgctaacgtgcaagacttaaaa

SEQ ID NO: 24523 - DNA, 389 bp, Homo sapiens
gccccatgtacttttggctgtggacattaatggtgagtacccatgcaaacattgtttttatactttcagtagagtattcaataaattacatgagatattcaacactttattataaaataggctttgtgttgaatgattttgcacatctgcaggctaatgtaagtgttctgggcacatttaaggtaggctaggctaagttacgtttggtaggttaggtgtattgaatgcatttttaacttaacagtatttccaacttatgatgggtttatcaggatgtgaccccagtgtaagttgagtagtatctgtatttctgggcaaagtattattctttcccattgtaaacttatgtttgattatgacctttggtaccccaaaattaaattgttttg

SEQ ID NO: 24524 - DNA, 101 bp, Homo sapiens
gggaaagttgggaagggccctccctctctctggacttgataggacccaaccaattcagtaacttcaggggttaggtggagcaagaagccaagaagtagagg

SEQ ID NO: 24525 - DNA, 244 bp, Homo sapiens
ctctacctcccaggcacaagtgatcctcccacctcagcacccctgagtagctggaaccacatgtgcccaccaccacacccagctaatttttgtgtgtacatatataaatagtggtttttatttttatttttttttaagagacgaggtttcaccatgctgcccaggctggtctggaactcctgggctcaggcgatgcgcccactttggcctcccaaagttgggattttagctgagattgcaggtg

SEQ ID NO: 24526 - DNA, 1062 bp, Homo sapiens
gagagagagagagcatggccgttaatgaggtgaagtagaaatcatgcagatctggctctgctctcttaaattccattctgacatgaaaccttgagtaagttactcttctgggaatcttagtgtcctgtagaaaatgagaatgataacatctacctggtagaaattaagatgaatgatatctacctggtagaaatgaaggatgcagagaaaacactctgtgctgggtttgttaacttgatgggtagttcaaatgttaattctctgtcttgttcatgtcaggtttccttctttgcactccccccaaagctggctctagggacccacacagaacagaagctcagtcaacattttgttgaattaaacacagttgcgtcagcaaacgtttgctgcatcctcagaactgcagcaggcactttgagaagcttcagagaagtactggttctttttctgccttcataaagcttaccatgtcatcagaagggtgttttcaactagaaatagtagccaaagacccaagagtgagagtgtaagatctagagggagtttccccgaggaagaaaccacactgctatcagcttactcagccagtagtgatgagagccagtgtgtaagatagaaaagtcctttgcccactttcagaagatcctggacaaattataaaaatagcatttatcaacttcttccaggctttccaccaaatttcacgaatcctactaaagctactacaaaaataggaatcactgttttcattttacagattaggacacaaaggctcagagagcagagtaacttgcttcagggctcatctctataaggggcagaaccaagatgcaggccactgtgttcataatagaaatacagctacaggaccaggcagctcaagcctgctccaatgaataccacctatatacgtttagctcgtttgaactcatggactttcgtgtcacaagcagtttttctcacttagttcttcttgtgtcttctgaaatgtcattttgctggattcttttaagaaaatatagggctatattacattacttaaaggttttctggcaccataga

SEQ ID NO: 24527 - DNA, 483 bp, Homo sapiens
agtcactggatgcagtaacacaacttcctccaagtacagacaacccccagtgtctccagatattgcctaatgtccccagggagcaaaatagcccatctgagaactgctgctttcataaagtacaatgtctggtgaaataggtagaggctgtttttagtcaggcgttagtagagatggaagagaccccaggaacatcctggaaggggctgtaatgttctgtttcttgaattgggtgtcggtaatatggagacgttcaatttttttttttttttttttggcaggatcttgctctgtcacccaggctggagcacagtggcaccgtcttggctcactgtagcctttgcctcctgggctcaagcagtcttcccacctcagccttcctgagtagctggaactacaggcaggtgccatcactgttgcctaatttttgtatttatttattttttgtagagaggggggtctcactatgttgcccaggctggt

SEQ ID NO: 24528 - DNA, 394 bp, Homo sapiens
cctagcagtcctcaagtttgatctcttctaccctagttgcctcacctctctgtcattacctggattccaatgccagcattccttgcttagaaagacctaacggcctcctttgaactctagagcctttcatcagccaaagtgcatctattgcactatcttagaattgcctggtcatttttctgtaactcacatctcactgtaagcacagtgaggacgtgacgatgttagtctctctgttcccctcccccagcatctggtggctcttcaccatcatcatggtcatgatcaccactgacatttaccgagcacttattaagtgttgagcagtgtctgtgctaaggcttttatagatgaactcattgaactcggtataatcttttgaagaaggtactgt

SEQ ID NO: 24529 - DNA, 408 bp, Homo sapiens
gagattgaagtatacaaagcttatattatttgctcaaggccacaaagtttgtgagtggaactagaattagatgcctggcagcctggcccctgagcctgccctcttaaccatgactgtagcttgcatctctcaatatttgctattaagagttttaagttcttgacaaaaaggtaagtgtacaatggtcttaggctgttgctttcatttgtatctacctgatttctggtatatataaatgaggttgagtcttttttttgtgtctttgtcatctaaccatgtttcctcttttgtgaattatttgttcatatttttttcaccatgttatttattgagttattgttttctttttgattttgaatagtgtgtcagttatgcattgctatacaataaattatcccaaactaggta

SEQ ID NO: 24530 - DNA, 254 bp, Homo sapiens
atcagttttatatctagccatcttactgaattctcttattatgtaagagtttttcaactgattttcttgggttctctagataaatggtcccatcatctgcaaatggtagtaattttacctcctccctcccagtgtttttaacctcatgtttctctctgacttaatgggaatgcttttaatatcccccttaaccattatgaccccaattattttttacttcgtaaaaatccttttcaattcctaccaaaaatgat

SEQ ID NO: 24531 - DNA, 398 bp, Homo sapiens
acaaggttacgtctcaatcagttgacagaaatgttgtgaccagaggctttcaggaacctaactctgtatcttccttaggagcaatcgttcagtatttgctaattcagtgtttgcagagactttatagggtgtagctgctgcaaatgacaagaatcaactgtaatcatttactaagtatcagctgtaatggtgaagataaatattctagacttaatatgccaggagggatgtgcgtgcctcatatgctctatggacatgttacagtaagggaaataggaggtgtccccctcaacctggaactcctctaacaagccagatagaaatgcatcattttttaggccatttcacttggatcgaagcttgttttctttcacactcctagtgctttcaaaaaaaaa

SEQ ID NO: 24532 - DNA, 651 bp, Homo sapiens
ctccagcctgggagacagagcgagactccgtctcaaaaaaaaaaaaaaaacaacttgaggaggtgggagaaacatgaaggcaatcccttttccttccctttcttttgttggtttttttttttttcatttattcagtacgttcctagtacttttctaggagccaaagatatagcagtgaacaaaacagataaacaagtaagtacataaattaaacgatttctgacatggattcaaagtcagaggaccatgcatctttagcaagctctccctgagtaggatggcagcagatgatctgtggtccatgcatagtgtaaagaaaccgctccgaagagccagaagtcctcctttcttctgtcagggaagtttgcagaagtgaatcagtggatagcaacaccaaagtgataccttcagggtagacaggaaggtaccagcactttgcgacaccaaggcgggaggatcatttgaggccaggagtttgagaccaacctggccaacatgatgaaaccacgtctatacaaaccttagctgggcgtggtggcacaggcctgtagtcccagctacttgggaggctgaggtggaaggatagcttgagcctagtgagctgagatcacgctactgtactccagcctaggtgacaaaagaagactctgt

SEQ ID NO: 24533 - DNA, 347 bp, Homo sapiens
atatttattgagtatctaccatgttcctagtacttttctaggagccaaagatatagcagtgaacaaaacagataaacaagtaagtacataaattaaacgatttctgacatggattcaaagtcagaggttttgggtgggggccaggaccatgcatctttagcaagctctccctgagtaggatggcagcagatgatctgtggtccatgcatagtgtaaagaaaccgctccgaagagccagggagcagtgtccagctgcaagtcctcctttcttctgtcagggaagtttgcagaagtgaatcagtggatagcaacaccaaagtgataccttcagggtagacaggaaggta

SEQ ID NO: 24534 - DNA, 466 bp, Homo sapiens
attttaaagctatcttctctagttaatagagcctttttgtttttaagtatttatattccagaaacaagaatcaagcaaaagcacattttaatctttcctgtaaatgttatatatttggacactttataagacttcatagtagggtaataaaaaaattaccatgtttcgccaggcatggtggctcatacctgtaatcccagcactttgcgacaccaaggcgggaggatcatttgaggccaggagtttgagaccaacctggccaacatgatgaaaccacgtctgtaaaaaaaaaaaaaatacaaaccttagctgggcgtggtggcacaggcctgtagtcccagctacttgggaggctgaggtggaaggatagcttgagcctgggagaaggaggttgcagtgagctgagatcacgctactgtactccagcctaggtgacaaaagaagactctgtcttaaaaaaaaaaaa

SEQ ID NO: 24535 - DNA, 1827 bp, Homo sapiens
acctcccactacacccccttaagctcttgcgccacctgttggtcaccattctgggatggctaaacctctttctctccttagccttataaactcaggctgttaactctacctagattagtgtggtggtctttgtagttcctagctgggcagtagtcaaagtacatgttctagtttaaaactagagtaggtgcagccataaaacagaacaaaatcatgtcctttgcagcaacatggatgcagctggaggccattatcctgagtgaattaacgcaggaacagaaaaccaaataccacacgttctcacaagtgggagctaaacgttgggtacacgcggacataaagatggcaacagtagaaactggggactactagaagggggagggagggaggggagcaagggttgaaaaactgttgggtactgtgctcactacctggttgacaggatcacttgtactccaaacctcagcatcatgcaatatatatctagttaataaacctgcacatgtaccatctaaaagtaaaaagaagcaaatttaaaaaaaaaaaaacaaaaaaacagacccctccccaccagtctcctggttctttttgaaggtggctgtggtcagactattccagcaggttcctcagtgcttcatgctgttcatcaaacctggatccatctggacctaccatttatgtcatttattgttataaaaaataatacatattctcttgacaccttataattagagttcatttaagtcctttttatcaactccattagagtacttgtctggtgtcgagagttttggtagttccagtatatgtgcttgttttgtttcttccactggatctcaagaaggaacaaattattttggtgtcttatagaacaaattcagattgtactagattagaaggaatttattttgatgttattttggagaaaagacttacttgggacttgggtggaagtggagttcatatggatggttttgttttgaataatttctaaggtcttttagctctatcatttcttgtcagtctcccaccgctaaaatataactctatttacttcgttttttcacacagaaagattatagtgacatagtcttcctcttacttaaatacatgtctttttaggattctgccatagtattgattctgccatggcatttattatgcccagtgaccaaggcattagaatatttgtggtacctttacctttttaggccaataaatatcattcatttgctaaagaacatttcattaaacgaggtacagttggctctccatatccatgggtttggcatctggattcaaccaaccgtgaattgaaaatattcaggaagaaatttcacagagttccaaaaaaacctggaatttgtggcatgctgagtactacattgaatctacacagatgaagtgatgtgtaggcattctgttaggtattataagtaatctagggatgatttaaagtatacaggacaatgcgagtgggttatatgcaaatactacattattttatataagagacttgagcatgttgggttttgttatcttttgggggatcctagaactaatcccccatggatactgtgggatgactgtacttattttttagaaataatttctacactatagccccttttttactcccagtttctttcatttttttttttttaggcttcctaaaatattggcagaagctccatcctttctctgtggctttgttccaatgtttttaggcatgttttcagcttgttctacatcccgggggatatattaataagacctagcctaaatgtaagcttgatagttcagggactatcttaagtgttatgttaa

SEQ ID NO: 24536 - DNA, 439 bp, Homo sapiens
ccctctcattatgtgacagactttttctttactcaatcatatttcatttaaaatgtcactattgggagactctctgaatctgctgtgattctgggggctgctggataagaaaaataaaaaagtatcactattaaaattttcaattttaaattaaaattgttattattttcctatatttcaaaatatttgtggtgtatttgatttgaaaggacaagaggaagtgtttaaaataaatgtaaatttattttacaatgccatgaaatgcaactgaggcaaaaacatcgctattttacattttctaatgttattttcctttcaccttatcttgctatgaatatgattagcagagtctatacagggtatgtattttagcatactttgtggaataatattagaaaatagtatgatagtagtaaacctagcatattttagatgtaca

SEQ ID NO: 24537 - DNA, 321 bp, Homo sapiens
caattttatagaaaaagaagacaatgaaaatatgacaaagtgtttttcaaaaaccaacagaaaagatggaaggaacaagatcaaacatatatatgatagcagtaaatgtaattgggataaattcacttattgaaaggcagtactcttactgagttaaaaactaaagccacctgtacattgtttaaaagagacatatctaggctgggcacgatggctcatgcctgtaatcccagcagtttaggaggccaaggcgggtggatcacttgaggtcaggagttcaagaccagcctggccaacatggcaaaactccatgtctactaa

SEQ ID NO: 24538 - DNA, 414 bp, Homo sapiens
ttagatatgagtggtgaactttggttatccatctgtatttaagagcaaggggctgagttttatttttcttcacagatggtgtgggtttcccctgctcttatatatgtagatccggtttcctgttattgctgcctatgaataggaaatctgcatggaaccttgatgttgggtggggggcttgtctcctggaagtttcactttcagatcaagactgagaatgggctggattttagtcaggagtttatgtgtgtgtggtaaggggattcaaaggatttaaatacctggggatttgacgggggcggggtgtgctttactctagagtgtttgcatataatctggccctcctagttctttctagacagttttttttaactttttattttgaactaattttagacgtagagacaagttact

SEQ ID NO: 24539 - DNA, 248 bp, Homo sapiens
aatacaacactttagttttagagccaaacatgtactctgcagctagagaattagaattactggtagcttacattcaatttaggaagaagcagcaactgcataatacatccaaatagtagcaaaggtaagaatgattgatataaataatcatatagctatcaacaggtctggagatacacaatacataacattttaaaggagaataactttaaccattctcacctaaaattctcagcagccagatcaga

SEQ ID NO: 24540 - DNA, 476 bp, Homo sapiens
ggtctttacaacaaccctacgaggtcgacactcttatctccattttcttactagtgaggaagttgatgcacagataggttaagtaataccaaaagtcacatggctggtaaatgacaagaccgggatgccaacccaagcagtttggttgcagaacccatgcactgacagctgtactgtagtgctgactgctaaagttccccagcacacacctttattgttagtcttccttttcatggaaaaactaaaatgacatgtcctcaatatccatttactaaattgattggctctgtaacagaatcactgatgtggctgatagctctagatccagactggaatttgccctctgttttccagaattgtgaaattgtggttgggacatacctgttgccctcccttctctgaaatgccatattggacacaggatgggtgttactcacaataataaatgaacaagtaatgtgacccaaagagactga

SEQ ID NO: 24541 - DNA, 227 bp, Homo sapiens
ttagaactgatctttgccccaagtctccctgggagagcaggctcagggtaggcacatgctcataagaacctctagccttacttgctacaccaagggagcaggaaaatatataaaggataggcaataaataggcaaagccagggaatgggaaggggagacgtaagctaccctgcagcatcttggtatgtgacccattcggatatattcttttttttttttttttctat

SEQ ID NO: 24542 - DNA, 334 bp, Homo sapiens
aaagcttgccacctgctgtcagaccggcgcttgtgtggagccaggggctgtaggtaccccggctgagtagcctctcagatgtccatggtcctggctgcacgccagcgtgggggcaggcaggcggacgctcaagaaaaacggaggcaccgatatgagtagtaattgagaacgagggttcatgatcctcatctgatttcaatccctgctcctccacccaaaatgtgtggccttgaaggagttaaccaatttaaattttagtttcctcagtggaagataataaatccgcctacctcataaaggtttggtgagaattaactcaggtgatgcatgtgaa

SEQ ID NO: 24543 - DNA, 352 bp, Homo sapiens
ttggccctgtggaacctgtggatatgaccattcgcatcccaagaatactgtattttccacctattcttggtttcaagttgtggaacccactgatatggagggccaactgtatatattgaaaacaatttgcatataagtagacccacactggttcagacccctgttgttcagggtcagctctatatctttccaactttgtgcattgattgaaaaaccaacaacagtatgatattagggctataacagatctgttagccaagcccacatgcccctgaacagaacattctgcacattgggccaacttccaactgccggcacctgaagttatttgcattatcagctatctttgtcc

SEQ ID NO: 24544 - DNA, 289 bp, Homo sapiens
gtgggtccaacaaccgacctcagggtgggctcaggctggaaaaaaccacaccgagttcctcccccaagaaatactgaagacagcagcaataagttccatgtgctccccattcgcccctcacagaaaaggccaaaaggcatgaccatggaatcatcaaactattcccaacacagttccttatgggaaagaacatggaatgaagtcacagccaacaacagaactccaaggtcccctagtaaagcgcagaccccagacaacaaagatacgagtgggtctgagtcaagacaga

SEQ ID NO: 24545 - DNA, 342 bp, Homo sapiens
ctagagaaaagaggggtcactggttccagtttaggtagacatccccagaggtgtctgttgctcttgtttcttttctgaaaggtaagtggtgacacctccaggagcccagtggcatttggatttgttatctcccactgggaggacggcatccttcatttgctggccatttcttaggttggtgatttgcaaacatcccttctccccatggagggactgtgtagagttggaagaggggagggatgggaagaggctacactaaccctaggctccttttcagcaaccaagtctcagaagtggtgccatcattcacttttgatttaatgtaaattgcattaaaacaac

SEQ ID NO: 24546 - DNA, 384 bp, Homo sapiens
aaagagaaagtgagagagagagagagatggagggagacggtctccctgtgttgtccaggctagagtgcagtggtacgatcataactcactgcggccttgaactcctaggatcaagtgatcctcccacctcagcctcctgagtagctggaactacaagcatgcaccaccatgcctggaaaagtttttttttctcttttttgtacagatgaggttcttgctatgttgcctaggctggtcttgaacttctggcctcaagaaatcctcctcctgatcctcctacctcagccttccaaagtgttgggattacaggtatgagccaccacacctggcatcatctgtatcatttgtaatatactttacaataaataggtaaacgtgtaagct

SEQ ID NO: 24547 - DNA, 172 bp, Homo sapiens
gggtttcgccatgttgggcaggctggtctcgaactcctgacctcaggtgatccgcccacctcggcctcccaaagtgctgggattataggcgtgggtcaccacaactggacttactgcccatcttttaagagatgaggacagaaagattgagtgacacagttatgtctcctgc

SEQ ID NO: 24548 - DNA, 1244 bp, Homo sapiens
cggcgactacaactcccagtaggccgtgcggcgaaccacagccctcggccaatgggagtctccgctggtctggccttcgaccaatggaagcattatggccgatggccaatgggagcccccacccgctggcctctggccaatgggagcactcagctaaggctggtgggggcggtgttgctcggggctgcgatgccccttaggttgcgggcaaccagaggcctcactcgtgggcaggaagcaagggcggaccccgagagatgactgattgtgggggtggggaccgtctgctcctcctaatggctggggaccgtgcacgtctgcgcgggccggacctgctcttctcgggaacttgcgcgggaggaggcccggagctgcgccgctttaccctctgctccccggtgcctaaaacgcacacgcatcaaagtcacaggacgagttagaggagaaaggcagagggagatttgaaacacagaggaggtgatgagaagacacagcagaagatatctgaagactggaaagaatgctgcaaccaacaggagaaggaaaagacagaaatgtgttttccatttggagcatccagagggagcacaaccatatcaacaccttgattttgatccagtgacattgattttggacttgtggcctccagaacttttagagaataaatttgcattgttttaagccaacaggttggtggaaacttttttacagcagccacaggaagcaaacacagactcctaactggtgcttagtcctagaatatcagtttctgttccacttctggatctcataattgcatctcagacatcaacactgacttcatattcttaatgcaccaattctaccatttcttcaggctgcaaacagagaaaaacttatttaagcattccagaattgacccaatagaagactctccagaaaagactgcatggtctctgaagcagcatgatcagcatgactggctgcatctgggctccaccgtttgccacttcagacaggtccttagcctcttagaggttcattttccttgctgtagcccggagtaagaatgtttagcctacaagatttattttgaggcatcaatgaatcactatgtgagcctcacacagtgtctggcactgatattacaagatatggttgatcttgccatccttgttattgtcctggttggggattcctctctgttgaagatacggagcctctaaaaatgagtggcagaggctcccagctcaggatccttgtcc

SEQ ID NO: 24549 - DNA, 595 bp, Homo sapiens
cggcgactacaactcccagtaggccgtgcggcgaaccacagccctcggccaatgggagtctccgctggtctggccttcgaccaatggaagcattatggccgatggccaatgggagcccccacccgctggcctctggccaatgggagcactcagctaaggctggtgggggcggtgttgctcggggctgcgatgccccttaggttgcgggcaaccagaggcctcactcgtgggcaggaagcaagggcggaccccgagagatgactgattgtgggggtggggaccgtctgctcctcctaatggctggggaccgtgcacgtctgcgcgggccggacctgctcttctcgggaacttgcgcgggaggaggcccggagctgcgccgctttaccctctgctccccggtgcctaaaacgcacacgcatcaaagtcacaggacgagttagaggaatatacaatagagttttccagaggctgctggatgagtcatattgtaacagatgcaatgggaacatggagctgtgggaactcaactgccttaagtgaagccagacattaaggagatttgaaaaaatataatacagtgccactcttctcccta

SEQ ID NO: 24550 - DNA, 344 bp, Homo sapiens
tttgtttatttttgagacagagcctggctctgttgcccaggctgaagtgaagtggcattatcttggctaactgcaactccacctcccaggttcaagtgatcgagaaaggcagagggagatttgaaacacagaggaggtgatgagaagacacagcagaagatatctgaagactggaaagaatgctgcaaccaacaggagaaggaaaagacagaaatgtgttttccatttggagcatccagagggagcacaaccatatcaacaccttgattttgatccagtgacattgattttggacttgtggcctccagaacttttagagaataaatttgcattgttttaagcca

SEQ ID NO: 24551 - DNA, 347 bp, Homo sapiens
attttttttctgtactatccaggggggctctaaatgtaatcacaagtgttcctagagaaaggcagagggagatttgaaacacagaggaggtgatgagaagacacagcagaagatatctgaagactggaaagaatgctgcaaccaacaggagaaggaaaagacagaaatgtgttttccatttggagcatccagagggagcacaaccatatcaacaccttgattttgatccagtgacattgattttggacttgtggcctccagaacttttagagaataaatttgcattgttttaagccaacaggttggtggaaacttttttacagcagccacaggaagcaaacacagac

SEQ ID NO: 24552 - DNA, 685 bp, Homo sapiens
cggcgactacaactcccagtaggccgtgcggcgaaccacagccctcggccaatgggagtctccgctggtctggccttcgaccaatggaagcattatggccgatggccaatgggagcccccacccgctggcctctggccaatgggagcactcagctaaggctggtgggggcggtgttgctcggggctgcgatgccccttaggttgcgggcaaccagaggcctcactcgtgggcaggaagcaagggcggaccccgagagatgactgattgtgggggtggggaccgtctgctcctcctaatggctggggaccgtgcacgtctgcgcgggccggacctgctcttctcgggaacttgcgcgggaggaggcccggagctgcgccgctttaccctctgctccccggtgcctaaaacgcacacgcatcaaagtcacaggacgagttagaggagaaaggcagagggagatttgaaacacagaggaggtgatgagaagacacagcagaagatatctgaagactggaaagaatgctgcaaccaacaggagaaggaaaagacagaaatgtgttttccatttggagcatccagagggagcacaaccatatcaacaccttgattttgatccagtgacattgattttggacttgtggcctccagaacttttagagaataaatttgcattgttttaagcca

SEQ ID NO: 24553 - DNA, 430 bp, Homo sapiens
tagggatagggaggcagtattgtgtaatggccttgcattcagatagctcttggttcaaatcctgcatctgtcatgtattatctgtgggattaaacatcaaagtgttgttaccacattattattatgattgttattactattgtctttatgattatagtcatttaagcagaatgatacagaaatccaggagggaaagggaaaagaatattttgtgtcataatgtctgccattgttaagagagattatgtaccttgattgtgctaaacacaatatattcattatctcagtgtttttcaaaggtgtattttgcagggtattaacagttacttgtggtcaagtgagtttaaagaacaccagctaaccatagttaaacaggcttctttattgcagaactctttagtctttttaatatactactgtaccttgcaga

SEQ ID NO: 24554 - DNA, 123 bp, Homo sapiens
gaaaaaggaatgatttttgttcttgtaaagttaatgctgggaacaagccagttggttttctagctgtttcttgggacagactgatgagtttgtgagctcttaggagtcagcatgatttcccat

SEQ ID NO: 24555 - DNA, 348 bp, Homo sapiens
aaaagggtaaggtatcctggctacaaagagactgaaaaatgacccaagagctagtcagatctgaggggtcctgttaagaagctctacattttatccttgaagcaacagatatctcaaaaaacgggtagaggcaactcagttttttattactaagaaccctgacaacagttatagactagaataagagcaaaacaggcagcaactggagacccatcaaccaactatctgagagtaattcagcagataaataattgagatctgacaaagggagaggcagtagagatgaacagaaaagttaaaagcaggaaattctcaagtttctagcaatagtgaaaccaccaaccaaat

SEQ ID NO: 24556 - DNA, 812 bp, Homo sapiens
gcgtgaatttccttgagcagaatctgggaggcaaacaggaattgcttcagatacaaacgtaggagccactggtgacagacagggaggggcaaggtgggaaagccatgcttgctttctcagcaggaaagctcacagcctggggcaagttctgagtggggcactgcaggagccaggccagcctcaccaactatgagggagttgggtaaggcctcttgctacagctatcacccatttccctgagaaactatatagaacaacagaggcaaccaaaagcccctctggaacataaccccattggcctgagaaccaccccctcaatcccctacagtggccacagcaagcctcacccaaggaaagtctaagcttggacccacctaaaccagccccaacctgatggtatttctctattttcccatggttgccaaacacaaaagatagaaacttctttgggggctttatggccccatccatcacctgacaaactaaaatccttatcctggccaatgcagggcaagcacagatccccctactactactatagctgatgctcttttgaaaatgccacccacaggctggaggccaatctacttgggccataacagcaacttatgacagaataatcttgctgccaggaagaagaagacaatagctaattccactgcccacaacatcctggctaaccaatggtccttagtctctccatttgacaactttactgctagcataaccagcattcgagaaagccagcacactaaacgtatctacaaccaaggactgggtctacctcactcccctgccacctccatccaagc

SEQ ID NO: 24557 - DNA, 435 bp, Homo sapiens
gaccaaagaatgatatagggcccagaaggtaggcaaagagaaagttgttgggtttatggttacaagtaaactagcagttgtggtgcagatagttttatttcccccacattaatctgaacagcccatccagacttaaacactgctttttgcatttacttctaggcaggaagacagggttctgatggtgtgagtctccttcaactcagcaaaccaccttggtctgcctcgagtttccaacacccctcctgcctgctagtgataggtgtgaggcaggttgatgaacatggaacttttttcttttggtcccaaagcatgctactcctggagtttcattcagtgaatgagaactatagtttggttctgtgagatctctatgaatcaaggcggccactgaagcggatcagcgggatcactctaggctacccagcagacacg

SEQ ID NO: 24558 - DNA, 2786 bp, Homo sapiens
  misc_feature (828)..(828): n is a, c, g, or t
ggcaggccggctcggaggcagcgagaaagcgcagccaggcggctgctcggcgttctctcaggtgactgctcggagttctcccagtgtttggtgttgcaagcaggatccaaaggagacctatagtgactcccaggagctcttagtgaccaagtgaaggtacctgtggggctcattgtgcccattgctctttcactgctttcaactggtagttgtgggttgaagcactggacaatgccacatactttgtggatggtgtgggtcttgggggtcatcatcagcctctccaaggaagaatcctccaatcaggcttctctgtcttgtgaccgcaatggtatctgcaagggcagctcaggatctttaaactccattccctcagggctcacagaagctgtaaaaagccttgacctgtccaacaacaggatcacctacattagcaacagtgacctacagaggtgtgtgaacctccaggctctggtgctgacatccaatggaattaacacaatagaggaagattctttttcttccctgggcagtcttgaacatttagacttatcctataattacttatctaatttatcgtcttcctggttcaagcccctttcttctttaacattcttaaacttactgggaaatccttacaaaaccctaggggaaacatctcttttttctcatctcacaaaattgcaaatcctgagagtgggaaatatggacaccttcactaagattcaaagaaaagattttgctggacttaccttccttgaggaacttgagattgatgcttcagatctacagagctatgagccaaaaagtttgaagtcaattcagaangtaagtcatctgatccttcatatgaagcagcatattttactgctggagatttttgtagatgttacaagttccgtggaatgtttggaactgcgagatactgatttggacactttccatttttcagaactatccactggtgaaacaaattcattgattaaaaagtttacatttagaaatgtgaaaatcaccgatgaaagtttgtttcaggttatgaaacttttgaatcagatttctggattgttagaattagagtttgatgactgtacccttaatggagttggtaattttagagcatctgataatgacagagttatagatccaggtaaagtggaaacgttaacaatccggaggctgcatattccaaggttttacttattttatgatctgagcactttatattcacttacagaaagagttaaaagaatcacagtagaaaacagtaaagtttttctggttccttgtttactttcacaacatttaaaatcattagaatacttggatctcagtgaaaatttgatggttgaagaatacttgaaaaattcagcctgtgaggatgcctggccctctctacaaactttaattttaaggcaaaatcatttggcatcattggaaaaaaccggagagactttgctcactctgaaaaacttgactaacattgatatcagtaagaatagttttcattctatgcctgaaacttgtcagtggccagaaaagatgaaatatttgaacttatccagcacacgaatacacagtgtaacaggctgcattcccaagacactggaaattttagatgttagcaacaacaatctcaatttattttctttgaatttgccgcaactcaaagaactttatatttccagaaataagttgatgactctaccagatgcctccctcttacccatgttactagtattgaaaatcagtaggaatgcaataactacgttttctaaggagcaacttgactcatttcacacactgaagactttggaagctggtggcaataacttcatttgctcctgtgaattcctctccttcactcaggagcagcaagcactggccaaagtcttgattgattggccagcaaattacctgtgtgactctccatcccatgtgcgtggccagcaggttcaggatgtccgcctctcggtgtcggaatgtcacaggacagcactggtgtctggcatgtgctgtgctctgttcctgctgatcctgctcacgggggtcctgtgccaccgtttccatggcctgtggtatatgaaaatgatgtgggcctggctccaggccaaaaggaagcccaggaaagctcccagcaggaacatctgctatgatgcatttgtttcttacagtgagcgggatgcctactgggtggagaaccttatggtccaggagctggagaacttcaatccccccttcaagttgtgtcttcataagcgggacttcattcctggcaagtggatcattgacaatatcattgactccattgaaaagagccacaaaactgtctttgtgctttctgaaaactttgtgaagagtgagtggtgcaagtatgaactggacttctcccatttccgtctttttgatgagaacaatgatgctgccattctcattcttctggagcccattgagaaaaaagccattccccagcgcttctgcaagctgcggaagataatgaacaccaagacctacctggagtggcccatggacgaggctcagcgggaaggattttgggtaaatctgagagctgcgataaagtcctaggttcccatatttaagaccagtctttgtctagttgggatctttatgtcactagttatagttaagttcattcagacataattatataaaaactacgtggatgtaccgtcatttgaggacttgcttactaaaactacaaaacttcaaattttgtctggggtgctgttttataaacatatgcccagaaggcacgtccgagctga

SEQ ID NO: 24559 - DNA, 3354 bp, Homo sapiens
  misc_feature (769)..(769): n is a, c, g, or t
ggcaggccggctcggaggcagcgagaaagcgcagccaggcggctgctcggcgttctctcaggtgactgctcggagttctcccagtgtttggtgttgcaagcaggatccaaaggagacctatagtgactcccaggagctcttagtgaccaagtgaaggttgaagcactggacaatgccacatactttgtggatggtgtgggtcttgggggtcatcatcagcctctccaaggaagaatcctccaatcaggcttctctgtcttgtgaccgcaatggtatctgcaagggcagctcaggatctttaaactccattccctcagggctcacagaagctgtaaaaagccttgacctgtccaacaacaggatcacctacattagcaacagtgacctacagaggtgtgtgaacctccaggctctggtgctgacatccaatggaattaacacaatagaggaagattctttttcttccctgggcagtcttgaacatttagacttatcctataattacttatctaatttatcgtcttcctggttcaagcccctttcttctttaacattcttaaacttactgggaaatccttacaaaaccctaggggaaacatctcttttttctcatctcacaaaattgcaaatcctgagagtgggaaatatggacaccttcactaagattcaaagaaaagattttgctggacttaccttccttgaggaacttgagattgatgcttcagatctacagagctatgagccaaaaagtttgaagtcaattcagaangtaagtcatctgatccttcatatgaagcagcatattttactgctggagatttttgtagatgttacaagttccgtggaatgtttggaactgcgagatactgatttggacactttccatttttcagaactatccactggtgaaacaaattcattgattaaaaagtttacatttagaaatgtgaaaatcaccgatgaaagtttgtttcaggttatgaaacttttgaatcagatttctggattgttagaattagagtttgatgactgtacccttaatggagttggtaattttagagcatctgataatgacagagttatagatccaggtaaagtggaaacgttaacaatccggaggctgcatattccaaggttttacttattttatgatctgagcactttatattcacttacagaaagagttaaaagaatcacagtagaaaacagtaaagtttttctggttccttgtttactttcacaacatttaaaatcattagaatacttggatctcagtgaaaatttgatggttgaagaatacttgaaaaattcagcctgtgaggatgcctggccctctctacaaactttaattttaaggcaaaatcatttggcatcattggaaaaaaccggagagactttgctcactctgaaaaacttgactaacattgatatcagtaagaatagttttcattctatgcctgaaacttgtcagtggccagaaaagatgaaatatttgaacttatccagcacacgaatacacagtgtaacaggctgcattcccaagacactggaaattttagatgttagcaacaacaatctcaatttattttctttgaatttgccgcaactcaaagaactttatatttccagaaataagttgatgactctaccagatgcctccctcttacccatgttactagtattgaaaatcagtaggaatgcaataactacgttttctaaggagcaacttgactcatttcacacactgaagactttggaagctggtggcaataacttcatttgctcctgtgaattcctctccttcactcaggagcagcaagcactggccaaagtcttgattgattggccagcaaattacctgtgtgactctccatcccatgtgcgtggccagcaggttcaggatgtccgcctctcggtgtcggaatgtcacaggacagcactggtgtctggcatgtgctgtgctctgttcctgctgatcctgctcacgggggtcctgtgccaccgtttccatggcctgtggtatatgaaaatgatgtgggcctggctccaggccaaaaggaagcccaggaaagctcccagcaggaacatctgctatgatgcatttgtttcttacagtgagcgggatgcctactgggtggagaaccttatggtccaggagctggagaacttcaatccccccttcaagttgtgtcttcataagcgggacttcattcctggcaagtggatcattgacaatatcattgactccattgaaaagagccacaaaactgtctttgtgctttctgaaaactttgtgaagagtgagtggtgcaagtatgaactggacttctcccatttccgtctttttgatgagaacaatgatgctgccattctcattcttctggagcccattgagaaaaaagccattccccagcgcttctgcaagctgcggaagataatgaacaccaagacctacctggagtggcccatggacgaggctcagcgggaaggattttgggtaaatctgagagctgcgataaagtcctaggttcccatatttaagaccagtctttgtctagttgggatctttatgtcactagttatagttaagttcattcagacataattatataaaaactacgtggatgtaccgtcatttgaggacttgcttactaaaactacaaaacttcaaattttgtctggggtgctgttttataaacatatgccagatttaaaaattggtttttggtttttcttttttctatgagataaccatgatcataagtctattactgatatctgaatatagtcccttggtatccaagggaattggttgcaggatcctcgtggatatcaaaattcatagatgatcaagtcccttataagagtggcatagtatttgcatataacctgtgtacattctcctgtatactttaaatcatctctagattacttatgatacccaatacaatgtaaatactatgtaaatagttgtactgtctttttatttatattattattgttattttttattttcaaaatttttaaaacatacttttgatccacagttggttgacttcatggatgcagaacccatggatatagagggccaactgtaatctgtagcaactggcttagttcattaggaaacagcacaaatgaacttaagattctcaatgactgtgtcattctttcttcctgctaagagactcctctgtggccacaaaaggcattctctgtcctacctagctgtcacttctctgtgcagctgatctcaagagcaacaaggcaaagtatttggggcactccccaaaacttgttgctattcctagaaaaaagtgctgtgtatttcctattaaactttacaggatgaga

SEQ ID NO: 24560 - DNA, 3413 bp, Homo sapiens
  misc_feature (828)..(828): n is a, c, g, or t
ggcaggccggctcggaggcagcgagaaagcgcagccaggcggctgctcggcgttctctcaggtgactgctcggagttctcccagtgtttggtgttgcaagcaggatccaaaggagacctatagtgactcccaggagctcttagtgaccaagtgaaggtacctgtggggctcattgtgcccattgctctttcactgctttcaactggtagttgtgggttgaagcactggacaatgccacatactttgtggatggtgtgggtcttgggggtcatcatcagcctctccaaggaagaatcctccaatcaggcttctctgtcttgtgaccgcaatggtatctgcaagggcagctcaggatctttaaactccattccctcagggctcacagaagctgtaaaaagccttgacctgtccaacaacaggatcacctacattagcaacagtgacctacagaggtgtgtgaacctccaggctctggtgctgacatccaatggaattaacacaatagaggaagattctttttcttccctgggcagtcttgaacatttagacttatcctataattacttatctaatttatcgtcttcctggttcaagcccctttcttctttaacattcttaaacttactgggaaatccttacaaaaccctaggggaaacatctcttttttctcatctcacaaaattgcaaatcctgagagtgggaaatatggacaccttcactaagattcaaagaaaagattttgctggacttaccttccttgaggaacttgagattgatgcttcagatctacagagctatgagccaaaaagtttgaagtcaattcagaangtaagtcatctgatccttcatatgaagcagcatattttactgctggagatttttgtagatgttacaagttccgtggaatgtttggaactgcgagatactgatttggacactttccatttttcagaactatccactggtgaaacaaattcattgattaaaaagtttacatttagaaatgtgaaaatcaccgatgaaagtttgtttcaggttatgaaacttttgaatcagatttctggattgttagaattagagtttgatgactgtacccttaatggagttggtaattttagagcatctgataatgacagagttatagatccaggtaaagtggaaacgttaacaatccggaggctgcatattccaaggttttacttattttatgatctgagcactttatattcacttacagaaagagttaaaagaatcacagtagaaaacagtaaagtttttctggttccttgtttactttcacaacatttaaaatcattagaatacttggatctcagtgaaaatttgatggttgaagaatacttgaaaaattcagcctgtgaggatgcctggccctctctacaaactttaattttaaggcaaaatcatttggcatcattggaaaaaaccggagagactttgctcactctgaaaaacttgactaacattgatatcagtaagaatagttttcattctatgcctgaaacttgtcagtggccagaaaagatgaaatatttgaacttatccagcacacgaatacacagtgtaacaggctgcattcccaagacactggaaattttagatgttagcaacaacaatctcaatttattttctttgaatttgccgcaactcaaagaactttatatttccagaaataagttgatgactctaccagatgcctccctcttacccatgttactagtattgaaaatcagtaggaatgcaataactacgttttctaaggagcaacttgactcatttcacacactgaagactttggaagctggtggcaataacttcatttgctcctgtgaattcctctccttcactcaggagcagcaagcactggccaaagtcttgattgattggccagcaaattacctgtgtgactctccatcccatgtgcgtggccagcaggttcaggatgtccgcctctcggtgtcggaatgtcacaggacagcactggtgtctggcatgtgctgtgctctgttcctgctgatcctgctcacgggggtcctgtgccaccgtttccatggcctgtggtatatgaaaatgatgtgggcctggctccaggccaaaaggaagcccaggaaagctcccagcaggaacatctgctatgatgcatttgtttcttacagtgagcgggatgcctactgggtggagaaccttatggtccaggagctggagaacttcaatccccccttcaagttgtgtcttcataagcgggacttcattcctggcaagtggatcattgacaatatcattgactccattgaaaagagccacaaaactgtctttgtgctttctgaaaactttgtgaagagtgagtggtgcaagtatgaactggacttctcccatttccgtctttttgatgagaacaatgatgctgccattctcattcttctggagcccattgagaaaaaagccattccccagcgcttctgcaagctgcggaagataatgaacaccaagacctacctggagtggcccatggacgaggctcagcgggaaggattttgggtaaatctgagagctgcgataaagtcctaggttcccatatttaagaccagtctttgtctagttgggatctttatgtcactagttatagttaagttcattcagacataattatataaaaactacgtggatgtaccgtcatttgaggacttgcttactaaaactacaaaacttcaaattttgtctggggtgctgttttataaacatatgccagatttaaaaattggtttttggtttttcttttttctatgagataaccatgatcataagtctattactgatatctgaatatagtcccttggtatccaagggaattggttgcaggatcctcgtggatatcaaaattcatagatgatcaagtcccttataagagtggcatagtatttgcatataacctgtgtacattctcctgtatactttaaatcatctctagattacttatgatacccaatacaatgtaaatactatgtaaatagttgtactgtctttttatttatattattattgttattttttattttcaaaatttttaaaacatacttttgatccacagttggttgacttcatggatgcagaacccatggatatagagggccaactgtaatctgtagcaactggcttagttcattaggaaacagcacaaatgaacttaagattctcaatgactgtgtcattctttcttcctgctaagagactcctctgtggccacaaaaggcattctctgtcctacctagctgtcacttctctgtgcagctgatctcaagagcaacaaggcaaagtatttggggcactccccaaaacttgttgctattcctagaaaaaagtgctgtgtatttcctattaaactttacaggatgaga

SEQ ID NO: 24561 - DNA, 4025 bp, Homo sapiens
  misc_feature (1440)..(1440): n is a, c, g, or t
gaccaaagaatgatatagggcccagaaggtaggcaaagagaaagttgttgggtttatggttacaagtaaactagcagttgtggtgcagatagttttatttcccccacattaatctgaacagcccatccagacttaaacactgctttttgcatttacttctaggcaggaagacagggttctgatggtgtgagtctccttcaactcagcaaaccaccttggtctgcctcgagtttccaacacccctcctgcctgctagtgataggtgtgaggcaggttgatgaacatggaacttttttcttttggtcccaaagcatgctactcctggagtttcattcagtgaatgagaactatagtttggttctgtgagatctctatgaatcaaggcggccactgaagcggagaaaagaaatgcttaaatgttaagaaagtttgaagtgcagaaaaaggtgattgtaaatccatatggttaagcttagcccatttcttaaaaggcttgattgctcattcctccattcattgatttactcactcttccaatccatgttattgagtcttgctctgtaattccggatggttgtgcttttaagtactgcatagtggttgtatgtctgtgttagcattgctgaatgtatcagggaattcatttttttatccccattcattcgttccattcatctgtttctctctctctctctctttgtgtgtgtgtgtgtgtgtgtgtgtgtgtgtgtgtgtgtgtgtgttatgcctagaaaacatttctcaagaattagaattacgatatgctgtcaaacacaatgacttatttgaacctcttttatttgtaggttgaagcactggacaatgccacatactttgtggatggtgtgggtcttgggggtcatcatcagcctctccaaggaagaatcctccaatcaggcttctctgtcttgtgaccgcaatggtatctgcaagggcagctcaggatctttaaactccattccctcagggctcacagaagctgtaaaaagccttgacctgtccaacaacaggatcacctacattagcaacagtgacctacagaggtgtgtgaacctccaggctctggtgctgacatccaatggaattaacacaatagaggaagattctttttcttccctgggcagtcttgaacatttagacttatcctataattacttatctaatttatcgtcttcctggttcaagcccctttcttctttaacattcttaaacttactgggaaatccttacaaaaccctaggggaaacatctcttttttctcatctcacaaaattgcaaatcctgagagtgggaaatatggacaccttcactaagattcaaagaaaagattttgctggacttaccttccttgaggaacttgagattgatgcttcagatctacagagctatgagccaaaaagtttgaagtcaattcagaangtaagtcatctgatccttcatatgaagcagcatattttactgctggagatttttgtagatgttacaagttccgtggaatgtttggaactgcgagatactgatttggacactttccatttttcagaactatccactggtgaaacaaattcattgattaaaaagtttacatttagaaatgtgaaaatcaccgatgaaagtttgtttcaggttatgaaacttttgaatcagatttctggattgttagaattagagtttgatgactgtacccttaatggagttggtaattttagagcatctgataatgacagagttatagatccaggtaaagtggaaacgttaacaatccggaggctgcatattccaaggttttacttattttatgatctgagcactttatattcacttacagaaagagttaaaagaatcacagtagaaaacagtaaagtttttctggttccttgtttactttcacaacatttaaaatcattagaatacttggatctcagtgaaaatttgatggttgaagaatacttgaaaaattcagcctgtgaggatgcctggccctctctacaaactttaattttaaggcaaaatcatttggcatcattggaaaaaaccggagagactttgctcactctgaaaaacttgactaacattgatatcagtaagaatagttttcattctatgcctgaaacttgtcagtggccagaaaagatgaaatatttgaacttatccagcacacgaatacacagtgtaacaggctgcattcccaagacactggaaattttagatgttagcaacaacaatctcaatttattttctttgaatttgccgcaactcaaagaactttatatttccagaaataagttgatgactctaccagatgcctccctcttacccatgttactagtattgaaaatcagtaggaatgcaataactacgttttctaaggagcaacttgactcatttcacacactgaagactttggaagctggtggcaataacttcatttgctcctgtgaattcctctccttcactcaggagcagcaagcactggccaaagtcttgattgattggccagcaaattacctgtgtgactctccatcccatgtgcgtggccagcaggttcaggatgtccgcctctcggtgtcggaatgtcacaggacagcactggtgtctggcatgtgctgtgctctgttcctgctgatcctgctcacgggggtcctgtgccaccgtttccatggcctgtggtatatgaaaatgatgtgggcctggctccaggccaaaaggaagcccaggaaagctcccagcaggaacatctgctatgatgcatttgtttcttacagtgagcgggatgcctactgggtggagaaccttatggtccaggagctggagaacttcaatccccccttcaagttgtgtcttcataagcgggacttcattcctggcaagtggatcattgacaatatcattgactccattgaaaagagccacaaaactgtctttgtgctttctgaaaactttgtgaagagtgagtggtgcaagtatgaactggacttctcccatttccgtctttttgatgagaacaatgatgctgccattctcattcttctggagcccattgagaaaaaagccattccccagcgcttctgcaagctgcggaagataatgaacaccaagacctacctggagtggcccatggacgaggctcagcgggaaggattttgggtaaatctgagagctgcgataaagtcctaggttcccatatttaagaccagtctttgtctagttgggatctttatgtcactagttatagttaagttcattcagacataattatataaaaactacgtggatgtaccgtcatttgaggacttgcttactaaaactacaaaacttcaaattttgtctggggtgctgttttataaacatatgccagatttaaaaattggtttttggtttttcttttttctatgagataaccatgatcataagtctattactgatatctgaatatagtcccttggtatccaagggaattggttgcaggatcctcgtggatatcaaaattcatagatgatcaagtcccttataagagtggcatagtatttgcatataacctgtgtacattctcctgtatactttaaatcatctctagattacttatgatacccaatacaatgtaaatactatgtaaatagttgtactgtctttttatttatattattattgttattttttattttcaaaatttttaaaacatacttttgatccacagttggttgacttcatggatgcagaacccatggatatagagggccaactgtaatctgtagcaactggcttagttcattaggaaacagcacaaatgaacttaagattctcaatgactgtgtcattctttcttcctgctaagagactcctctgtggccacaaaaggcattctctgtcctacctagctgtcacttctctgtgcagctgatctcaagagcaacaaggcaaagtatttggggcactccccaaaacttgttgctattcctagaaaaaagtgctgtgtatttcctattaaactttacaggatgaga

SEQ ID NO: 24562 - DNA, 385 bp, Homo sapiens
cttccaaaaaaatgaaaagggaggaacacttacctcattccatgatatcaaaccaaacaaataacatcacaagaaaactgcagaccagtattccttatgaatatgcttataaaaatcctccataaaatactggcaaactcaatccagcaacatatgacaaaaattatacattgtgaccaagtgagatttattccaagaatgcaaggttggttcaatgtgaaagtcaaccagtaggatacatcaaactaacagaataaaagaaaccacatgatcatttcaacagacgggaaaaaaaacacttgacaaatccaatatcctttaattaaaaaaaaaaaactagaaatagaaggaaatgtcctcaacttgatgagcatttatgaaaata

SEQ ID NO: 24563 - DNA, 518 bp, Homo sapiens
aaatctacataactgatttaagacatttcctctttactaacataagcacttaacattatcagcttcattgtatgcactgctttaactgcatcccgtaaattttcatatgttctgtttccattgtcattctgctcaaaatgttttctgatttcctttgctgtttttcgttaattcttaggttaattcccaaatattaggggattttccagataactttttgctagaatttggttttgttatttaatgtcatctgtgtggtctaagaatatgctctgcataaattcaagtttttaaaacttactgacatttattttttggcccagcatatagtttaattttgggggatgttatgtgtgcatttgaaaaaaatgtgttttctctcttgttgagtgttctgtaaatgacaataaggtcgaattagattgatggtgttgttcaagtcttttatgtcttaaccaattttctatatacttgttataccaattactgagagagaagtagtaaaatctccaaccata

SEQ ID NO: 24564 - DNA, 2190 bp, Homo sapiens
  misc_feature (2187)..(2190): n is a, c, g, or t
ccttcctccctcctgcatctgagctttgtctccaccagcaacatgagccgccaattcacctgcaagtcgggagctgccgccaaggggggcttcagtggctgtcagtgggggctttggcagccggagcctctacagcctggggggtgtccggagcctcaatgtggccagtggcagcgggaagagtggaggctatggatttggccggggccgggccagtggctttgctggaagcatgtttggcagtgtggccctggggcctgtgtgcccaactgtatgcccacctggaggcatccaccaggttaccgtcaatgagagcctcctggcccccctcaacgtggagctggaccccgagatccagaaagtgcgtgcccaggagcgagagcagatcaaggctctgaacaacaagttcgcctccttcatcgacaaggtgcggttcctggagcagcagaaccaggtactggagaccaagtgggagctgctgcagcagctggacctgaacaactgcaagaacaacctggagcccatcctcgagggctacatcagcaacctgcggaagcagctggagacgctgtctggggacagggtgaggctggactcggagctgaggaatgtgcgggacgtagtggaggactacaagaagaggtatgaggaggaaatcaacaagcggacagcagcagagaacgagtttgtgctgctcaagaaggatgtggatgctgcttacgccaataaggtggaactgcaggccaaggtggaatccatggaccaggagatcaagttcttcaggtgtctctttgaagccgagatcactcagatccagtcccacatcagtgacatgtctgtcatcctgtccatggacaacaaccggaacctagacctggacagcatcattgacgaagtccgcacccagtatgaggagattgccttgaagagtaaggccgaggctgaggccctgtaccagaccaagttccaagagcttcagctggcagctggcaggcatggggacgacctcaaaaacaccaagaatgaaatctcggagctcactcggctcatccagagaatccgctcagagatcgagaacgtgaagaagcaggcttccaacctggagacagccatcgctgatgctgagcagcggggagacaacgccctgaaggatgcccgggccaagctggacgagctggagggcgccctgcaccaggccaaggaggagctggcgcggatgctgcgcgagtaccaggagctcatgagcctgaagctggccctggacatggagatcgccacctatcgcaagctactggagagcgaggagtgcaggatgtcaggagaatttccctcccctgtcagcatctccatcatcagcagcaccagtggcggcagtgtctatggcttccggcccagcatggtcagcggtggctatgtggccaacagcagcaactgcatctctggagtgtgcagcgtgagaggcggggagggcaggagccggggcagtgccaacgattacaaagacaccctagggaagggttccagcctgagtgcaccctccaagaaaaccagtcggtagagaagactgccccgggccccgcctcattccatgacccggctctggatcccacactgtacttcccacagcccactctcagctccatctccaccctgctggtcctgctcccatacacctggcactggccttggccacccacttctcccagcctgtgtcttcctgatcctgggaaggcctggatgaccaagcttggtgaaattcctccctgtacacaccctattaactccttggctgtggtcccccagctacaccaccagcccaggtcctggctgccagctttcctcctctgcccggcctctagcgcagtcgctaactactctgctgggctccctgggtctctgcccaaggccccgcacacactggggcctagcatagttcctgcctatgccaggagctggctctgtgtttaagaaaaggaggactgaaggacaaacaaccaagagtggcccagtccccacccccacatctagctcagtctcaaatctgagtgggaccaagtgcaattcagggcctttttctccactcacctgcacccagaagcagagaaaagcaggcactgttcacttttcctttattcttaatggccttcctctgttgcaacctcaataaacagcacaatctcaaaaaannnn

SEQ ID NO: 24565 - DNA, 1521 bp, Homo sapiens
  misc_feature (1518)..(1521): n is a, c, g, or t
ccttcctccctcctgcatctgagctttgtctccaccagcaacatgagccgccaattcacctgcaagtcgggagctgccgccaaggggggcttcagtggctgctcagctgtgctctcagggggcagctcatcctccttccgggcagggagcaaagggctcagtgggggctttggcagccggagcctctacagcctggggggtgtccggagcctcaatgtggccagtggcagcgggaagagtggaggctatggatttggccggggccgggccagtggctttgctggaagcatgtttggcagtgtggccctggggcctgtgtgcccaactgtatgcccacctggaggcatccaccaggttaccgtcaatgagagcctcctggcccccctcaacgtggagctggaccccgagatccagaaagtgcgtgcccaggagcgagagcagatcaaggctctgaacaacaagttcgcctccttcatcgacaaggtgcggttcctggagcagcagaaccaggtactggagaccaagtgggagctgctgcagcagctggacctgaacaactgcaagaacaacctggagcccatcctcgagggctacatcagcaacctgcggaagcagctggagacgctgtctggggacagggtgaggctggactcggagctgaggaatgtgcgggacgtagtggaggactacaagaagaggtatgaggaggaaatcaacaagcggacagcagcagagaacgagtttgtgctgctcaagaaggatgtggatgctgcttacgccaataaggtggaactgcaggccaaggtggaatccatggaccaggagatcaagttcttcaggtgtctctttgaagccgagatcactcagatccagtcccacatcagtgacatgtctgtcatcctgtccatggacaacaaccggaacctagacctggacagcatcattgacgaagtccgcacccagtatgaggagattgccttgaagagtaaggccgaggctgaggccctgtaccagaccaagttccaagagcttcagctggcagctggcaggcatggggacgacctcaaaaacaccaagcttggtgaaattcctccctgtacacaccctattaactccttggctgtggtcccccagctacaccaccagcccaggtcctggctgccagctttcctcctctgcccggcctctagcgcagtcgctaactactctgctgggctccctgggtctctgcccaaggccccgcacacactggggcctagcatagttcctgcctatgccaggagctggctctgtgtttaagaaaaggaggactgaaggacaaacaaccaagagtggcccagtccccacccccacatctagctcagtctcaaatctgagtgggaccaagtgcaattcagggcctttttctccactcacctgcacccagaagcagagaaaagcaggcactgttcacttttcctttattcttaatggccttcctctgttgcaacctcaataaacagcacaatctcaaaaaannnn

SEQ ID NO: 24566 - DNA, 2246 bp, Homo sapiens
  misc_feature (2243)..(2246): n is a, c, g, or t
ccttcctccctcctgcatctgagctttgtctccaccagcaacatgagccgccaattcacctgcaagtcgggagctgccgccaaggggggcttcagtggctgctcagctgtgctctcagggggcagctcatcctccttccgggcagggagcaaagggctcagtgggggctttggcagccggagcctctacagcctggggggtgtccggagcctcaatgtggccagtggcagcgggaagagtggaggctatggatttggccggggccgggccagtggctttgctggaagcatgtttggcagtgtggccctggggcctgtgtgcccaactgtatgcccacctggaggcatccaccaggttaccgtcaatgagagcctcctggcccccctcaacgtggagctggaccccgagatccagaaagtgcgtgcccaggagcgagagcagatcaaggctctgaacaacaagttcgcctccttcatcgacaaggtgcggttcctggagcagcagaaccaggtactggagaccaagtgggagctgctgcagcagctggacctgaacaactgcaagaacaacctggagcccatcctcgagggctacatcagcaacctgcggaagcagctggagacgctgtctggggacagggtgaggctggactcggagctgaggaatgtgcgggacgtagtggaggactacaagaagaggtatgaggaggaaatcaacaagcggacagcagcagagaacgagtttgtgctgctcaagaaggatgtggatgctgcttacgccaataaggtggaactgcaggccaaggtggaatccatggaccaggagatcaagttcttcaggtgtctctttgaagccgagatcactcagatccagtcccacatcagtgacatgtctgtcatcctgtccatggacaacaaccggaacctagacctggacagcatcattgacgaagtccgcacccagtatgaggagattgccttgaagagtaaggccgaggctgaggccctgtaccagaccaagttccaagagcttcagctggcagctggcaggcatggggacgacctcaaaaacaccaagaatgaaatctcggagctcactcggctcatccagagaatccgctcagagatcgagaacgtgaagaagcaggcttccaacctggagacagccatcgctgatgctgagcagcggggagacaacgccctgaaggatgcccgggccaagctggacgagctggagggcgccctgcaccaggccaaggaggagctggcgcggatgctgcgcgagtaccaggagctcatgagcctgaagctggccctggacatggagatcgccacctatcgcaagctactggagagcgaggagtgcaggatgtcaggagaatttccctcccctgtcagcatctccatcatcagcagcaccagtggcggcagtgtctatggcttccggcccagcatggtcagcggtggctatgtggccaacagcagcaactgcatctctggagtgtgcagcgtgagaggcggggagggcaggagccggggcagtgccaacgattacaaagacaccctagggaagggttccagcctgagtgcaccctccaagaaaaccagtcggtagagaagactgccccgggccccgcctcattccatgacccggctctggatcccacactgtacttcccacagcccactctcagctccatctccaccctgctggtcctgctcccatacacctggcactggccttggccacccacttctcccagcctgtgtcttcctgatcctgggaaggcctggatgaccaagcttggtgaaattcctccctgtacacaccctattaactccttggctgtggtcccccagctacaccaccagcccaggtcctggctgccagctttcctcctctgcccggcctctagcgcagtcgctaactactctgctgggctccctgggtctctgcccaaggccccgcacacactggggcctagcatagttcctgcctatgccaggagctggctctgtgtttaagaaaaggaggactgaaggacaaacaaccaagagtggcccagtccccacccccacatctagctcagtctcaaatctgagtgggaccaagtgcaattcagggcctttttctccactcacctgcacccagaagcagagaaaagcaggcactgttcacttttcctttattcttaatggccttcctctgttgcaacctcaataaacagcacaatctcaaaaaannnn

SEQ ID NO: 24567 - DNA, 286 bp, Homo sapiens
cccaaaccacactcccctcctgcccgcactgattgtctcttgtctttatcattctgagacactgaatggccaagacttgatgctgcaggcctgggccctaagaaaggagcaggagggagatggccgggctaaatgggaaacagtgtctatgcctagatgagagagtggaaaaattggtttagaagtttgtacagaaagcaattgacaggagtcgacaaattaaagaccacaggccaaatctggcctgccacctatttttgtaaataaagccttatacacacacaca

SEQ ID NO: 24568 - DNA, 479 bp, Homo sapiens
atcttggtttcattctttgtttccttttcctaccaacaactaaatcagagagaacctgtcttttacagaggacaattcatcagtggttaaactgagagctcacgtcttctaaagggaagaaatttaaaaaggcagttgatacttggaggagcaaactgtcactctaaggaaatcataccacatgtctagctgtcctgatacagcttaaaaataaaagtggagatgacagatttggtgaataaagtccttgacagagaaaacacatagaaaagcataatttccgtttgagaaggagtttcgcttttatctcccaggctggagtgcaacgaacggcatgatctcggctcactgcaacctccgcctcctgggttcaagcaattctcctacctcagcctcctgagtagccgggactacaagccatgtgccattacagccggctaatttttttgtatttttagtagagatggggtttcatcatt

SEQ ID NO: 24569 - DNA, 1013 bp, Homo sapiens
gcaaccttgagcctcctttggtgaataagggtggtgcctgggaaagcatggagggatcaggctggtgatcagcaagcttgcacttcatttgcctaaggacatgcagttgcacttctttagagtcagcttttcacaaggttgggtgaaaattgttaggaggcagcacaaggggagcaaagatgttactaaccccagtcgccaaagcctgaggtatctggcctgtaaacataagcagtcttctctgcttcagagagcctggtgagaagggatgggaagctgggtttcagttaagctagagggaaagtgctggaagaggaggtacgtgaacaagtagcagataattgagcaagagttacagagaacacagtggaaggatttggaagaaaggggaagatttggaagaaaagaaagggatgcaccattgttacatcaaatagtgagatgagtgcggagcagtctggggatggggtcataatagatggtcctgggaggtttcaaatgccggtaaaaattgagataaggaaagatatgagacctgttgaacttagtttttatattccgttattaggcgagaactgggacctgaaggctttccacaatagcttggcaggggagagggttttggcagttaggcatgactgcttctgaaggttgtaggcactaaaatggtacaggtcatgccttgtttttgtttttctgttttgttttgctttgttttcccaatatagacatccagttgttgctgcaccagcttttgaaaatcctttctccgtgaaattgctttggcattttcatctaaaattagtgactatatcttatgagtctggctctggattgcctcttctgttcattgatctctttgtctggccttatgataatatactgtcttgagtattgcagagttatgttaaaatcagaaagtgtgagtcctccatctttgtgcttcaagattgttttggttattctaaaatagccacatatattttaaaatcaactaggcagtttctacgaaa

SEQ ID NO: 24570 - DNA, 425 bp, Homo sapiens
attgaatgaaatgggttttttactataaagatgtttttaccaagcaaactcttgccatttcttctacttaaagtttatagataatgaaggaaaagtattttctcccgtggttaaaattcttttacataaaacttaaaagcttttatcctgtttttaaatttaaatttaaatttcattttaaatgtaaatatcctcattttaaaaccaaaataatacatggaatgtaaactcaaaagatcattttggagaattttcatactgtaacttgagaaacttctttaaataaatgaatatttcttttttatttttagtagacttaacatttcactaaaagactggaggaaggaaaacagatttaaattaattttttagaatctttttgtaattgaagatcatgtgaatgaaaacaaagtagctgtgaacct

SEQ ID NO: 24571 - DNA, 2333 bp, Homo sapiens
  misc_feature (4)..(6): n is a, c, g, or t
  misc_feature (8)..(9): n is a, c, g, or t
  misc_feature (1794)..(1794): n is a, c, g, or t
cagnnngnnggcttttagccctgcggagggtggggctagagcaggcaggaagacgagctaggagcctattgctataatgtgggtgggaggtgagggtagcttggaatgagattgaaatagtggagatagtgaaaatagatttggggtacattttggaggcagagctggtagatactgatggattaaatatgaggggtgggaaggagtgaagagaacgtacacatgagggcttaagggtcttgctggagcagccggagtgggagatgctgtttgctgagctgctttgtgcgtctgtcagaaagcagcggctctctttcgggcctgctaagctggggatacatactaaacactgaagtggagctcatgagtggcacatggatgtttggatctggaccttgttcagttgaggggtcaaggatagatacatgaatttgagagcctccacttacagttggcatttgcagtcgtgggacagggtacacttgctgagggagagaatatggatagagaagagatttgaggacagagcccaggggtgtcccaacaaggtgagttctgggagagaagtcagctggggaattgcttcagtgtcctgaaggcagatcaatgagaaggagcagttctataaatagaaatccctgcagagatgttagaaaaccagcattacagcatgccaagagatagaatagtgattaataactgcttaaaagtgtatgttctgccactggaatgctaggaaagctacccaaaaaggctgttcctaattgaggaatatggttcttaaatgtttacattgccttatatttgtgatagggattattggctttgtgagcaaagctctttgacatttgtggatggagtgtactcattattgagaggaattttctgaaatgaatgtcagttccttttttcccctaagctttgctttgaattactatacagtttacttaagaaacctgtgatcagcgagaggaaagagaagtgatttctgaagcttctatggccacttcctgctgagtcttagcattctatcctgtcaagtatgctaatgggagaaggagcaacatctctggatacaaaggatcgccaggatgctgatgtgaatagtaggggtgagctagctctgtcctcatgcccagaccttgtcctgatctgtagcacacatttgagagacaggagctgtgttgattgcctattgctgctgtaacaaattattacacttagtggcttaaaagaacatgtttattttatggttctggaggtaagaaatctgaaacggctctgtagtaggctaacaccctccaggtgttaggctgtaactcctgaaacgtggatgtagccttatgtggaataagggtctttgcagatgtgattaagcaccttgagatagggcaattatcgtggattgtcaagatgggccctaaatgccacctcaaatgttctcctcacagagatgcagaggaggattactcagaagagaaggcagtgtgaccacagaagtagggaattaggcatgctgtggccacaagccaaaaaatacatgcagccaccagaagctggaagaggcaaggaaccgactgtccctagagcctctggagggagcacggccctgtcctgcctaccccttcgcttctacccagtgataccaatttcagacatctggagtctggaactgtgagagaagagttttctgttgttttaagccactaagtataggtaattattaatgacaatttgttatagcagcaatagggaaccaatacagagtctcactgggctaatccagtgtcagcnggactgtgttcctttcaggaggctcttagaatctgttttcttgactcttccagcttctagagtctgtccacattccttcactcatggcttcttatgtcttcaagccagtctttgacactttttagatagtgattcttctgcttccctcttccgcatttaaggacgctgtgattgcattagaccccaccttgataattatcttaaggtcagctgattagctaccttaactccatctgcatccttaattgccctttgcccatgtaaggtgtaacatactcagattctggggctatgacagagacatctttaggagctgttattttgccttaaaaaggaggcaattatttaagtatataaggtgaatagttaggtctttctctccaggaaacctaacttgtcattcagcggttaccatgcatgggtatcttcttccaattgcctgagccagccagactttcatgtttgagcattcagattgggctttatttctcaaggcatgtggcaaacctcacaatgacactgaaaggttaaaaaaaaaa

SEQ ID NO: 24572 - DNA, 877 bp, Homo sapiens
aggctgaggcaagaggttgcttgagcccaagagttggaggctgcagtgaaccatgatcatgccacctgcactccagcctgagcaacaagcaagaccctctccctaaaagaaataaataaattagaaatcaataataattaagatatctagaaaatgtcccaatatttggaaattaaagactacatttctaaataacctacacttcaaagaaaaaatcattaggtaaattagaaaatattttagtaaatgataaaaagcacaacataacaacgtttgtgagatgcaatgaaagacatattaggggaaaatttgcagttttaatgttagaaaaggataaaaatcagttatctaagcttctatcttaacaagctagcaaagaagggtaaatgaagcccaaagtaaacaaagaccaaatgatagtaacaataaaaatataaaccaatgaaaaagaaaaacaaaagagaaaagttaacaaaaattaacaaaatcaccatttgtgtaaaattattaataaatttaataactccctagcaagactggttacaaacaaaaaagagaaaatagaaattacaaacatcaggaatgaaaaataagacatcacactatagacattaaaaggataataaggggatattatgaacaatttcatgacaataaacctgacaaattacatatgatacttacagaaagatatagtgacaactacagaaagatttagaagagggaggctctaaagagctatatatccattgaataaatagagctcaatattttaaatcttcaggaatagatggtgaattctaccaaacatttaatgaaaacaataatcctaatcataatcataaactgatatggtttggctgtgtccccacccaaa

SEQ ID NO: 24573 - DNA, 931 bp, Homo sapiens
aggctgaggcaagaggttgcttgagcccaagagttggaggctgcagtgaaccatgatcatgccacctgcactccagcctgagcaacaagcaagaccctctccctaaaagaaataaataaattagaaatcaataataattaagatatctagaaaatgtcccaatatttggaaattaaagactacatttctaaataacctacacttcaaagaaaaaatcattaggtaaattagaaaatattttagtaaatgataaaaagcacaacataacaacgtttgtgagatgcaatgaaagacatattaggggaaaatttgcagttttaatgttagaaaaggataaaaatcagttatctaagcttctatcttaacaagctagcaaagaagggtaaatgaagcccaaagtaaacaaagaccaaatgatagtaacaataaaaatataaaccaatgaaaaagaaaaacaaaagagaaaagttaacaaaaattaacaaaatcaccatttgtgtaaaattattaataaatttaataactccctagcaagactggttacaaacaaaaaagagaaaatagaaattacaaacatcaggaatgaaaaataagacatcacactatagacattaaaaggataataaggggatattatgaacaatttcatgacaataaacctgacaaattacataaaataaactttgacaagacacagttccacttatagaaagtatatttcttctttatgatacttacagaaagatatagtgacaactacagaaagatttagaagagggaggctctaaagagctatatatccattgaataaatagagctcaatattttaaatcttcaggaatagatggtgaattctaccaaacatttaatgaaaacaataatcctaatcataatcataaactgatatggtttggctgtgtccccacccaaa

SEQ ID NO: 24574 - DNA, 421 bp, Homo sapiens
tttttgagacagggtcttctctgttgcccaggctggagtgcattggcatgatcacggctcactgcagcctagaactcctgggctcatgcgattctctcacctcagcctccccagtagctgagaccacagacacacactaccacacctggctaattgttttatttttttattttctgtaaagacagggtattcttatggtgcgcaggccggtctcaaactcctgggcgatcctccagcatcagcctcccaaagtgctgggattacaggtgtgagcaaccatgcctggcccaaaggaacacttatagctttaaggtaatttattagaatacaaaaagactgaaaataaataaattaagaaatcaactgaagaaggtaaatagcaatgtacattatagcaaggaatttacagttcctccatatc

SEQ ID NO: 24575 - DNA, 222 bp, Homo sapiens
gagacagagcctcattctattgcccaggctggagtgcagtggcacaattgtagctgccaccttgaactcctgggatcaagtgattctcccctcagcttcctgagtagctaagactacaggggcataccatcatgcccagctaattattaaattttgtgtgtgtgtgtgtgtgggtggggtgaaaccccataatgaattatgttccccaggctgttcttgaac

SEQ ID NO: 24576 - DNA, 460 bp, Homo sapiens
gaacaatatcttaaacacttaaatatgatttagggagccaggcatagtggtatgttcgtgtagtcccagctactgaggaggctgaggtgggaggatcccttgagcctaggagttcgaggcaagcctgggcaacatggcaagaactcatcttaaaataaccttaaaaaaaagtttggcctatagagttacctactcagttcactttaaagaaccagcatgttgagtcttatgttaaacacatcttataaaacagtgggcctattttgtatctagttgtcacattttacttaactttttttctctgtctcataaagacatgcttttattctatttatttctgtttattaagttttctcaacagtcattgaatgccagctatgggcactttattgcaaagggatgactaaagttgtggcaaaggtcaaagacaatttctttttcagttagtatcactagggct

SEQ ID NO: 24577 - DNA, 399 bp, Homo sapiens
acattagaatggacatttcaggtgaggccaggcctgtaaaagaggctaaccggacaggcatgttagagaggatgggattaatagggcttgcttggcaagaggagactgtatccactagggcacagtagtagcctaaagtaatgaaaatatagggatcgcctggtgcgatggctcatgcctttactcccagtactttgggaggctgagacaggcggatcacaagatcaggagttcaagaccagcctgaccaacatggtgaaaccccgtctctactaaaaatacaaaaattaggcgtggtggggcgcgtctgtaatcccggctactcaggaggctgaggcaggagaatcgcttgaacctgggaggcagaggtagcagtgagccaagatcacgccactgcac

SEQ ID NO: 24578 - DNA, 119 bp, Homo sapiens
tgaataaccttcctggtattacttgctagattttttgtttgggttgtatttattagggtatcctcatgtacgtacagtgcttttccccactcacgggtcagccaactctacagcaagtc

SEQ ID NO: 24579 - DNA, 544 bp, Homo sapiens
tcccaccagtgccagccgaagcccagtccttcaggacaccaaagtctggcccttcctctctggcgataccaggagctcaggatagagaagaggaaacaggaggaggaggccagaatggcacagaagtaggggaagatgggataggacaggctgggaacaggtaatcaggcccctcccagggcttctttcccctctggaagcgtccggcctccccatccacctctgcctaagtaaatctgctctcaacctatatatatacaaggtcattcattctagcattgtttgcaagagtgaaagagtggaaacacccgaagtgtccatcagtaagggacaggctagattgattacggatgtaattgctgtccatccatacagagcatactctacagtgtattctaaaataagactaaggaagctgtttatattctgatatgaaactaccatcaagatgtataaagtaaaaataactaaggagtggaacagtgtatatggcatattattatttgtcgaagtaaaattttcacgaagataaacatgactaaga

SEQ ID NO: 24580 - DNA, 373 bp, Homo sapiens
ttttcttgtttagagttccttatcgattctgaatattagtcgttttgtcagatgcataattgcaaattttttctcccacttcataggttgttaattctgattactatttcttttactgtgcggaagctttttagtttaattaggttccatttatttatttttgtttttgttccatttgtttttgtggtcttagtcataaattatttgcctaggccaacatccagaagtgcttttcctaggtttttctttctagaatttttatgttctagaagttttcaggtctttaagtctttcatccatcttgagttaactttttcaatacagtgagagacaaggatccagtttcattattcttcgtgtagctatccaattt

SEQ ID NO: 24581 - DNA, 1245 bp, Homo sapiens
aagaaaattatttatttgaccatagaatccttttccgaggctgtttattatcttacagagtatcttagggtaatttggaaccaaacctttttttttcttcttttttgtattgagacttttttgagttaggggactacttaccaactaacattagcagtttttgttgaggacaagtttcattaaggggaatatataggggaaagtttgctagtacaatggaatgtacacttggctttctatctgcaggtttcacatctgcagattgaactactgtggattgaaaatattcaggcagaaaaataaataacagtacaacaataaaaagtaatacgaaatttaaaaagacggtataactgaggtaggagttgggctaatccccagttttggggctcacttgtcctgtatcctaacaactatttacatagtatttacattatattagccattgtaagtaatctagagatgatttaaagtatatggaaggatgtgtgtaaattgtatgtgaatacaaacattttatataagggacttgagtatctgtggatcttgatggggtagggggtgtcctgaaaccaatcccccttggatactgagggatgactatacacttaagccaccagacatcttgcatatcatagacaattgtttggggtccatgagctttaattacaaaatgtaatgctgggagaacatagagaagagtgattttgttttttaaatgtagacttgattctgtagaaatatactacatttgataaatatactaagtatatagattatttcatccaatatattagtaatttagatagtggatagccactttcctatctttctcttatccatatgaatgtaatggatatgttgttacaacttatgattttctaaactagctgtgatttataatgacatcctgagaaaagtcagtgaaactcatttctaacgaataccagatttcttaaaatagtcaagtatttttcttttgtgtatgatgagatattaacttggtgttatttcatttttttttttaaggagtcattctaccctgttctatctttacttatgtgaaaatgtttaaactatgagtttttttcatgtgccttcttttggagtaatgtcaacttttaaatacacatgtttaaataacttagagtgtaataaattgtgtttaatatatactgtagataatgatggttaaatgctttgttaacacatgttcttttaaatacaagatactactttgtaaga

SEQ ID NO: 24582 - DNA, 103 bp, Homo sapiens
gtctgtgtcatcacacaccctccatacgttttgttaaagctggactgtgtcactcctttatgtgatctccctggctcttcaggcatttgggtttgtgctcttg

SEQ ID NO: 24583 - DNA, 482 bp, Homo sapiens
caaaaccaaaaacatgtaacaaaatatttatcaagaggaaaaaatggctttcagtgaaggaaaattagtttgtacgctgcttttaattttttaaaagactttaggacatcaattttctgtataaatatgttagtaaacttttttctgtatgcaaatatctatttttgtaatgtatctgttttactgaaagcaaatcgtattcactgcctttgttatgtttattcaaaaatataagataatattttaaattatccagctattttgaccagttgcttccttatccaaggtccatttctgtttctccctgcttataaggatcgtctgttacttcacctcatgaattatgtgttagcaggataatttaagtgaagggatcttgaggagccgcaacagacagtggaacatctgtcttcatacattttccatttagtgcctaaaaagggttgctgccctttccatttttctggagaccattgtgggga

SEQ ID NO: 24584 - DNA, 760 bp, Homo sapiens
gagggaaaggggaagtttgggaggaaggcttctgagaagactggtgggagagaaggagagcctgcagacagaggcctccagcttggtctgtctccccacctctaccagcatctgctgagctatgagccaaaccagggatttacagggaggaaaagctttcggactgctgaaggcccagcaggaagagaggctggatgagatcaacaagcaattcctagacgatcccaaatatagcagtgatgaggatctgccctccaaactggaaggcttcaaagagaaatacatggagtttgaccttaatggaaatggcgatattgatatcatgtccctgaaacgaatgctggagaaacttggagtccccaagactcacctagagctaaagaaattaattggagaggtgtccagtggctccggggagacgttcagctaccctgactttctcaggatgatgctgggcaagagatctgccatcctaaaaatgatcctgatgtatgaggaaaaagcgagagaaaaggaaaagccaacaggccccccagccaagaaagctatctctgagttgccctgatttgaagggaaaagggatgatgggattgaaggggcttctaatgacccagatatggaaacagaagacaaaattgtaagccagagtcaacaaattaaataaattaccccctcctccagaaaaaaaaaacaccttcctccacaaatgttatatagtcatttatttttaacaacaaataattgctcctggataaaataa

SEQ ID NO: 24585 - DNA, 734 bp, Homo sapiens
gagggaaaggggaagtttgggaggaaggcttctgagaagactggtgggagagaaggagagcctgcagacagaggcctccagcttggtctgtctccccacctctaccagcatctgctgagctatgagccaaaccagggatttacagggaggaaaagctttcggactgctgaaggcccagcaggaagagaggctggatgagatcaacaagcaattcctagacgatcccaaatatagcagtgatgaggatctgccctccaaactggaaggcttcaaagagaaatacatggagtttgaccttaatggaaatggcgatattgatatcatgtccctgaaacgaatgctggagaaacttggagtccccaagactcacctagagctaaagaaattaattggagaggtgtccagtggctccggggagacgttcagctaccctgactttctcaggatgatgctgggcaagagatctgccatcctaaaaatgatcctgatgtatgaggaaaaagcgagagaaaaggaaaagccaacaggccccccagccaagaaagctatctctgagttgccctgatttgaagggaaaagggatgatgggattgaaggggcttctaatgacccagatatggaaacagaagacaaaattgtaagccagagtcaacaaattaaataaattaccccctcctccagattcaaaaaaagacttttctgtattgttggtgctggtttgcttctttatatag

SEQ ID NO: 24586 - DNA, 628 bp, Homo sapiens
gagggaaaggggaagtttgggaggaaggcttctgagaagactggtgggagagaaggagagcctgcagacagaggcctccagcttggtctgtctccccacctctaccagcatctgctgagctatgagccaaaccagggatttacagggaggaaaagctttcggactgctgaaggcccagcaggaagagaggctggatgagatcaacaagcaattcctagacgatcccaaatatagcagtgatgaggatctgccctccaaactggaaggcttcaaagagaaatacatggagtttgaccttaatggaaatggcgatattgatatcatgtccctgaaacgaatgctggagaaacttggagtccccaagactcacctagagctaaagaaattaattggagaggtgtccagtggctccggggagacgttcagctaccctgactttctcaggatgatgctgggcaagagatctgccatcctaaaaatgatcctgatgtatgaggaaaaagcgagagaaaaggaaaagccaacaggccccccagccaagaaagctatctctgagttgccctgatttgaagggaacaaaattgtaagccagagtcaacaaattaaataaattaccccctcctccaga

SEQ ID NO: 24587 - DNA, 513 bp, Homo sapiens
gagggaaaggggaagtttgggaggaaggcttctgagaagactggtgggagagaaggagagcctgcagacagaggcctccagcttggtctgtctccccacctctaccagcatctgctgagctatgagccaaaccagggatttacagggaggaaaagctttcggactgctgaaggcccagcaggaagagaggctggatgagatcaacaagcaattcctagacgatcccaaatatagcagtgatgaggatctgccctccaaactggaaggcttcaaagagaaatacatggagtttgaccttaatggaaatggcgatattgatatcatgtccctgaaacgaatgctggagaaacttggagtccccaagactcacctagagctaaagaaattaattggagaggtgtccagtggctccggggagacgttcagctaccctgactttctcaggatgatgctgggcaagagatctgccatcctaaaaataacctctatttatgagaaaaaccagaaggaaat

SEQ ID NO: 24588 - DNA, 732 bp, Homo sapiens
  misc_feature (624)..(625): n is a, c, g, or t
  misc_feature (628)..(628): n is a, c, g, or t
  misc_feature (633)..(633): n is a, c, g, or t
gagggaaaggggaagtttgggaggaaggcttctgagaagactggtgggagagaaggagagcctgcagacagaggcctccagcttggaggaaaagctttcggactgctgaaggcccagcaggaagagaggctggatgagatcaacaagcaattcctagacgatcccaaatatagcagtgatgaggatctgccctccaaactggaaggcttcaaagagaaatacatggagtttgaccttaatggaaatggcgatattgatatcatgtccctgaaacgaatgctggagaaacttggagtccccaagactcacctagagctaaagaaattaattggagaggtgtccagtggctccggggagacgttcagctaccctgactttctcaggatgatgctgggcaagagatctgccatcctaaaaatgatcctgatgtatgaggaaaaagcgagagaaaaggaaaagccaacaggccccccagccaagaaagctatctctgagttgccctgatttgaagggaaaagggatgatgggattgaaggggcttctaatgacccagatatggaaacagaagacaaaattgtaagccagagtcaacaaattaaataaattaccccctcctccagaaannaanaaaanaaagcttgcgcgcccgatttagagctcacttggccaaattggattaaggagagtatacttggggccccctgcgcgccaaattactattaaatatagaag

SEQ ID NO: 24589 - DNA, 1511 bp, Homo sapiens
gagggaaaggggaagtttgggaggaaggcttctgagaagactggtgggagagaaggagagcctgcagacagaggcctccagcttggaggaaaagctttcggactgctgaaggcccagcaggaagagaggctggatgagatcaacaagcaattcctagacgatcccaaatatagcagtgatgaggatctgccctccaaactggaaggcttcaaaggtgagggggaaactgtaggcggtggagacagggctgggggtaggagggttaggatttccacaagaacaaggcaggaacagcagagataaaaagtttacttttgtggtagcaaaaggggaacctgcctttattgccctcctgccacactgcggtccctttcccgggcctgcctctctcagcatcccctctagctccttacaacctagcggggccctcaactcccaaccccacttcctctgcctgcccctcctcctccttccacgttgtctcctccacctagcagttggttggcaaccccttcctcaagaaatacatggagtttgaccttaatggaaatggcgatattggtgagaaacgggtgatttgcgggggcagggtggtgtgcaggcctaagaagacagaggtctctcctacatgctccattcctcatgatttgggagggggcccacctaccacagtgggaggaaggagaatggggatgcggaagtgggagaggagagagagggtctccccaccttctccccatccccatcctctgcccccagatatcatgtccctgaaacgaatgctggagaaacttggagtccccaagactcacctagagctaaagaaattaattggagaggtgtccagtggctccggggagacgttcagctaccctgactttctcaggatgatgctgggcaagagatctgccatcctaaaaatgtgagtgtcaatttccaacctcccctgtacttacctgttttctcctcccccatccctacccttgtccacaggctcaacatttctacacgttgcccatcatcccttcttccatccttagagggacccttccaaggtcccgaccccatccctatccatagtcctggtccccagaaactccaacccctgcccttcctcttcccccttccaccctcacatccccatccccttctagcctttcctagcaccctatgatttattcccttgagaggagtgttccctgatccctgtgcctcttcccatctcaaccaggatcctgatgtatgaggaaaaagcgagagaaaaggaaaagccaacaggccccccagccaagaaagctatctctgagttgccctgatttgaagggaaaagggatgatgggattgaaggggcttctaatgacccagatatggaaacagaagacaaaattgtaagccagagtcaacaaattaaataaattaccccctcctccagaaaaaaaaaacaccttcctccacaaatgttatatagtcatttatttttaacaacaaataattgctcctggataaaataa

SEQ ID NO: 24590 - DNA, 682 bp, Homo sapiens
gagggaaaggggaagtttgggaggaaggcttctgagaagactggtgggagagaaggagagcctgcagacagaggcctccagcttggtctgtctccccacctctaccagcatctgctgagctatgagccaaaccagggatttacagggaggaaaagctttcggactgctgaaggcccagcaggaagagaggctggatgagatcaacaagcaattcctagacgatcccaaatatagcagtgatgaggatctgccctccaaactggaaggcttcaaagagaaatacatggagtttgaccttaatggaaatggcgatattgatatcatgtccctgaaacgaatgctggagaaacttggagtccccaagactcacctagagctaaagaaattaattggagaggtgtccagtggctccggggagacgttcagctaccctgactttctcaggatgatgctgggcaagagatctgccatcctaaaaatgatcctgatgtatgaggaaaaagcgagagaaaaggaaaagccaacaggccccccagccaagaaagctatctctgagttgccctgatttgaagggaaaagggatgatgggattgaaggggcttctaatgacccagatatggaaacagaagacaaaattgtaagccagagtcaacaaattaaataaattaccccctcctccaga

SEQ ID NO: 24591 - DNA, 751 bp, Homo sapiens
gagggaaaggggaagtttgggaggaaggcttctgagaagactggtgggagagaaggagagcctgcagacagaggcctccagcttggtctgtctccccacctctaccagcatctgctgagctatgagccaaaccagggatttacagggaggaaaagctttcggactgctgaaggcccagcaggaagagaggctggatgagatcaacaagcaattcctagacgatcccaaatatagcagtgatgaggatctgccctccaaactggaaggcttcaaagagaaatacatggagtttgaccttaatggaaatggcgatattgatatcatgtccctgaaacgaatgctggagaaacttggagtccccaagactcacctagagctaaagaaattaattggagaggtgtccagtggctccggggagacgttcagctaccctgactttctcaggatgatgctgggcaagagatctgccatcctaaaaatgatcctgatgtatgaggaaaaagcgagagaaaaggaaaagccaacaggccccccagccaagaaagctatctctgagttgccctgatttgaagggaaaagggatgatgggattgaaggggcttctaatgacccagatatggaaacagaagacaaaattgtaagccagagtcaacaaattaaataaattaccccctcctccagaaaaataaaagaactcacaaacaatgcggcccgtattttgagcttactttgccaattcgccttatgtgag

SEQ ID NO: 24592 - DNA, 760 bp, Homo sapiens
  misc_feature (698)..(699): n is a, c, g, or t
gagggaaaggggaagtttgggaggaaggcttctgagaagactggtgggagagaaggagagcctgcagacagaggcctccagcttggtctgtctccccacctctaccagcatctgctgagctatgagccaaaccagggatttacagggaggaaaagctttcggactgctgaaggcccagcaggaagagaggctggatgagatcaacaagcaattcctagacgatcccaaatatagcagtgatgaggatctgccctccaaactggaaggcttcaaagagaaatacatggagtttgaccttaatggaaatggcgatattgatatcatgtccctgaaacgaatgctggagaaacttggagtccccaagactcacctagagctaaagaaattaattggagaggtgtccagtggctccggggagacgttcagctaccctgactttctcaggatgatgctgggcaagagatctgccatcctaaaaatgatcctgatgtatgaggaaaaagcgagagaaaaggaaaagccaacaggccccccagccaagaaagctatctctgagttgccctgatttgaagggaaaagggatgatgggattgaaggggcttctaatgacccagatatggaaacagaagacaaaattgtaagccagagtcaacaaattaaataaattaccccctcctccagacagaaaaaaaaaaaannctttttcacacccgctcataataaattctcctttcattttaaccaaaaaataatcttaggg

SEQ ID NO: 24593 - DNA, 621 bp, Homo sapiens
gagggaaaggggaagtttgggaggaaggcttctgagaagactggtgggagagaaggagagcctgcagacagaggcctccagcttggaggaaaagctttcggactgctgaaggcccagcaggaagagaggctggatgagatcaacaagcaattcctagacgatcccaaatatagcagtgatgaggatctgccctccaaactggaaggcttcaaagagaaatacatggagtttgaccttaatggaaatggcgatattgatatcatgtccctgaaacgaatgctggagaaacttggagtccccaagactcacctagagctaaagaaattaattggagaggtgtccagtggctccggggagacgttcagctaccctgactttctcaggatgatgctgggcaagagatctgccatcctaaaaatgatcctgatgtatgaggaaaaagcgagagaaaaggaaaagccaacaggccccccagccaagaaagctatctctgagttgccctgatttgaagggaaaagggatgatgggattgaaggggcttctaatgacccagatatggaaacagaagacaaaattgtaagccagagtcaacaaattaaataaattaccccctcctccaga

SEQ ID NO: 24594 - DNA, 514 bp, Homo sapiens
  misc_feature (16)..(16): n is a, c, g, or t
  misc_feature (43)..(43): n is a, c, g, or t
aattcgcggccgcgtncgacacggctgcgagaagacgacacanggggaggtccccggctgaaaaccctccagtcagcgcttatcccttctgctctctcccctcacccagaaatacatggagtttgaccttaatggaaatggcgatattgatatcatgtccctgaaacgaatgctggagaaacttggagtccccaagactcacctagagctaaagaaattaattggagaggtgtccagtggctccggggagacgttcagctaccctgactttctcaggatgatgctgggcaagagatctgccatcctaaaaatgatcctgatgtatgaggaaaaagcgagagaaaaggaaaagccaacaggccccccagccaagaaagctatctctgagttgccctgatttgaagggaaaagggatgatgggattgaaggggcttctaatgacccagatatggaaacagaagacaaaattgtaagccagagtcaacaaattaaataaattaccccctcctccaga

SEQ ID NO: 24595 - DNA, 984 bp, Homo sapiens
gagggaaaggggaagtttgggaggaaggcttctgagaagactggtgggagagaaggagagcctgcagacagaggcctccagcttggaggaaaagctttcggactgctgaaggcccagcaggaagagaggctggatgagatcaacaagcaattcctagacgatcccaaatatagcagtgatgaggatctgccctccaaactggaaggcttcaaaggtgagggggaaactgtaggcggtggagacagggctgggggtaggagggttaggatttccacaagaacaaggcaggaacagcagagataaaaagtttacttttgtggtagcaaaaggggaacctgcctttattgccctcctgccacactgcggtccctttcccgggcctgcctctctcagcatcccctctagctccttacaacctagcggggccctcaactcccaaccccacttcctctgcctgcccctcctcctccttccacgttgtctcctccacctagcagttggttggcaaccccttcctcagtccccggctgaaaaccctccagtcagcgcttatcccttctgctctctcccctcacccagaaatacatggagtttgaccttaatggaaatggcgatattgatatcatgtccctgaaacgaatgctggagaaacttggagtccccaagactcacctagagctaaagaaattaattggagaggtgtccagtggctccggggagacgttcagctaccctgactttctcaggatgatgctgggcaagagatctgccatcctaaaaatgatcctgatgtatgaggaaaaagcgagagaaaaggaaaagccaacaggccccccagccaagaaagctatctctgagttgccctgatttgaagggaaaagggatgatgggattgaaggggcttctaatgacccagatatggaaacagaagacaaaattgtaagccagagtcaacaaattaaataaattaccccctcctccaga

SEQ ID NO: 24596 - DNA, 891 bp, Homo sapiens
gatatatgtgtgaaggatcaatgaaatcaatgaatgatagcatctaaacatacttcctcctgggttatcttaacaggtatatgggaaaccaggtggagatagggggaagaaaaacaatcaaagaacctcagatagcttcaaacatttctatgtaatgtaggcccaaccaataatacacattaatatacaattaatgtgcatcccagtcacctataggaaaacttgttaaaatgcagattctgactccgtagttctgatggggggcacctaagattccccatttctaacaagctcccaagaagaggctttacagtccaacagagcaggatttgcacctgattcaataataattatgtgacaagttatctttgaaactgtttccatatgagtaaaatggtgataataatacatgtgttacataatcagtatgataattatataatacagcatatgtaaagcaattagcatattgtaggcactcagtataagttctgctttcccacccagaagaaaactactagagttttaaaaaagatttatcaaaataacaaaattccatttcatgttgggtggaaaagttactcatgagattggaaaaatgcctacttttgcctaacatttttattatcattaccttactctttgaattaataatggtcagatgcacttttgaaaagcaacaatattgagggacagaatatattttaaaaagaaaaatgatcacttttaatttggtctaaaatagttacctcaaaatgaaataggtaaagaatgactgattattaaattgtcaatttttttaaaaaaagcagcccttcatttgatatgttaatatatagtgttatcggctcacgacaataaatttacttggccaaatggttttcatttgag

SEQ ID NO: 24597 - DNA, 307 bp, Homo sapiens
gttgagagtatacaccttgtgaggtctgtcagggcaagatgtcagcaggtggaggggctgtgaatgcctttgtgttaaggtttgagcactgtgcaggtggaactgtgagggcgtggagatgagtgtgagtgtgcagatatgtcaatgtctataaggctggtctgtatattcactcactcaccaatgcaacaaacatctatggaacagaatttaccagacacacagtccctgccctcctgggctcacattcacaggtgacaacaagcaaacaggaggatccagaattctcgagtagtagtagtagccc

SEQ ID NO: 24598 - DNA, 472 bp, Homo sapiens
tatactaggtaaaatatcattttacaccttactagcatattgatgattgataatgcagcttatactgctcagaacaaaattaccctttcccccctctcctaccctaactcaagttcatgtcatattgatctttatgttggaatcacatcacatgacattatgtacattttatgtcttcatggaattagggagaaaaggctttgggaccatgaggaaactcagtgaatttgaaatatactgataggctcactctcataaaccacatattgatgccacatatggatatattgtcactcaggtcagtgtgagaatatgatcctttcagtgatgttatagctcacaatcctttttaaaggactataccaaaacattaacagctgtcactactagtattgtacagtttcctacaggatcctgaaatccatcttcagtatttttatcagcttcacacacagcatatatgtataaatgt

SEQ ID NO: 24599 - DNA, 418 bp, Homo sapiens
ctttcttaaagagataaaggtatggaacaagaatcacagatgggctatgaacctcctgaaattgtagttcgaattatgtgtttgtgtgaatgatgcttactgtttctgattttatttgattgttgtataatgaaaatgatgttggctaatgatatagaaattaggagaagaaatattgaaaacacacacacagtattttattcatttgtccagaggacatgaaaatttaaaatggatgcatgaaagatattgattatttaattatatgttgtgtcacattatatgattgttaaaggcaatctaataaaaaaggtagagagggttaaatattaatttaaaaggctgtcacattttgaattatcttaatagaaaggtcttttgtgcaaaatgagaggcagacattattgcagaaaatgcc

SEQ ID NO: 24600 - DNA, 1311 bp, Homo sapiens
  misc_feature (700)..(700): n is a, c, g, or t
cctggctcctcccaggtcaagctgggaacacgaaagaaggaagccagcagagggcaagtacagacaggttcattgcagagcgtagccttggggttcagcccctcaacctgaggctgaggatctcttggagcttggggagcgtccttggggaccacattcagtagatggaaccacagggccgtaagggtgcgtccatgtgcattgcctggaaggtgaagcttgtagaaagcaaaggtttgtagaaggcgaaggtttgtagaaggcgaaggtttatagaaggtgaaggtttatagtagcctacagcgacttcatttccactctctctcttctagccatgtgttgaaatcagttattcgttgggaatgactaggctgtggatggctttcagtgtgcatatctggactccctctccctgagttccaaacctggctctgctcctttggagcttctgctatgtggcagatcgcctccctgtgcctcagtttccccatgtgtcaaacggggatgacggggtttcaagaatcagagtccacatcagatgcttgcctggcacacgggaatgtgtgagctgggcctgccctggcagcgacagagagctggtgaccaccagaaaccctggccctgggacggcttttgtctcttttttgttgggcaaatgggctcccagccgggcttgggcctccaccgccgggaaggcggnactgcgctcgggtactgggctccggcctcccgaagtccttggtaagccttgcctgtagcggctccgctgccgagtgctttgacaccaggcgctcccagagctctgcccccactgccaagcggcagctgctccggagggcacggggggctggatttggctgtggcttctccagctctgcacaagagccccccttccctggccctgctgcagcatgactgcctcctggctcgtgtcacccactctgtctctgtctctcttcatacgtttccagctgagctgggatccatagtctgtttccctctccacgaccaatctatttatcttctctggaacttcttgtaatgccgggagtgcagagcttacaagttggggcaggaagctttagaagcccaggcagccctgagaggctctttccttgtaagtgggtctctccccaggagcctcttggaatatttagcagggacttttacccatgctgggtctagagaccctcccgcccctctgtttcctgccctcctacttagactgggatctggtttccctcagctggttcccttgctagcgtgtgactctgtgtgtctgtctgtgactggtttagatttgtatgaaat

SEQ ID NO: 24601 - DNA, 775 bp, Homo sapiens
gtaactccggaaggtacatatttaagattcatgagggtctttcacagtactttttttctccatctgagaacttgtctgctttcgttttgaaaaacttttaatacagccagccccctatattcatgggttccacttctatacatccaatcaaccacagattgaaaatgttctggggaaagaaattccatcaagttccaaaacttgagtttgccaggtgccaagtacttcgttgaatccacaggaatgaagtgatgtgtattagatattataagtaatctagagatgatttaaagcatattggaaaatgtgcataggttatatgcaaatactacaccattttatgttaagagacttgggcatccccaggttttgttatctgatggaggtcctggaaccagtcccccacagataccgagggactactgtaatataagaggccacttagttctttttctgagtttcacttccttggtggtactgcatgtgattttctttaaaaagcaccctagacacttccttttctgttctgcctcttctgctttttgatttttctgctaatgaacttagtattaccctgaggtctttctccaacattctgacatacatatttaaactctagtacttatttttatttcttgtaggctcatttccttcatctgcaaaatgattaagttaaactagcaagtctgcaaaattcttttcagttcctagatcctatccaaaaggtttagctgttagcctgggcaacagagcgagactctgtcaaaaaaaaaaa

SEQ ID NO: 24602 - DNA, 382 bp, Homo sapiens
aagtagatgggccagcaagggtggagtgaactggtaccagttactggggcccagtgtactggattgagggatggccagtgagttgtgttcatatatgtaccagtccaatgccaatgtaaagaatttctgccattctaccattgcagagtgggcctgaaaaatgttttcagcaatgttcaaatttcttcccactacctgcaaacatgaatttggggatttcagctaacttcttactacctgtagcatatgggatttggagtagggtataattaaaattgatgggtaactctaatctccttttagccttattagccatataaaccctctgacagctacttaaacaaagaaactaggagtcttcttatctctctcttttcttctt

SEQ ID NO: 24603 - DNA, 478 bp, Homo sapiens
ctgtttttttatggtgtctcaacaccccatgcacttgccacctacttgagaaaactactagaccttaaaagtgagagttttaaacaaatgaatgtttgttttgttttacatttaccgtgggaaattttaaatatatacagaaatagagtatcatagcaagcctgcattcatctgtcacccagctccaaaaattataaactcatagctaatcttgtttcacttttactcccacttctttccctccccactccactggatcattttgaagcaaattccaaatgtcacgtcgtttcattagcttctatttctaaataaggtgtctcttaaacataaccagaatacccccttttgaaaaggaaggctgggtgaggtgactcattcctctaatcccagcactttaggaagccaaggcaggatgatcgcttgaggccaggagttcaaggccagactgagcagcatagtgagatccagtcttaaa

SEQ ID NO: 24604 - DNA, 601 bp, Homo sapiens
cccctctctggacctaagtgtcttaatctctcttaaacaggaggttgcaacactggcctccctgattccaccttcaacaggatgggactctatggcttcgaatgtaacccacatcagtcttgctcctaaagaatctgcccttccacaaatcaccaacccctatcccgccccatgtcaccccctgtgctccttcccaggtgctgacctgacagcagtggaccctgttcggggcaagacggccctggaatgggcagtgctgaccgacagcttcgacaccgtgtggaggattcggcagctgctgaggcggccccaagtggagcagcttagccagcactacaagcccgagtggccggccttgtccgggctcgtggcccaggcccaggcccaggcccaggttgccccttcactcctagaacggctgcaggctaccttgagcctcccctttgccccgtctcctcaggaggggggtgttctggaccaccttgtgactgccacaaccagcctggccagtcccttcgtcaccactgcctgccacactctgtgccctgaccatccaccttcgctgggcacccgaagcaagtccgtgccagagctgttaggt

SEQ ID NO: 24605 - DNA, 385 bp, Homo sapiens
ttttttttggttttgtttttttaagttcgcggctgggaagaggtgggagggaagtgctgaggcatggggaatagaataagggcagatgacagaaagatagaagcacaggaagtgtttggaaggaaaaacaagaaaggctgctgacgaaaaatactccagaaaaaaaaaacgaaaaaggtgatctttgccaagaaaaatgtgctaatcttatgcagctgaaagatagttaaagaaacattgtaagatttctgtcttcaactccttaattcttaatcctgaagcattcccaaaggaataaggagtattccatgacctatagctataagcaccacttctcataattgtgaacctctgttatgggcaaaaataaaatgccaggatagca

SEQ ID NO: 24606 - DNA, 353 bp, Homo sapiens
ttctacataaacacatatacatttttttacttggagactgtcacggtataaagaacactttttactaaaagtcacgaggccagagattcagccctagttttgctactaaatatctgactgttggcaagtggcttatgaaagtggaactattaatggggtgattgagcaaggaaagttttcaggtccctttcagctctgattttttctgtcttagtcaaagagttttagggttttatggcaatagatagagattttctacaaaatggcttcagtggtgaattgtagcaaacatttaaagaactaataccagtccttctcaaacttttccaaaaaaactgaagagaagtgagcac

SEQ ID NO: 24607 - DNA, 390 bp, Homo sapiens
ctttgtcgtgtgagccttgctctcctggggaggctcaggctgacggctgatgtgggcattgccgaaggtaacctgtggcccagtgtatatggccgggtctcctcaagctgcattcattcaagtaggacccagggtgcatgcccatctccagcccagggcagctcccctgtaagctgggtgagctactgaagccaaggcgggaggcagctgacaacacccacagcccatgcggaggtggtggaaaggctggactcagcagcaacaccaaatcctggaccaggcagaaaccacccaagactgaggggctcgtgccagagcggtggccacaggtaagaacccgggcccaggctgtgtggcaggaatcctccatgtcccagggcttagcatagc

SEQ ID NO: 24608 - DNA, 392 bp, Homo sapiens
aaccctatcagttgtagatgtctgatggaaatacaaaataagatattcagttctaacagtagcttaatctaataatttcatctttcatgatcattcacccatgatgcacaagccaaaacctaggaaacattactaattcttttccctttcatcatggacatctaattcagtaaaaagtcctatttgttttaacatgaaattatatcccaattcccaccattaaatagcgtgtgaatttcaaccatcctcatccaagcctcatcctctctcatttgaactaatgaccagatgatgaaacttaaaaacttaagtcagccaggcatggtggctcatgcctgtaatcttggcagtacaagaggtcaaggcaggaggatcccttaaagccttaaagc

SEQ ID NO: 24609 - DNA, 209 bp, Homo sapiens
ggcagccagagccaagggccctaagccggagaaggagaaaccagtactggacaatagcaggtgacagcagaggagaaaaagggggtagggaggggacaaggaaagacctgagggggtggcagtggacaaagagattgagcaaccacaggacaaggtaaccagaggaaacagagacaaggaaaaaagatgcaggaaatgaggaggcccca

SEQ ID NO: 24610 - DNA, 687 bp, Homo sapiens
gaccctcaatctagaacataagctcctctctcggtgtccacctgtagtgacctcaaattagaacgtcagctcctcccagagtcttcagctgcatgaccctcaatctttaacatcagctcctctccgggtctgcagctgcatgaccctaaaaatacacgaacagctcctccctgaatcttcagctgtacgaccctcaaactacaacatcagctcctgtctgcatctctagctgcagggccctcaaactagaatatcagctcctccccgagtcttcacctgcatgaccctcaaactagaacatcagctcctgtacagatttccaactgtagggccctcaaactagaacatcagctcctccccaagtcagcagctgcaagaccctcaaattagcaactcagctcctcccggagtcttcagctgcatgaccctcaatctcgaagatcagatactctccgggtcttcagctgtagggccctcaaactataacatcagctcctctccaagtattcagctgcacgaccctcaatctcgaacatcagctcctcttcaggtctgcagctgtagggccctcaatctagaacatcagctcctccctgagtcttctgctgcacgaccctcaaactagaatctcagctcctcccgagtcttcagctgcacgaccctcaaactagaacctcagctcctccc

SEQ ID NO: 24611 - DNA, 784 bp, Homo sapiens
gcaggaccagctgggacaggtccttctgtgacacctgctgcatcaccaggctgggtgaacggacacaattgccagaactcacagaatagaagtatcagcaccgaaacctcacaggaaaaatgctcctctccaggtttgcagctgcaagaccatcaaactacaacatcagctcctctccagagtctgcagctgcaagaccctcaaactagaacatcagttcctccccgagtcttcatctgcatgaccctcaaactagaacatcagctcctctccgagtcttcagctgcacgaccctcaaactagaacatcagctcctctccaggtctgcagctgcaagaccctcaaactagaacatcagctcctctccaggtctgcagctgcaagaccctcaatctagaacatcagctcctctccaagtctgcagctgcacgaccctcaatctagaacatcagctcctctccaggtctgcagctgcaagaacctcaaactagaacattagctcctctccaggtctccagctgcacgaccctcaaactagaacatcagctcctctccaggtctgcagctccacgaccctcaatctagaacatcagctcctccccgggtcttcagctgcatgaccctcaatctagaacatcagctcctctcctgactctgcagctggaagatccactaactagaacatcagctcctgtctgggtctccagctccatgacccttaatcaagattatcagctcctccctgagtccccagctgaggaccatcgttggggatcctctaagt

SEQ ID NO: 24612 - DNA, 1459 bp, Homo sapiens
gcaggaccagctgggacaggtccttctgtgacacctgctgcatcaccaggctgggtgaacggacacaattgccagaactcacagaatagaagtatcagcaccgaaacctcacaggaaaaatgctcctctccaggtttgcagctgcaagaccatcaaactacaacatcagctcctctccagagtctgcagctgcaagaccctcaaactagaacatcagttcctccccgagtcttcatctgcatgaccctcaaactagaacatcagctcctctccgagtcttcagctgcacgaccctcaaactagaacatcagctcctctccaggtctgcagctgcaagaccctcaaactagaacatcagctcctctccaggtctgcagctgcaagaccctcaatctagaacatcagctcctctccaagtctgcagctgcacgaccctcaatctagaacatcagctcctctccaggtctgcagctgcaagaacctcaaactagaacattagctcctctccaggtctccagctgcacgaccctcaaactagaacatcagctcctctccaggtctgcagctccacgaccctcaatctagaacatcagctcctccccgggtcttcagctgcatgaccctcaatctagaacatcagctcctctcctgactctgcagctggaagatccactaactagaacatcagctcctgtctgggtctccagctccatgacccttaatcaagattatcagctcctccctgagtccccagctgaaagaccctcaacagcgaacaacatcagctcctcccaaagtcctcaactgcatgaccctcgaactacaacatcagctcctccccgagtcttcagctgcatgaccctctatctagaacatcagctcctctccaggtctgcagctgcacgaacctaaaattagaacatcagctcctctcttggtctgcagctggtaagatccactagctcgaacatcatctcctgcctgagtctccagctccatgaacctcagtcaagattgtcagctcctccctgagtctccagctgaaagaccctcaacacgaacaacatcagctcctcccgaagtcctcaactgcatgaccctcaaactacaacatcagctccaccccgagtcttcagctgcaggactctcaatctagaacatcagctcctctccaggtctgcagctgcacgaccctcagtctagaacatcagctcctccccaggtctgcagctgcacgaccctcaatctagaacatcagctcctctacaggtctgcagttgcaagaccctcaaactagaacatcagctcctctccggatctgcagctgctagacactcaaactagaacatcaacttctgtccaggtctccagttccgtgaccctaaatctagaacatcagctcctccgagtctccaactgaaagaccctcaacgcgaacaactaaagctcctccccaagt

SEQ ID NO: 24613 - DNA, 256 bp, Homo sapiens
ccccaaagttgggtgcatctacatttaggatagttaagtcttcttgttgaattgaaccctctatcgttatgcaatgcctttctttgttttattttactattaatgatttaaagtccttttttcttaaaagagaaacaattccaggtatggtggctcatgccagcactttcagactgaggcagtaggattgcctgagaccaggagtttgagaccagctgaggcaacataacaacactctgtttgtacagattctttt

SEQ ID NO: 24614 - DNA, 440 bp, Homo sapiens
ttttttttgggggtagcagcagtaacagtggtggccagaaaagcacctaaaactctgacaaagcggaatcctttcatctgtccaaagcatctgcaatctgaaaagtagaagaggggaatctccgttgccttttttctctcttcatcctgtcacctggcccaagagtacacccgccatggagggtgcgtaacaagcagggagactaaaggacccaatttctagctaaagggtcaggaaaatgaggggtcttgaaagctggagaatgtggacaggagagagcttgtgaaatagatcccataaagttgcacatgaatttgtaggttcacatgcatggacctgaccctaagcagtattccagtgaatgagaactgaactattaggcagaacacccaggtttcagactgctcactggggggcataagcttaggactgttctgatt

SEQ ID NO: 24615 - DNA, 559 bp, Homo sapiens
ctcctgagctcaaacagtctgcccaccttgaactctcaaagatgctgggattacaggtgtgagccatcacagctagctgccacttatccactttagctaggtctcagtatctctgagcctcaggttacctggacttagaatgaaggccttcctcagccacagaagtacatggacctggcccatgattgtcctttagaaactgagcagagtactgcatcaacgttaggagtaaaggcactgaaccagattgctggtgtaggcatcccagttaggtcaccagctcactacatggccttgagcaattcacaaatcatctgtgggccacatatccatcagctatatgggttaatggtagtacccactgacagagtgtagagacaactaatgaactaatctacaaaaaaaccaagaagagtaccttacagagtatgtgctcaggaagtgtgcgctgttgctgaagtcactaaggaagtcaggttttctgtgggtagagatagcagggtctaagatggcaagattggacatcagaatgagtgtgaatgaagtactatcttggata

SEQ ID NO: 24616 - DNA, 989 bp, Homo sapiens
ctaatattctatttttaaatatgggcattaatttcatttcagttcgttcactcattccattcatttatcatttcacaaacatttgaaatcctaatataagcaaggtgctctgtttaaggcagaaatttgaaaatgtacaagatatatggtcttgtctttaaggagctgttcatctagaatggaggaatttacactgataattattcctacacttgaaacaaagaaattaactctcaaattgcgtggcaagcatatatagactttgctataaatatttatgaaatgagttactgttttccttaaaaaagctaagactaagggctggcaatcaaataagagcaaatttagtggtgaacgtagaactgcccactaccagctagagtctccaacctaaaagtcccatgttgctagtgatccccaggggttttatagaaggaatccctgcattggcagtaattttggattagatgatccctaagagcaccatcaagtcttaggattctatgaattaggaaataaaccaaattatatattttctaatactgatcagctcatattttatcatcatgtcatgtctggctttcatacttagtcataatttactttctgggtcatttagaggctagcgttctctaaggtcacttctgcttgcacattgtaggatattatttagtatggctttaagaattcaatctttccccctctcctttatggaatgtgtgtttcctctatttgtacacttaaccttttgtcctaagtttttatttttatggatactaatgagtaactttgaggttgacactagacccaaacagatgcaaacagccactttctgtcctcttgtgacacagttgaaacactttatctcttgtctgctgtttggagtgtcctgaaagaaacactgaagtggcagtcaacagagcaagggtaacaggatctttaaataatttaaagttgtctgatcttgacataaaagtgaaccctttctt

SEQ ID NO: 24617 - DNA, 363 bp, Homo sapiens
cttggaaacataacagaaaatggggatataacctatatctctatcaataggtgaacacaattaatcaaagtgatcagccttagccaggtgcggtggctgaagcctgtaatcccagcactttgggaggctgaagcaggtggatcatttgaggtcaggagttcaagaccagcctggccaacatggtgaaaccctgtctctactaaaaatacaaaaattagccgggcgtggtggcgcacacttgtaatcccagctactggggaggctgaggcaggagaattgcttgagcctgggaggcagaggttgcggtcagccgagatcacgccactgcactccagtctgggtgacagagtgagaccctgtctc

SEQ ID NO: 24618 - DNA, 427 bp, Homo sapiens
tatttatcttgatctttacctgaatgagagacaggggtgaagaaatatggtggaaggatacagggtaagacagaactactggtagggcccataacccatctgtatctatgtttgagttatactaaaggaatgaagatgccatagttatttatgagatatttctaaatgcaatggtgacatactacatgatgtctagagcatgaggattcattctctgtctccctgagtgggtctaaccttcatggctgagatcatcttagtcagcctgcctgttttgcacacatgctcctctgtgctgtgtcgggcatttcctccttagtgtgaaggtgcctccctgggcaatgtgccagggacacagtaatgttggttgtttgagttagcacaaactgtttgtgcttgtgtttgacaaacacacagaagataagag

SEQ ID NO: 24619 - DNA, 245 bp, Homo sapiens
ccacccatccatctattcatctaccacctgcctacctatccatccatctacccactcactcatccatctatccatccattacccacccatccttccacccacctattcacccatctacccattcacccatccacccatctatccacccgcccattcattcacccatccactcatccagacatccatctgtccacccattcatccatccatccattcatccatccactcacctacccatccactca

SEQ ID NO: 24620 - DNA, 908 bp, Homo sapiens
tgctggcctctcctgttctctgtctcctcacttccctctgtggctctgctcagaactggcggtttttcccagctccttgcccagaccaatacttccatgctgtcttcaagccctgcttcctgcacatctcccagcccagatggggagaacccatgtaagaaggtccactgggcttctgggaggagaaggacatcatccacagactcagagtccaagtcccacccggactcctccaagatacccaggtcccggagacccagccgcctgacagtgaagtatgaccggggccagctccagcgctggctggagatggagcaatgggtggatgctcaagttcaggagctcttccagagtcttgctctgtcacccaggctggagtgcagtggtgtgatccattctctgcaacttctgcctcccgggttcaatcgattctcctgcctcagctcctggagtagctgggattacgggatcaagcaaccccttctgagcctgagattgacctggaagctctcatggatctatccacagaggagcagaagactcagctggaggccattcttgggaactgcccccgccccacagaggcttttatctctgagctgctcagtcaactcaagaaactccggagactcagccggcctcagaaataagcctgagagaccatctttagcagcctcagcactgccaggcctgccctgaaactccagatcctggctaagagggaaatagctccttgggacacaaacaagaaatgtggacaaggagggacatttgcatactcctactgtctgtgtggtcacagctagtttctgtcagctgggctctctgggagaaagctggctgttgtccaatgccttccttggcagccaagtggataaaacctttaggagccccagctcaatggagtg

SEQ ID NO: 24621 - DNA, 478 bp, Homo sapiens
tagtatatgtttagtaaattactgttgaatggaaaactgaatgggtgttctgagtgaggagaaagtctaaccatgggaaattggagagaggtgggttgagtccctgacagtaaccttcattccagcaccagctggtcaggcccctctgagacccatgtgatttccaaataggatcaagcaaccccttctgagcctgagattgacctggaagctctcatggatctatccacagaggagcagaagactcagctggaggtaggatgggggctagaagctggccttgggtcagtgggaacccagaaacccaggttctgcctcctttggtggagtgcagagaaccaatccagaggggagaattcttgggagattggtggggacttgcgggaaagtgctgtgacttggggccctgtctgtgttctctcctatctaggccattcttgggaactgcccccgccccacagaggtaagggatgttctt

SEQ ID NO: 24622 - DNA, 792 bp, Homo sapiens
tgctggcctctcctgttctctgtctcctcacttccctctgtggctctgctcagaactggcggtttttcccagctccttgcccagaccaatacttccatgctgtcttcaagccctgcttcctgcacatctcccagcccagatggggagaacccatgtaagaaggtccactgggcttctgggaggagaaggacatcatccacagactcagagtccaagtcccacccggactcctccaagatacccaggtcccggagacccagccgcctgacagtgaagtatgaccggggccagctccagcgctggctggagatggagcaatgggtggatgctcaagttcaggagctcttccaggatcaagcaaccccttctgagcctgagattgacctggaagctctcatggatctatccacagaggagcagaagactcagctggaggccattcttgggaactgcccccgccccacagaggcttttatctctgagctgctcagtcaactcaagaaactccggagactcagccggcctcagaaataagcctgagagaccatctttagcagcctcagcactgccaggcctgccctgaaactccagatcctggctaagagggaaatagctccttgggacacaaacaagaaatgtggacaaggagggacatttgcatactcctactgtctgtgtggtcacagctagtttctgtcagctgggctctctgggagaaagctggctgttgtccaatgccttccttggcagccaagtggataaaacctttaggagccccagctcaatggagtg

SEQ ID NO: 24623 - DNA, 454 bp, Homo sapiens
ctggtgcgcagagcagacagtggagggttcagtgggcagtgctcttcaccccgggtctgaataatgcccggggcttgggaggcccctttggctgggcactttctcagggtggccatgctgagctgctgacccccaagccctcctctccagctccctttcatcatcaccgtgagtgttcatttaaactcagcaagacccatgccaacaaaaacaaagaaaatgatctcttagtggttatttatatggtaaacctcctctggggtgattttttttccagtccagcttgcaataatttcttaagaaagataaagtgatttttaagtgtaattttaaggagcaggcccatacgttagcttgcttgctgttattcttctgttcatgttgttcacaacatgaactttgatttgtcttctccaggtagtttgggaccacagagaaaaatcccccttctgtt

SEQ ID NO: 24624 - DNA, 653 bp, Homo sapiens
agaattgagatagacattgtatcagaagaaagcagttttgaacaaagagagcgaattactagccagttaacaagtgtcagctgttttataagcatggcataacacttcctaaattgtgcactgcattgttcagttaaaggaattggcgttctgtgactttttgacagttaaataatttgagaacttctgcattttgggcctgtgctcttggaaatccagaatgtacattaacttatttatgcctagtgttccattaatggaacgctaagcatctgggagttctttatatcctactgctcaaggtcatcgccaaggtctgatttttcaccctcaaaaaattgcaaccttagacataaatacaggagtcctatgagtcattaatatactaaacaaactttcttgtttaactctgctttttctaaacttacatgcttagtgatcattctttgcagggcgtgttttgagaaacatagtaatagcaagtagttaagtttctatctacctggtgttcacagtgggagtagtatagaggaagacccaagtttagcctttggaaaacctgagtttgtggtttttaatgcttttagtgaatcactatattggaaaagttaatttaagttcctcatgattgtttccttttgtaaaatatagta

SEQ ID NO: 24625 - DNA, 3493 bp, Homo sapiens
cagggcaaggcaatacagaagtgatccacacagggacattgcacagacaagcaagtcatcacattggagaattttgtttccatgaaattgagaaagacattcatggcttcgagtttcagtggaaagaagatgaaacaaatggccatgcagcacccatgacagaaatcaaagagttggctggtagtacaggccaacatgatcaaaggcatgctggaaacaagcgtattaaagatcagcttggatcaagctttcatttgcatctgcctgaaccgcacatatttcagtctgaagggaaaattggtaatcaagttgagaagtctatcaacaatgcttcctcagtttcaacatcccaaagaatttgttgtaggcccaaaacccatatttctaataagtatggaaataattccctccattcttcattactcacacaaaaatgggaagtacacatgagagaaaaatcttttgaatgtatacagagcttcaaatcctttaattgcagctcactcttaaaaaaacatcagataattcacttagaagagaaacaatgtaaatgtgatgtatgtggcaaggtctttaatcagaagcgataccttgcctgccatcgtagatgtcacactggtgagaaaccttacaagtgtaatgagtgtggcaagacctttggtcataattcatccctcttcattcacaaagcgcttcatactggagagaaaccttatgaatgtgaagaatgtgacaaagttttcagtcgcaaatcacaccttgaaagacataagaggattcatactggagagaaaccatacaaatgtaaggttcgtgatgaggctttcgcatataattcatatctggcaaaacatactatacttcacactggagagaaaccttacacatgtaatgaatgtggcaaagtttttaatcgactatcaacccttgcacgccatcatagacttcatactggagagaaaccttacaaatgtgaagagtgtgacaaagttttcagtcgcaaatcacaccttgaaagacataggaggattcatagtggagagaaaccttacaaatgtgaagaatgttgcaaagttttcagtcgcaaatcaaacctggaaagacacaggaggattcatactggagagaaaccatacaaatgtaaggtttgtgacaaggctttccagagggattcacacctggcacaacatcagagagttcatactggagagaaaccttacaagtgtaatgagtgtggcaagaccttcggtcagacatcatcgcttataatccatcgtaggcttcatactggagagaaaccttacaagtgtaatgagtgtggcaagaccttcagtcagatgtcatcccttgtataccatcataggcttcatagtggagagaagccttaatagtgtaatgagtgtggcaagaccttccatcacaattcaaccctgtaagtcataaggcaattcatactggagagaaaccttacaagcataatgaatgtggcaaggtttttaatcaaaaagcaacctttgcacatcaccatagacttcatactggagagaaaccttacaaatgggaggaatgtgacaaaagttttcagttgtaaatcaaaccttaaaacacataagaaaattcacattgaagagaaaccatacagaggtaaggtttgtgacaaggtttttgcatataatgcatatctggcaaaacatactagaattcacactggagagaaactcattataagtgtaatgagtgtggcaagaccgttggtcaaaattcacaccttgtaattaaaaggtcaaaattcacaccttgtaattcatagtggagagaaaccttacaagcacaatgaatgtgacatggtttttaatcaacaatcacaccttgcaagtcatcatagacttcatactgcatagaaatcttacaaacgtgaacaatgtgacaaagttttcattcacaaatccagcttcaaatacataggagaattcacactggagaaaagccatagaaatgtaaggtttgtgacaaggctttcgggaatgattcacacgtggcaccccatactagaattcacactggagagaaaccttacaagtgcaatgagtgtggcaaaccctttagtgggcagtcaccacttattcaccatcaagcaatccatggtatagggaaacttgactaatgtaatgattgtcacaaagttttcagtaatgctacaaccattgcacatcattggagaatccacagtgaagagatcttacaagtgtaataaatgtggcaaatttttcagacatcgttcatgccttgcatttcactggtgaactcatgctggagagaaaccttataaatgtcatgattgaggcaaggtcttcagtcaagcttcatcctatgcaaaacataggaggattcatacaggagagaaacctcacaagtgtgatgattgtggcaaagcgtttacttcacattcacacctcattagacatcagagaatccatgctggacagaaatcttacaaatgtcatcagtgtggaagggtcttcagtccaaggtcactccttgcagaccatcagacaattccttttggagacagttgtttcaaatgcagtgagtatagcaaaccatcaagcattaattgacattagagtcaaatcagccttgacctgagtttgttgatttaacattgatttcaagcattaattgccattaaactgtttatgttaagaggattgcactgggggccatggctcatgcctgtaattccagcactttgagaggcaaagacaggtaggtcactggagctcacgagtttgagaacagcctagccaacagatgggagctacttttcccagcctttattttctttttcttgttttttttttgagatggagtcttgctctgtcgcccaggttggagtgcagtggcacgatctcagctcactgcaacctcctcctcccaggttcaagcaattctcctgcctcagtctcccaagtagctgacactacagttgtgtgccaccacacctgggtaattttttgtgtttttagtagagactgggtttcaccgtgttagccagaatggtctctatcttctgactttatgatccacccgactccacctcccaaagtgctgagattacaggagtgagccactgtgcctggcctgttttttgtttctttaacaaaaagttatagagacttctatgagtattgtaccgaatctaaatcacaattgagtatataatcattgagcgatattcatttttccaatcagtatgggatttatatctatttatacatgtttttaatcattttgatcaatgtttatagatttcaaggtacaaacctcactttttatgtttattcctaaatatttcttactttaagttctttagcaaatggaattggtttttaattttcttttaaaattatttattgttaatgtatggaaattcaactaatttttggtgctgttattctattctgcaaataaactgaatgtgtttgttagttcc

SEQ ID NO: 24626 - DNA, 3528 bp, Homo sapiens
cagggcaaggcaatacagaagtgatccacacagggacattgcacagacaagcaagtcatcacattggagaattttgtttccatgaaattgagaaagacattcatggcttcgagtttcagtggaaagaagatgaaacaaatggccatgcagcacccatgacagaaatcaaagagttggctggtagtacaggccaacatgatcaaaggcatgctggaaacaagcgtattaaagatcagcttggatcaagctttcatttgcatctgcctgaaccgcacatatttcagtctgaagggaaaattggtaatcaagttgagaagtctatcaacaatgcttcctcagtttcaacatcccaaagaatttgttgtaggcccaaaacccatatttctaataagtatggaaataattccctccattcttcattactcacacaaaaatgggaagtacacatgagagaaaaatcttttgaatgtatacagagcttcaaatcctttaattgcagctcactcttaaaaaaacatcagataattcacttagaagagaaacaatgtaaatgtgatgtatgtggcaaggtctttaatcagaagcgataccttgcctgccatcgtagatgtcacactggtgagaaaccttacaagtgtaatgagtgtggcaagacctttggtcataattcatccctcttcattcacaaagcgcttcatactggagagaaaccttatgaatgtgaagaatgtgacaaagttttcagtcgcaaatcacaccttgaaagacataagaggattcatactggagagaaaccatacaaatgtaaggttcgtgatgaggctttcgcatataattcatatctggcaaaacatactatacttcacactggagagaaaccttacacatgtaatgaatgtggcaaagtttttaatcgactatcaacccttgcacgccatcatagacttcatactggagagaaaccttacaaatgtgaagagtgtgacaaagttttcagtcgcaaatcacaccttgaaagacataggaggattcatagtggagagaaaccttacaaatgtgaagaatgttgcaaagttttcagtcgcaaatcaaacctggaaagacacaggaggattcatactggagagaaaccatacaaatgtaaggtttgtgacaaggctttccagagggattcacacctggcacaacatcagagagttcatactggagagaaaccttacaagtgtaatgagtgtggcaagaccttcggtcagacatcatcgcttataatccatcgtaggcttcatactggagagaaaccttacaagtgtaatgagtgtggcaagaccttcagtcagatgtcatcccttgtataccatcataggcttcatagtggagagaagccttaatagtgtaatgagtgtggcaagaccttccatcacaattcaaccctgtaagtcataaggcaattcatactggagagaaaccttacaagcataatgaatgtggcaaggtttttaatcaaaaagcaacctttgcacatcaccatagacttcatactggagagaaaccttacaaatgggaggaatgtgacaaaagttttcagttgtaaatcaaaccttaaaacacataagaaaattcacattgaagagaaaccatacagaggtaaggtttgtgacaaggtttttgcatataatgcatatctggcaaaacatactagaattcacactggagagaaactcattataagtgtaatgagtgtggcaagaccgttggtcaaaattcacaccttgtaattaaaaggtcaaaattcacaccttgtaattcatagtggagagaaaccttacaagcacaatgaatgtgacatggtttttaatcaacaatcacaccttgcaagtcatcatagacttcatactgcatagaaatcttacaaacgtgaacaatgtgacaaagttttcattcacaaatccagcttcaaatacataggagaattcacactggagaaaagccatagaaatgtaaggtttgtgacaaggctttcgggaatgattcacacgtggcaccccatactagaattcacactggagagaaaccttacaagtgcaatgagtgtggcaaaccctttagtgggcagtcaccacttattcaccatcaagcaatccatggtatagggaaacttgactaatgtaatgattgtcacaaagttttcagtaatgctacaaccattgcacatcattggagaatccacagtgaagagatcttacaagtgtaataaatgtggcaaatttttcagacatcgttcatgccttgcatttcactggtgaactcatgctggagagaaaccttataaatgtcatgattgaggcaaggtcttcagtcaagcttcatcctatgcaaaacataggaggattcatacaggagagaaacctcacaagtgtgatgattgtggcaaagcgtttacttcacattcacacctcattagacatcagagaatccatgctggacagaaatcttacaaatgtcatcagtgtggaagggtcttcagtccaaggtcactccttgcagaccatcagacaattccttttggagacagttgtttcaaatgcagtgagtatagcaaaccatcaagcattaattgacattagagtcaaatcagccttgacctgagtttgttgatttaacattgatttcaagcattaattgccattaaactgtttatgttaagaggattgcactgggggccatggctcatgcctgtaattccagcactttgagaggcaaagacaggtaggtcactggagctcacgagtttgagaacagcctagccaacagatgggagctacttttcccagcctttattttctttttcttgttttttttttgagatggagtcttgctctgtcgcccaggttggagtgcagtggcacgatctcagctcactgcaacctcctcctcccaggttcaagcaattctcctgcctcagtctcccaagtagctgacactacagttgtgtgccaccacacctgggtaattttttgtgtttttagtagagactgggtttcaccgtgttagccagaatggtctctatcttctgactttatgatccacccgactccacctcccaaagtgctgagattacaggagtgagccactgtgcctggcctgttttttgtttctttaacatatataatcattgagcgatattcatttttccaatcagtatgggatttatatctatttatacatgtttttaatcattttgatcaatgtttatagatttcaaggtacaaacctcactttttatgtttattcctaaatatttcttactttaagttctttagcaaatggaattggtttttaattttcttttaaaattatttattgttaatgtatggaaattcaactaatttttggtgctgttattctattctgcaaataaactgaatgtgtttgttagttccagttgcattttggctgactctttgtgattttctttacagaaggtcatgtcatctacaaacaaataaaatttgacttctttctttctga

SEQ ID NO: 24627 - DNA, 3581 bp, Homo sapiens
cagggcaaggcaatacagaagtgatccacacagggacattgcacagacaagcaagtcatcacattggagaattttgtttccatgaaattgagaaagacattcatggcttcgagtttcagtggaaagaagatgaaacaaatggccatgcagcacccatgacagaaatcaaagagttggctggtagtacaggccaacatgatcaaaggcatgctggaaacaagcgtattaaagatcagcttggatcaagctttcatttgcatctgcctgaaccgcacatatttcagtctgaagggaaaattggtaatcaagttgagaagtctatcaacaatgcttcctcagtttcaacatcccaaagaatttgttgtaggcccaaaacccatatttctaataagtatggaaataattccctccattcttcattactcacacaaaaatgggaagtacacatgagagaaaaatcttttgaatgtatacagagcttcaaatcctttaattgcagctcactcttaaaaaaacatcagataattcacttagaagagaaacaatgtaaatgtgatgtatgtggcaaggtctttaatcagaagcgataccttgcctgccatcgtagatgtcacactggtgagaaaccttacaagtgtaatgagtgtggcaagacctttggtcataattcatccctcttcattcacaaagcgcttcatactggagagaaaccttatgaatgtgaagaatgtgacaaagttttcagtcgcaaatcacaccttgaaagacataagaggattcatactggagagaaaccatacaaatgtaaggttcgtgatgaggctttcgcatataattcatatctggcaaaacatactatacttcacactggagagaaaccttacacatgtaatgaatgtggcaaagtttttaatcgactatcaacccttgcacgccatcatagacttcatactggagagaaaccttacaaatgtgaagagtgtgacaaagttttcagtcgcaaatcacaccttgaaagacataggaggattcatagtggagagaaaccttacaaatgtgaagaatgttgcaaagttttcagtcgcaaatcaaacctggaaagacacaggaggattcatactggagagaaaccatacaaatgtaaggtttgtgacaaggctttccagagggattcacacctggcacaacatcagagagttcatactggagagaaaccttacaagtgtaatgagtgtggcaagaccttcggtcagacatcatcgcttataatccatcgtaggcttcatactggagagaaaccttacaagtgtaatgagtgtggcaagaccttcagtcagatgtcatcccttgtataccatcataggcttcatagtggagagaagccttaatagtgtaatgagtgtggcaagaccttccatcacaattcaaccctgtaagtcataaggcaattcatactggagagaaaccttacaagcataatgaatgtggcaaggtttttaatcaaaaagcaacctttgcacatcaccatagacttcatactggagagaaaccttacaaatgggaggaatgtgacaaaagttttcagttgtaaatcaaaccttaaaacacataagaaaattcacattgaagagaaaccatacagaggtaaggtttgtgacaaggtttttgcatataatgcatatctggcaaaacatactagaattcacactggagagaaactcattataagtgtaatgagtgtggcaagaccgttggtcaaaattcacaccttgtaattaaaaggtcaaaattcacaccttgtaattcatagtggagagaaaccttacaagcacaatgaatgtgacatggtttttaatcaacaatcacaccttgcaagtcatcatagacttcatactgcatagaaatcttacaaacgtgaacaatgtgacaaagttttcattcacaaatccagcttcaaatacataggagaattcacactggagaaaagccatagaaatgtaaggtttgtgacaaggctttcgggaatgattcacacgtggcaccccatactagaattcacactggagagaaaccttacaagtgcaatgagtgtggcaaaccctttagtgggcagtcaccacttattcaccatcaagcaatccatggtatagggaaacttgactaatgtaatgattgtcacaaagttttcagtaatgctacaaccattgcacatcattggagaatccacagtgaagagatcttacaagtgtaataaatgtggcaaatttttcagacatcgttcatgccttgcatttcactggtgaactcatgctggagagaaaccttataaatgtcatgattgaggcaaggtcttcagtcaagcttcatcctatgcaaaacataggaggattcatacaggagagaaacctcacaagtgtgatgattgtggcaaagcgtttacttcacattcacacctcattagacatcagagaatccatgctggacagaaatcttacaaatgtcatcagtgtggaagggtcttcagtccaaggtcactccttgcagaccatcagacaattccttttggagacagttgtttcaaatgcagtgagtatagcaaaccatcaagcattaattgacattagagtcaaatcagccttgacctgagtttgttgatttaacattgatttcaagcattaattgccattaaactgtttatgttaagaggattgcactgggggccatggctcatgcctgtaattccagcactttgagaggcaaagacaggtaggtcactggagctcacgagtttgagaacagcctagccaacagatgggagctacttttcccagcctttattttctttttcttgttttttttttgagatggagtcttgctctgtcgcccaggttggagtgcagtggcacgatctcagctcactgcaacctcctcctcccaggttcaagcaattctcctgcctcagtctcccaagtagctgacactacagttgtgtgccaccacacctgggtaattttttgtgtttttagtagagactgggtttcaccgtgttagccagaatggtctctatcttctgactttatgatccacccgactccacctcccaaagtgctgagattacaggagtgagccactgtgcctggcctgttttttgtttctttaacaaaaagttatagagacttctatgagtattgtaccgaatctaaatcacaattgagtatataatcattgagcgatattcatttttccaatcagtatgggatttatatctatttatacatgtttttaatcattttgatcaatgtttatagatttcaaggtacaaacctcactttttatgtttattcctaaatatttcttactttaagttctttagcaaatggaattggtttttaattttcttttaaaattatttattgttaatgtatggaaattcaactaatttttggtgctgttattctattctgcaaataaactgaatgtgtttgttagttccagttgcattttggctgactctttgtgattttctttacagaaggtcatgtcatctacaaacaaataaaatttgacttctttctttctga

SEQ ID NO: 24628 - DNA, 3940 bp, Homo sapiens
cagggcaaggcaatacagaagtgatccacacagggacattgcacagacaagcaagtcatcacattggagaattttgtttccatgaaattgagaaagacattcatggcttcgagtttcagtggaaagaagatgaaacaaatggccatgcagcacccatgacagaaatcaaagagttggctggtagtacaggccaacatgatcaaaggcatgctggaaacaagcgtattaaagatcagcttggatcaagctttcatttgcatctgcctgaaccgcacatatttcagtctgaagggaaaattggtaatcaagttgagaagtctatcaacaatgcttcctcagtttcaacatcccaaagaatttgttgtaggcccaaaacccatatttctaataagtatggaaataattccctccattcttcattactcacacaaaaatgggaagtacacatgagagaaaaatcttttgaatgtatacagagcttcaaatcctttaattgcagctcactcttaaaaaaacatcagataattcacttagaagagaaacaatgtaaatgtgatgtatgtggcaaggtctttaatcagaagcgataccttgcctgccatcgtagatgtcacactggtgagaaaccttacaagtgtaatgagtgtggcaagacctttggtcataattcatccctcttcattcacaaagcgcttcatactggagagaaaccttatgaatgtgaagaatgtgacaaagttttcagtcgcaaatcacaccttgaaagacataagaggattcatactggagagaaaccatacaaatgtaaggttcgtgatgaggctttcgcatataattcatatctggcaaaacatactatacttcacactggagagaaaccttacacatgtaatgaatgtggcaaagtttttaatcgactatcaacccttgcacgccatcatagacttcatactggagagaaaccttacaaatgtgaagagtgtgacaaagttttcagtcgcaaatcacaccttgaaagacataggaggattcatagtggagagaaaccttacaaatgtgaagaatgttgcaaagttttcagtcgcaaatcaaacctggaaagacacaggaggattcatactggagagaaaccatacaaatgtaaggtttgtgacaaggctttccagagggattcacacctggcacaacatcagagagttcatactggagagaaaccttacaagtgtaatgagtgtggcaagaccttcggtcagacatcatcgcttataatccatcgtaggcttcatactggagagaaaccttacaagtgtaatgagtgtggcaagaccttcagtcagatgtcatcccttgtataccatcataggcttcatagtggagagaagccttaatagtgtaatgagtgtggcaagaccttccatcacaattcaaccctgtaagtcataaggcaattcatactggagagaaaccttacaagcataatgaatgtggcaaggtttttaatcaaaaagcaacctttgcacatcaccatagacttcatactggagagaaaccttacaaatgggaggaatgtgacaaaagttttcagttgtaaatcaaaccttaaaacacataagaaaattcacattgaagagaaaccatacagaggtaaggtttgtgacaaggtttttgcatataatgcatatctggcaaaacatactagaattcacactggagagaaactcattataagtgtaatgagtgtggcaagaccgttggtcaaaattcacaccttgtaattaaaaggtcaaaattcacaccttgtaattcatagtggagagaaaccttacaagcacaatgaatgtgacatggtttttaatcaacaatcacaccttgcaagtcatcatagacttcatactgcatagaaatcttacaaacgtgaacaatgtgacaaagttttcattcacaaatccagcttcaaatacataggagaattcacactggagaaaagccatagaaatgtaaggtttgtgacaaggctttcgggaatgattcacacgtggcaccccatactagaattcacactggagagaaaccttacaagtgcaatgagtgtggcaaaccctttagtgggcagtcaccacttattcaccatcaagcaatccatggtatagggaaacttgactaatgtaatgattgtcacaaagttttcagtaatgctacaaccattgcacatcattggagaatccacagtgaagagatcttacaagtgtaataaatgtggcaaatttttcagacatcgttcatgccttgcatttcactggtgaactcatgctggagagaaaccttataaatgtcatgattgaggcaaggtcttcagtcaagcttcatcctatgcaaaacataggaggattcatacaggagagaaacctcacaagtgtgatgattgtggcaaagcgtttacttcacattcacacctcattagacatcagagaatccatgctggacagaaatcttacaaatgtcatcagtgtggaagggtcttcagtccaaggtcactccttgcagaccatcagacaattccttttggagacagttgtttcaaatgcagtgagtatagcaaaccatcaagcattaattgacattagagtcaaatcagccttgacctgagtttgttgatttaacattgatttcaagcattaattgccattaaactgtttatgttaagaggattgcactgggggccatggctcatgcctgtaattccagcactttgagaggcaaagacaggtaggtcactggagctcacgagtttgagaacagcctagccaacagatgggagctacttttcccagcctttattttctttttcttgttttttttttgagatggagtcttgctctgtcgcccaggttggagtgcagtggcacgatctcagctcactgcaacctcctcctcccaggttcaagcaattctcctgcctcagtctcccaagtagctgacactacagttgtgtgccaccacacctgggtaattttttgtgtttttagtagagactgggtttcaccgtgttagccagaatggtctctatcttctgactttatgatccacccgactccacctcccaaagtgctgagattacaggagtgagccactgtgcctggcctgttttttgtttctttaacaaaaagttatagagacttctatgagtattgtaccgaatctaaatcacaattgagtatataatcattgagcgatattcatttttccaatcagtatgggatttatatctatttatacatgtttttaatcattttgatcaatgtttatagatttcaaggtacaaacctcactttttatgtttattcctaaatatttcttactttaagttctttagcaaatggaattggtttttaattttcttttaaaattatttattgttaatgtatggaaattcaactaatttttggtgctgttattctattctgcaaataaactgaatgtgtttgttagttccagttgcattttggctgactctttgtgattttctttacagaaggtcatgtcatctacaaacaaataaaatttgacttctttctttctgaaaaaaaaaaaaaaaaaaaaaaaaaaaaaaaaaaaaaaaaaaaaagagggggggaaaagctcaccacaggaggggacacacacatagacaacacgcagacacataacgagcaacacaaagagcgcacccaaatagaggccagccacgcatgtatgaccagccacgcgcagccgccggcagaaaagattaaagacacccaaccgcggcgaccaaccaatccaataaggccaacatcaacggagagacaatacaacctcaccgaggtaggtgacacacgaagcgagccacacacaagcagatgaatatagaagacccgaggacacaaaacacacgaagaagagaaggaaaacgacaagaacg

SEQ ID NO: 24629 - DNA, 2015 bp, Homo sapiens
ccatcgagtttctcggccatcgcgcgcctgcgccattgggctgtcagtcagaggcggcgtggagatcgctgggagcggttgcggcgtgccgggagctgagttatagctgtgacttctgccctgccaggccgcacacaagctggctgacccggtttgtaaaaatggaatttcaagcagtagtgatggcagtaggtggaggatctcggatgacagacctaacttccagcattcccaaacctctgcttccagttgggaacaaacctttaatttggtacccattgaacctgcttgagcgtgttggatttgaagaagtcattgtggttacaaccagggatgttcaaaaggctctatgtgcagaattcaagatgaaaatgaagccagatattgtgtgtattcctgatgacgctgacatgggaactgcagattctttgcgctacatatatccaaaacttaagacagatgtgctggtgctgagctgtgatctgataacagacgttgccttacatgaggttgtggacctgtttagagcttatgatgcatcacttgctatgttgatgagaaaaggccaagatagcatagaacctgttcccggtcaaaaggggaaaaaaaaagcagtggagcagcgtgacttcattggagtggacagcacaggaaagaggctgctcttcatggctaatgaagcagacttggatgaagagctggtcattaagggatccatcctacagaagcatcctagaatacgtttccacacgggtcttgtggatgcccacctctactgtttgaaaaaatacatcgtggatttcctaatggaaaatgggtcaataacttctatccggagtgaactgattccatatttagtgagaaaacagttttcctcagcttcctcacaacagggacaagaagaaaaagaggaggatctaaagaaaaaggagctgaagtccttagatatctacagttttataaaagaagccaatacactgaacctggctccctatgatgcctgctggaatgcctgtcgaggagacaggtgggaagacttgtccagatcacaggtgcgctgctatgtccacatcatgaaagaggggctctgctctcgagtgagcacactgggactctacatggaagcaaacagacaggtgcccaaattgctgtctgctctctgtccagaagaaccaccagtccattcgtcagcccagattgtcagcaaacacctggttggagttgacagcctcattgggccagagacacagattggagagaagtcatccattaagcgctcagtcattggctcatcctgtctcataaaagatagagtgactattaccaattgccttctcatgaactcagtcactgtggaggaaggaagcaatatccaaggcagtgtcatctgcaacaatgctgtgatcgagaagggtgcagacatcaaggactgcttgattggaagtggccagaggattgaagccaaagctaaacgagtgaatgaggtgatcgtggggaatgaccagctcatggagatctgagttctgagcaagtcagactccttccttttggcctccaaagccacagatgttggccggcccacctgtttaactctgtatttatttcccaataaagaagggcttccaaaggcatgctggagacttgtggagcagtccaaagctccatgtcaggtgggctccaggtgtacacagtgtatgttcatgtgtcatgtggtaaagatcatctggagcaagtgtgtgggacaggacagatacagtggcctaactcttgtgtgccaagatgtatcggtggggcagcagctgtccaatgtaaagctcctaggaaggctactttctgactggctgacccaacccagtcctgaaagtatccctcacctaaaaggacctgggagtacttcagtcccttatcctaatcagcctttctagacccataggcctagctgctggcagtgccacgcctgagcatcagcccaggactctgctcccatacctaccatacagattcccagccccttc

SEQ ID NO: 24630 - DNA, 755 bp, Homo sapiens
ccatcgagtttctcggccatcgcgcgcctgcgccattgggctgtcagtcagaggcggcgtggagatcgctgggagcggttgcggcgtgccgggagctgagttatagctgtgacttctgccctgccaggccgcacacaagctggctgacccggtttgtaaaaatggaatttcaagcagtagtgatggcagtaggtggaggatctcggatgacagacctaacttccagcattcccaaacctctgcttccagttgggaacaaacctttaatttggtacccattgaacctgcttgagcgtgttggatttgaagaagtcattgtggttacaaccagggatgttcaaaaggctctatgtgcagaattcaagatgaaaatgaagccagatattgtgtgtattcctgatgacgctgacatgggaactgcagattctttgcgctacatatatccaaaacttaagacagatgtgctggtgctgagctgtgatctgataacagacgttgccttacatgaggttgtggacctgtttagagcttatgatgcatcacttgctatgttgatgagaaaaggccaagatagcatagaacctgttcccggtcaaaaggggaaaaaaaaagcagatggagactcgctctgttgccaggctggagtgcagtggcaccatctcggttcactccaatctccacctcccgggttcaagcacttcacctgcctcagcctcccgagtagctgggactacatgcacatgccaccacaccca

SEQ ID NO: 24631 - DNA, 335 bp, Homo sapiens
gactaccactaaattcgcggccgcgtcgacctgtggaggaaggaagcaatatccaaggcagtgtcatctgcaacaatgctgtgatcgagaagggtgcagacatcaaggactgcttgattggaagtggccagaggattgaagccaaagctaaacgagtgaatgaggtgatcgtggggaatgaccagctcatggagatctgagttctgagcaagtcagactccttccttttggcctccaaagccacagatgttggccggcccacctgtttaactctgtatttatttcccaataaagaagggcttccaaaggaaaaaaaagtcgacgcggccgcgaat

SEQ ID NO: 24632 - DNA, 1639 bp, Homo sapiens
  misc_feature (1587)..(1587): n is a, c, g, or t
  misc_feature (1602)..(1602): n is a, c, g, or t
  misc_feature (1626)..(1626): n is a, c, g, or t
  misc_feature (1636)..(1636): n is a, c, g, or t
ccatcgagtttctcggccatcgcgcgcctgcgccattgggctgtcagtcagaggcggcgtggagatcgctgggagcggttgcggcgtgccgggagctgagttatagctgtgacttctgccctgccaggccgcacacaagctggctgacccggtttgtaaaaatggaatttcaagcagtagtgatggcagtaggtggaggatctcggatgacagacctaacttccagcattcccaaacctctgcttccagttgggaacaaacctttaatttggtacccattgaacctgcttgagcgtgttggatttgaagaagtcattgtggttacaaccagggatgttcaaaaggctctatgtgcagaattcaagatgaaaatgaagccagatattgtgtgtattcctgatgacgctgacatgggaactgcagattctttgcgctacatatatccaaaacttaagacagatgtgctggtgctgagctgtgatctgataacagacgttgccttacatgaggttgtggacctgtttagagcttatgatgcatcacttgctatgttgatgagaaaaggccaagatagcatagaacctgttcccggtcaaaaggggaaaaaaaaagcagtggagcagcgtgacttcattggagtggacagcacaggaaagaggctgctcttcatggctaatgaagcagacttggatgaagagctggtcattaagggatccatcctacagaagcatcctagaatacgtttccacacgggtcttgtggatgcccacctctactgtttgaaaaaatacatcgtggatttcctaatggaaaatgggtcaataacttctatccggagtgaactgattccatatttagtgagaaaacagttttcctcagcttcctcacaacagggacaagaagaaaaagaggaggatctaaagaaaaaggagctgaagtccttagatatctacagttttataaaagaagccaatacactgaacctggctccctatgatgcctgctggaatgcctgtcgaggagacaggtgggaagacttgtccagatcacaggtgcgctgctatgtccacatcatgaaagaggggctctgctctcgagtgagcacactgggactctacatggaagcaaacagacaggtgcccaaattgctgtctgctctctgtccagaagaaccaccagtccattcgtcagcccagattgtcagcaaacacctggttggagttgacagcctcattgggccagagacacagattggagagaagtcatccattaagcgctcagtcattggctcatcctgtctcataaaagatagagtgactattaccaattgccttctcatgaactcagtcactgtggaggaaggaagcaatatccaaggcagtgtcatctgcaacaatgctgtgatcgagaagggtgcagacatcaaggactgcttgattggaagtggccagaggattgaagccaaagctaaacgagtgaatgaggtgatcgtggggaatgaccagctcatggagatctgagttctgagcaagtcagactccttcctttggaagcccttctttattgggaataaataccgggttaaanaggtgggccgccaanatttgtggcctcggtgccgaattnctgaagcccnggg

SEQ ID NO: 24633 - DNA, 1511 bp, Homo sapiens
ccatcgagtttctcggccatcgcgcgcctgcgccattgggctgtcagtcagaggcggcgtggagatcgctgggagcggttgcggcgtgccgggagctgagttatagctgtgacttctgccctgccaggccgcacacaagctggctgacccggtttgtaaaaatggaatttcaagcagtagtgatggcagtaggtggaggatctcggatgacagacctaacttccagcattcccaaacctctgcttccagttgggaacaaacctttaatttggtacccattgaacctgcttgagcgtgttggatttgaagaagtcattgtggttacaaccagggatgttcaaaaggctctatgtgcagaattcaagatgaaaatgaagccagatattgtgtgtattcctgatgacgctgacatgggaactgcagattctttgcgctacatatatccaaaacttaagacagatgtgctggtgctgagctgtgatctgataacagacgttgccttacatgaggttgtggacctgtttagagcttatgatgcatcacttgctatgttgatgagaaaaggccaagatagcatagaacctgttcccggtcaaaaggggaaaaaaaaagcagtggagcagcgtgacttcattggagtggacagcacaggaaagaggctgctcttcatggctaatgaagcagacttggatgaagagctggtcattaagggatccatcctacagaagcatcctagaatacgtttccacacgggtcttgtggatgcccacctctactgtttgaaaaaatacatcgtggatttcctaatggaaaatgggtcaataacttctatccggagtgaactgattccatatttagtgagaaaacagttttcctcagcttcctcacaacagggacaagaagaaaaagaggaggatctaaagaaaaaggagctgaagtccttagatatctacagttttataaaagaagccaatacactgaacctggctccctatgatgcctgctggaatgcctgtcgaggagacaggtgggaagacttgtccagatcacaggtgcgctgctatgtccacatcatgaaagaggggctctgctctcgagtgagcacactgggactctacatggaagcaaacagacaggtgcccaaattgctgtctgctctctgtccagaagaaccaccagtccattcgtcagcccagattgtcagcaaacacctggttggagttgacagcctcattgggccagagacacagattggagagaagtcatccattaagcgctcagtcattggctcatcctgtctcataaaagatagagtgactattaccaattgccttctcatgaactcagtcactgtggaggaaggggtatgtttccccctgtacccacttgaggcaaagataatggaaaaatgccttcaaaattctgaaggaaggttaattttaacctaaaattgtatacccaggcaaagtgctaatcaagagggcaatagaataaaaacattttcagatatc

SEQ ID NO: 24634 - DNA, 1521 bp, Homo sapiens
ccatcgagtttctcggccatcgcgcgcctgcgccattgggctgtcagtcagaggcggcgtggagatcgctgggagcggttgcggcgtgccgggagctgagttatagctgtgacttctgccctgccaggccgcacacaagctggctgacccggtttgtaaaaatggaatttcaagcagtagtgatggcagtaggtggaggatctcggatgacagacctaacttccagcattcccaaacctctgcttccagttgggaacaaacctttaatttggtacccattgaacctgcttgagcgtgttggatttgaagaagtcattgtggttacaaccagggatgttcaaaaggctctatgtgcagaattcaagatgaaaatgaagccagatattgtgtgtattcctgatgacgctgacatgggaactgcagattctttgcgctacatatatccaaaacttaagacagatgtgctggtgctgagctgtgatctgataacagacgttgccttacatgaggttgtggacctgtttagagcttatgatgcatcacttgctatgttgatgagaaaaggccaagatagcatagaacctgttcccggtcaaaaggggaaaaaaaaagcagtggagcagcgtgacttcattggagtggacagcacaggaaagaggctgctcttcatggctaatgaagcagacttggatgaagagctggtcattaagggatccatcctacagaagcatcctagaatacgtttccacacgggtcttgtggatgcccacctctactgtttgaaaaaatacatcgtggatttcctaatggaaaatgggtcaataacttctatccggagtgaactgattccatatttagtgagaaaacagttttcctcagcttcctcacaacagggacaagaagaaaaagaggaggatctaaagaaaaaggagctgaagtccttagatatctacagttttataaaagaagccaatacactgaacctggctccctatgatgcctgctggaatgcctgtcgaggagacaggtgggaagacttgtccagatcacaggtgcgctgctatgtccacatcatgaaagaggggctctgctctcgagtgagcacactgggactctacatggaagcaaacagacaggtgcccaaattgctgtctgctctctgtccagaagaaccaccagtccattcgtcagcccagattgtcagcaaacacctggttggagttgacagcctcattgggccagagacacagattggagagaagtcatccattaagcgctcagtcattggctcatcctgtctcataaaagatagagtgactattaccaattgccttctcatgaactcagtcactgtggaggaaggggtcatgagtagtttagaaagcctgtcaactcatcaaaaaagaaaagaacctccccatcctcagttactgagaagtttcatggctctttgccgaatattctctaagtcaatatctgaagcaggagcccgtgatacagtggagtgtcactttaggcctg

SEQ ID NO: 24635 - DNA, 1387 bp, Homo sapiens
ccatcgagtttctcggccatcgcgcgcctgcgccattgggctgtcagtcagaggcggcgtggagatcgctgggagcggttgcggcgtgccgggagctgagttatagctgtgacttctgccctgccaggccgcacacaagctggctgacccggtttgtaaaaatggaatttcaagcagtagtgatggcagtaggtggaggatctcggatgacagacctaacttccagcattcccaaacctctgcttccagttgggaacaaacctttaatttggtacccattgaacctgcttgagcgtgttggatttgaagaagtcattgtggttacaaccagggatgttcaaaaggctctatgtgcagaattcaagatgaaaatgaagccagatattgtgtgtattcctgatgacgctgacatgggaactgcagattctttgcgctacatatatccaaaacttaagacagatgtgctggtgctgagctgtgatctgataacagacgttgccttacatgaggttgtggacctgtttagagcttatgatgcatcacttgctatgttgatgagaaaaggccaagatagcatagaacctgttcccggtcaaaaggggaaaaaaaaagcagtggagcagcgtgacttcattggagtggacagcacaggaaagaggctgctcttcatggctaatgaagcagacttggatgaagagctggtcattaagggatccatcctacagaagcatcctagaatacgtttccacacgggtcttgtggatgcccacctctactgtttgaaaaaatacatcgtggatttcctaatggaaaatgggtcaataacttctatccggagtgaactgattccatatttagtgagaaaacagttttcctcagcttcctcacaacagggacaagaagaaaaagaggaggatctaaagaaaaaggagctgaagtccttagatatctacagttttataaaagaagccaatacactgaacctggctccctatgatgcctgctggaatgcctgtcgaggagacaggtgggaagacttgtccagatcacaggtgcgctgctatgtccacatcatgaaagaggggctctgctctcgagtgagcacactgggactctacatggaagcaaacagacaggtgcccaaattgctgtctgctctctgtccagaagaaccaccagtccattcgtcagcccagattgtcagcaaacacctggttggagttgacagcctcattgggccagagacacagattggagagaagtcatccattaagcgctcagtcattggctcatcctgtctcataaaagatagagtgactattaccaattgccttctcatgaactcagtcactgtggaggaaggcgaaagcacaaacagcaaggcaag

SEQ ID NO: 24636 - DNA, 1376 bp, Homo sapiens
ccatcgagtttctcggccatcgcgcgcctgcgccattgggctgtcagtcagaggcggcgtggagatcgctgggagcggttgcggcgtgccgggagctgagttatagctgtgacttctgccctgccaggccgcacacaagctggctgacccggtttgtaaaaatggaatttcaagcagtagtgatggcagtaggtggaggatctcggatgacagacctaacttccagcattcccaaacctctgcttccagttgggaacaaacctttaatttggtacccattgaacctgcttgagcgtgttggatttgaagaagtcattgtggttacaaccagggatgttcaaaaggctctatgtgcagaattcaagatgaaaatgaagccagatattgtgtgtattcctgatgacgctgacatgggaactgcagattctttgcgctacatatatccaaaacttaagacagatgtgctggtgctgagctgtgatctgataacagacgttgccttacatgaggttgtggacctgtttagagcttatgatgcatcacttgctatgttgatgagaaaaggccaagatagcatagaacctgttcccggtcaaaaggggaaaaaaaaagcagtggagcagcgtgacttcattggagtggacagcacaggaaagaggctgctcttcatggctaatgaagcagacttggatgaagagctggtcattaagggatccatcctacagaagcatcctagaatacgtttccacacgggtcttgtggatgcccacctctactgtttgaaaaaatacatcgtggatttcctaatggaaaatgggtcaataacttctatccggagtgaactgattccatatttagtgagaaaacagttttcctcagcttcctcacaacagggacaagaagaaaaagaggaggatctaaagaaaaaggagctgaagtccttagatatctacagttttataaaagaagccaatacactgaacctggctccctatgatgcctgctggaatgcctgtcgaggagacaggtgggaagacttgtccagatcacaggtgcgctgctatgtccacatcatgaaagaggggctctgctctcgagtgagcacactgggactctacatggaagcaaacagacaggtgcccaaattgctgtctgctctctgtccagaagaaccaccagtccattcgtcagcccagattgtcagcaaacacctgctaaacgagtgaatgaggtgatcgtggggaatgaccagctcatggagatctgagttctgagcaagtcagactccttccttttggcctccaaagccacagatgttggccggcccacctgtttaactctgtatttatttcccaataaagaagggcttccaaagg

SEQ ID NO: 24637 - DNA, 2174 bp, Homo sapiens
ccatcgagtttctcggccatcgcgcgcctgcgccattgggctgtcagtcagaggcggcgtggagatcgctgggagcggttgcggcgtgccgggagctgagttatagctgtgacttctgccctgccaggccgcacacaagctggctgacccggtttgtaaaaatggaatttcaagcagtagtgatggcagtaggtggaggatctcggatgacagacctaacttccagcattcccaaacctctgcttccagttgggaacaaacctttaatttggtacccattgaacctgcttgagcgtgttggatttgaagaagtcattgtggttacaaccagggatgttcaaaaggctctatgtgcagaattcaagatgaaaatgaagccagatattgtgtgtattcctgatgacgctgacatgggaactgcagattctttgcgctacatatatccaaaacttaagctacccaaacctctttccctgacttatcaagagagattattggttcattcattctcccaggccctggacagatgtgctggtgctgagctgtgatctgataacagacgttgccttacatgaggttgtggacctgtttagagcttatgatgcatcacttgctatgttgatgagaaaaggccaagatagcatagaacctgttcccggtcaaaaggggaaaaaaaaagcagcacctggcccagttatgtcccatggtgaacaatcaataaatattattgaatggcctgcttataaaggcagctcttcttgccccccaccccagtggagcagcgtgacttcattggagtggacagcacaggaaagaggctgctcttcatggctaatgaagcagacttggatgaagagctggtcattaagggatccatcctacagaagcatcctagaatacgtttccacacgggtcttgtggatgcccacctctactgtttgaaaaaatacatcgtggatttcctaatggaaaatgggtcaataacttctatccggagtgaactgattccatatttagtgagaaaacagttttcctcagcttcctcacaacagggacaagaagaaaaagaggaggatctaaagaaaaaggagctgaagtccttagatatctacagttttataaaagaagccaatacactgaacctggctccctatgatgcctgctggaatgcctgtcgaggagacaggtgggaagacttgtccagatcacaggtgcgctgctatgtccacatcatgaaagaggggctctgctctcgagtgagcacactgggactctacatggaagcaaacagacaggtgcccaaattgctgtctgctctctgtccagaagaaccaccagtccattcgtcagcccagattgtcagcaaacacctggttggagttgacagcctcattgggccagagacacagattggagagaagtcatccattaagcgctcagtcattggctcatcctgtctcataaaagatagagtgactattaccaattgccttctcatgaactcagtcactgtggaggaaggaagcaatatccaaggcagtgtcatctgcaacaatgctgtgatcgagaagggtgcagacatcaaggactgcttgattggaagtggccagaggattgaagccaaagctaaacgagtgaatgaggtgatcgtggggaatgaccagctcatggagatctgagttctgagcaagtcagactccttccttttggcctccaaagccacagatgttggccggcccacctgtttaactctgtatttatttcccaataaagaagggcttccaaaggcatgctggagacttgtggagcagtccaaagctccatgtcaggtgggctccaggtgtacacagtgtatgttcatgtgtcatgtggtaaagatcatctggagcaagtgtgtgggacaggacagatacagtggcctaactcttgtgtgccaagatgtatcggtggggcagcagctgtccaatgtaaagctcctaggaaggctactttctgactggctgacccaacccagtcctgaaagtatccctcacctaaaaggacctgggagtacttcagtcccttatcctaatcagcctttctagacccataggcctagctgctggcagtgccacgcctgagcatcagcccaggactctgctcccatacctaccatacagattcccagccccttc

SEQ ID NO: 24638 - DNA, 1096 bp, Homo sapiens
ccatcgagtttctcggccatcgcgcgcctgcgccattgggctgtcagtcagaggcggcgtggagatcgctgggagcggttgcggcgtgccgggagctgagttatagctgtgacttctgccctgccaggccgcacacaagctggctgacccggtttgtaaaaatggaatttcaagcagtagtgatggcagtaggtggaggatctcggatgacagacctaacttccagcattcccaaacctctgcttccagttgggaacaaacctttaatttggtacccattgaacctgcttgagcgtgttggatttgaagaagtcattgtggttacaaccagggatgttcaaaaggctctatgtgcagaattcaagatgaaaatgaagccagatattgtgtgtattcctgatgacgctgacatgggaactgcagattctttgcgctacatatatccaaaacttaagacagatgtgctggtgctgagctgtgatctgataacagacgttgccttacatgaggttgtggacctgtttagagcttatgatgcatcacttgctatgttgatgagaaaaggccaagatagcatagaacctgttcccggtcaaaaggggaaaaaaaaagcagtggagcagcgtgacttcattggagtggacagcacaggaaagaggctgctcttcatggctaatgaagcagacttggatgaagagctggtcattaagggatccatcctacagaagtaagccctagggttttttcttctggcaattctccttgtcttaaaacaaaataaaaccacccagtggatgggaaagagggaatgaaaactagactatactgtgtgaaattgacaaaagtatgtgaatatttttcccatgagacaggatgaaggcttttcttcactgcataagcctgtttccctgtcttttcttgccaaggtagagccaaatccatgtgtggcgtcatatgcctgtagtcccagctactggggaggctgaggcgggagaatcacttgaacccaggaggcggaggttgcagtgagccaagattgcgccactgcactccagttggacaacaagagtgaaatagctagtcggtcttactcggg

SEQ ID NO: 24639 - DNA, 1014 bp, Homo sapiens
tgaacccaggaggtggaggctgtagtgagccaagatcgtgccactacactccagcctgggtaatccgagacccctgtctcaaaaaaaaaaaaaaaaaaaggaactgaagtgaagtcagaatatcttcttttcaggccttagagaaagatcgttatgagcatagtcccaaatctggatttctctgaagccaggtcctcccttggcttaccattctgtcttccactgataacttgaggcacgtagccattaactggactgcccagctgttcctggcctagggaggagccagaacccccaaccaatagtaatgaggatggtgatgcgagccttgggtcctccctaacttggctactgtgttacagaagcaatatccaaggcagtgtcatctgcaacaatgctgtgatcgagaagggtgcagacatcaaggactgcttgattggaagtggccagaggattgaagccaaagctaaacgagtgaatgaggtgatcgtggggaatgaccagctcatggagatctgagttctgagcaagtcagactccttccttttggcctccaaagccacagatgttggccggcccacctgtttaactctgtatttatttcccaataaagaagggcttccaaaggcatgctggagacttgtggagcagtccaaagctccatgtcaggtgggctccaggtgtacacagtgtatgttcatgtgtcatgtggtaaagatcatctggagcaagtgtgtgggacaggacagatacagtggcctaactcttgtgtgccaagatgtatcggtggggcagcagctgtccaatgtaaagctcctaggaaggctactttctgactggctgacccaacccagtcctgaaagtatccctcacctaaaaggacctgggagtacttcagtcccttatcctaatcagcctttctagacccataggcctagctgctggcagtgccacgcctgagcatcagcccaggactctgctcccatacctaccatacagattcccagccccttc

SEQ ID NO: 24640 - DNA, 584 bp, Homo sapiens
tgaacccaggaggtggaggctgtagtgagccaagatcgtgccactacactccagcctgggtaatccgagacccctgtctcaaaaaaaaaaaaaaaaaaaggaactgaagtgaagtcagaatatcttcttttcaggccttagagaaagatcgttatgagcatagtcccaaatctggatttctctgaagccaggtcctcccttggcttaccattctgtcttccactgataacttgaggcacgtagccattaactggactgcccagctgttcctggcctagggaggagccagaacccccaaccaatagtaatgaggatggtgatgcgagccttgggtcctccctaacttggctactgtgttacagaagcaatatccaaggcagtgtcatctgcaacaatgctgtgatcgagaagggtgcagacatcaaggactgcttgattggaagtggccagaggattgaagccaaaggtaaaccagattacaatcacagattccatttttacttctcacaccagcactgataatgccaaaggctggtgaggatgtgggaaacaagcacatacgtacactaacgatcgagaactag

SEQ ID NO: 24641 - DNA, 372 bp, Homo sapiens
ctgccaggccgcacacaagctggctgacccgggtgagcagtgcggtggggccactcatctgagggaggcgggcatgtcgaactgggccgaggtggacccgaaggggtaggagagggtgctgagccccgaagttgtcagctcgactccctgctcgacccggtgtagctgtgtccgaagtagaagggaggttggggatgagaatccgagccaaccaccttatgcaacagatggaggaactaagtttctaatctcagctactcgagagtctgaggcaggagaatcgtttgaacccaggaggtggaggttgcagtgagcctaattcgcgccactgcactccagcctgggcaacatagtgagactctccgtttcaaa

SEQ ID NO: 24642 - DNA, 1629 bp, Homo sapiens
ccatcgagtttctcggccatcgcgcgcctgcgccattgggctgtcagtcagaggcggcgtggagatcgctgggagcggttgcggcgtgccgggagctgagttatagctgtgacttctgccctgccaggccgcacacaagctggctgacccggtttgtaaaaatggaatttcaagcagtagtgatggcagtaggtggaggatctcggatgacagacctaacttccagcattcccaaacctctgcttccagttgggaacaaacctttaatttggtacccattgaacctgcttgagcgtgttggatttgaagaagtcattgtggttacaaccagggatgttcaaaaggctctatgtgcagaattcaagatgaaaatgaagccagatattgtgtgtattcctgatgacgctgacatgggaactgcagattctttgcgctacatatatccaaaacttaagacagatgtgctggtgctgagctgtgatctgataacagacgttgccttacatgaggttgtggacctgtttagagcttatgatgcatcacttgctatgttgatgagaaaaggccaagatagcatagaacctgttcccggtcaaaaggggaaaaaaaaagcagtggagcagcgtgacttcattggagtggacagcacaggaaagaggctgctcttcatggctaatgaagcagacttggatgaagagctggtcattaagggatccatcctacagaagcatcctagaatacgtttccacacgggtcttgtggatgcccacctctactgtttgaaaaaatacatcgtggatttcctaatggaaaatgggtcaataacttctatccggagtgaactgattccatatttagtgagaaaacagttttcctcagcttcctcacaacagggacaagaagaaaaagaggaggatctaaagaaaaaggagctgaagtccttagatatctacagttttataaaagaagccaatacactgaacctggctccctatgatgcctgctggaatgcctgtcgaggagacaggtgggaagacttgtccagatcacaggtgcgctgctatgtccacatcatgaaagaggggctctgctctcgagtgagcacactgggactctacatggaagcaaacagacaggtgcccaaattgctgtctgctctctgtccagaagaaccaccagtccattcgtcagcccagattgtcagcaaacacctggttggagttgacagcctcattgggccagagacacagattggagagaagtcatccattaagcgctcagtcattggctcatcctgtctcataaaagatagagtgactattaccaattgccttctcatgaactcagtcactgtggaggaaggaagcaatatccaaggcagtgtcatctgcaacaatgctgtgatcgagaagggtgcagacatcaaggactgcttgattggaagtggccagaggattgaagccaaagctaaacgagtgaatgaggtgatcgtggggaatgaccagctcatggagatctgagttctgagcaagtcagactccttccttttggcctccaaagccacagatgttggccggcccacctgtttaactctgtatttatttcccaataaagaagggcttccaaagg

SEQ ID NO: 24643 - DNA, 804 bp, Homo sapiens
ccatcgagtttctcggccatcgcgcgcctgcgccattgggctgtcagtcagaggcggcgtggagatcgctgggagcggttgcggcgtgccgggagctgagttatagctgtgacttctgccctgccaggccgcacacaagctggctgacccggtttgtaaaaatggaatttcaagcagtagtgatggcagtaggtggaggatctcggatgacagacctaacttccagcattcccaaacctctgcttccagttgggaacaaacctttaatttggtacccattgaacctgcttgagcgtgttggatttgaagaagtcattgtggttacaaccagggatgttcaaaaggctctatgtgcagaattcaagatgaaaatgaagccagatattgtgtgtattcctgatgacgctgacatgggaactgcagattctttgcgctacatatatccaaaacttaagatggccctcagccttgatgaaattgtgttcttgatagagatgttcctgatgtacctgatatgtccagaagcccactgctcaggagctaacgtccaacacgatctcttgtcgcagtcctgccaataccatagctttatatttctctgatggattgagttctgtgcggacaatatctagctttccagaaagggtactgtttcaggcagcacagatagctggtgagcgactaaactcaccactgccatgctgatcacagaatatgtgagagcaggcagtgacccatgcatagccatagagtttgatgccacacttttgataattacaaagtagcatgtcttcacacaaagac

SEQ ID NO: 24644 - DNA, 673 bp, Homo sapiens
ccatcgagtttctcggccatcgcgcgcctgcgccattgggctgtcagtcagaggcggcgtggagatcgctgggagcggttgcggcgtgccgggagctgagttatagctgtgacttctgccctgccaggccgcacacaagctggctgacccggtttgtaaaaatggaatttcaagcagtagtgatggcagtaggtggaggatctcggatgacagacctaacttccagcattcccaaacctctgcttccagttgggaacaaacctttaatttggtacccattgaacctgcttgagcgtgttggatttgaagaagtcattgtggttacaaccagggatgttcaaaaggctctatgtgcagaattcaagatgaaaatgaagccagatattgtgtgtattcctgatgacgctgacatgggaactgcagattctttgcgctacatatatccaaaacttaaggtgaaaagcaattttttgactcttcttgtttattgaagatagatgatatcttatgttttcccagtgcattatagtcttttttttgagacagaacctcgctctgtcacctaggccggagtgcagtagtgtgatctcaattcactgcaacctccacctcccgggttcaagcaattctcctgcctcagcctcccaagtagctgggattacaggcatacgcc

SEQ ID NO: 24645 - DNA, 1985 bp, Homo sapiens
gcaagccgatctgaggaaaacacctgctacccacgagatgtttgagctggtgcgttcgccgggagctgagttatagctgtgacttctgccctgccaggccgcacacaagctggctgacccggtttgtaaaaatggaatttcaagcagtagtgatggcagtaggtggaggatctcggatgacagacctaacttccagcattcccaaacctctgcttccagttgggaacaaacctttaatttggtacccattgaacctgcttgagcgtgttggatttgaagaagtcattgtggttacaaccagggatgttcaaaaggctctatgtgcagaattcaagatgaaaatgaagccagatattgtgtgtattcctgatgacgctgacatgggaactgcagattctttgcgctacatatatccaaaacttaagacagatgtgctggtgctgagctgtgatctgataacagacgttgccttacatgaggttgtggacctgtttagagcttatgatgcatcacttgctatgttgatgagaaaaggccaagatagcatagaacctgttcccggtcaaaaggggaaaaaaaaagcagtggagcagcgtgacttcattggagtggacagcacaggaaagaggctgctcttcatggctaatgaagcagacttggatgaagagctggtcattaagggatccatcctacagaagcatcctagaatacgtttccacacgggtcttgtggatgcccacctctactgtttgaaaaaatacatcgtggatttcctaatggaaaatgggtcaataacttctatccggagtgaactgattccatatttagtgagaaaacagttttcctcagcttcctcacaacagggacaagaagaaaaagaggaggatctaaagaaaaaggagctgaagtccttagatatctacagttttataaaagaagccaatacactgaacctggctccctatgatgcctgctggaatgcctgtcgaggagacaggtgggaagacttgtccagatcacaggtgcgctgctatgtccacatcatgaaagaggggctctgctctcgagtgagcacactgggactctacatggaagcaaacagacaggtgcccaaattgctgtctgctctctgtccagaagaaccaccagtccattcgtcagcccagattgtcagcaaacacctggttggagttgacagcctcattgggccagagacacagattggagagaagtcatccattaagcgctcagtcattggctcatcctgtctcataaaagatagagtgactattaccaattgccttctcatgaactcagtcactgtggaggaaggaagcaatatccaaggcagtgtcatctgcaacaatgctgtgatcgagaagggtgcagacatcaaggactgcttgattggaagtggccagaggattgaagccaaagctaaacgagtgaatgaggtgatcgtggggaatgaccagctcatggagatctgagttctgagcaagtcagactccttccttttggcctccaaagccacagatgttggccggcccacctgtttaactctgtatttatttcccaataaagaagggcttccaaaggcatgctggagacttgtggagcagtccaaagctccatgtcaggtgggctccaggtgtacacagtgtatgttcatgtgtcatgtggtaaagatcatctggagcaagtgtgtgggacaggacagatacagtggcctaactcttgtgtgccaagatgtatcggtggggcagcagctgtccaatgtaaagctcctaggaaggctactttctgactggctgacccaacccagtcctgaaagtatccctcacctaaaaggacctgggagtacttcagtcccttatcctaatcagcctttctagacccataggcctagctgctggcagtgccacgcctgagcatcagcccaggactctgctcccatacctaccatacagattcccagccccttc

SEQ ID NO: 24646 - DNA, 1911 bp, Homo sapiens
ccatcgagtttctcggccatcgcgcgcctgcgccattgggctgtcagtcagaggcggcgtggagatcgctgggagcggttgcggcgtgccgggagctgagttatagctgtgacttctgccctgccaggccgcacacaagctggctgacccggtttgtaaaaatggaatttcaagcagtagtgatggcagtaggtggaggatctcggatgacagacctaacttccagcattcccaaacctctgcttccagttgggaacaaacctttaatttggtacccattgaacctgcttgagcgtgttggatttgaagaagtcattgtggttacaaccagggatgttcaaaaggctctatgtgcagaattcaagatgaaaatgaagccagatattgtgtgtattcctgatgacgctgacatgggaactgcagattctttgcgctacatatatccaaaacttaagacagatgtgctggtgctgagctgtgatctgataacagacgttgccttacatgaggttgtggacctgtttagagcttatgatgcatcacttgctatgttgatgagaaaaggccaagatagcatagaacctgttcccggtcaaaaggggaaaaaaaaagcagtggagcagcgtgacttcattggagtggacagcacaggaaagaggctgctcttcatggctaatgaagcagacttggatgaagagctggtcattaagggatccatcctacagaagcatcctagaatacgtttccacacgggtcttgtggatgcccacctctactgtttgaaaaaatacatcgtggatttcctaatggaaaatgggtcaataacttctatccggagtgaactgattccatatttagtgagaaaacagttttcctcagcttcctcacaacagggacaagaagaaaaagaggaggatctaaagaaaaaggagctgaagtccttagatatctacagttttataaaagaagccaatacactgaacctggctccctatgatgcctgctggaatgcctgtcgaggagacaggtgggaagacttgtccagatcacaggtgcgctgctatgtccacatcatgaaagaggggctctgctctcgagtgagcacactgggactctacatggaagcaaacagacaggtgcccaaattgctgtctgctctctgtccagaagaaccaccagtccattcgtcagcccagattgtcagcaaacacctggttggagttgacagcctcattgggccagagacacagattggagagaagtcatccattaagcgctcagtcattggctcatcctgtctcataaaagatagagtgactattaccaattgccttctcatgaactcagtcactgtggaggaaggctaaacgagtgaatgaggtgatcgtggggaatgaccagctcatggagatctgagttctgagcaagtcagactccttccttttggcctccaaagccacagatgttggccggcccacctgtttaactctgtatttatttcccaataaagaagggcttccaaaggcatgctggagacttgtggagcagtccaaagctccatgtcaggtgggctccaggtgtacacagtgtatgttcatgtgtcatgtggtaaagatcatctggagcaagtgtgtgggacaggacagatacagtggcctaactcttgtgtgccaagatgtatcggtggggcagcagctgtccaatgtaaagctcctaggaaggctactttctgactggctgacccaacccagtcctgaaagtatccctcacctaaaaggacctgggagtacttcagtcccttatcctaatcagcctttctagacccataggcctagctgctggcagtgccacgcctgagcatcagcccaggactctgctcccatacctaccatacagattcccagccccttc

SEQ ID NO: 24647 - DNA, 1915 bp, Homo sapiens
gggatcatagatgggacatacagaaaggtcatacacatctacaaaatgccagtatcaggcggctggcttcgaagcagtagtgatggcagtaggtggaggatctcggatgacagacctaacttccagcattcccaaacctctgcttccagttgggaacaaacctttaatttggtacccattgaacctgcttgagcgtgttggatttgaagaagtcattgtggttacaaccagggatgttcaaaaggctctatgtgcagaattcaagatgaaaatgaagccagatattgtgtgtattcctgatgacgctgacatgggaactgcagattctttgcgctacatatatccaaaacttaagacagatgtgctggtgctgagctgtgatctgataacagacgttgccttacatgaggttgtggacctgtttagagcttatgatgcatcacttgctatgttgatgagaaaaggccaagatagcatagaacctgttcccggtcaaaaggggaaaaaaaaagcagtggagcagcgtgacttcattggagtggacagcacaggaaagaggctgctcttcatggctaatgaagcagacttggatgaagagctggtcattaagggatccatcctacagaagcatcctagaatacgtttccacacgggtcttgtggatgcccacctctactgtttgaaaaaatacatcgtggatttcctaatggaaaatgggtcaataacttctatccggagtgaactgattccatatttagtgagaaaacagttttcctcagcttcctcacaacagggacaagaagaaaaagaggaggatctaaagaaaaaggagctgaagtccttagatatctacagttttataaaagaagccaatacactgaacctggctccctatgatgcctgctggaatgcctgtcgaggagacaggtgggaagacttgtccagatcacaggtgcgctgctatgtccacatcatgaaagaggggctctgctctcgagtgagcacactgggactctacatggaagcaaacagacaggtgcccaaattgctgtctgctctctgtccagaagaaccaccagtccattcgtcagcccagattgtcagcaaacacctggttggagttgacagcctcattgggccagagacacagattggagagaagtcatccattaagcgctcagtcattggctcatcctgtctcataaaagatagagtgactattaccaattgccttctcatgaactcagtcactgtggaggaaggaagcaatatccaaggcagtgtcatctgcaacaatgctgtgatcgagaagggtgcagacatcaaggactgcttgattggaagtggccagaggattgaagccaaagctaaacgagtgaatgaggtgatcgtggggaatgaccagctcatggagatctgagttctgagcaagtcagactccttccttttggcctccaaagccacagatgttggccggcccacctgtttaactctgtatttatttcccaataaagaagggcttccaaaggcatgctggagacttgtggagcagtccaaagctccatgtcaggtgggctccaggtgtacacagtgtatgttcatgtgtcatgtggtaaagatcatctggagcaagtgtgtgggacaggacagatacagtggcctaactcttgtgtgccaagatgtatcggtggggcagcagctgtccaatgtaaagctcctaggaaggctactttctgactggctgacccaacccagtcctgaaagtatccctcacctaaaaggacctgggagtacttcagtcccttatcctaatcagcctttctagacccataggcctagctgctggcagtgccacgcctgagcatcagcccaggactctgctcccatacctaccatacagattcccagccccttc

SEQ ID NO: 24648 - DNA, 2082 bp, Homo sapiens
ccatcgagtttctcggccatcgcgcgcctgcgccattgggctgtcagtcagaggcggcgtggagatcgctgggagcggttgcggcgtgccgggagctgagttatagctgtgacttctgccctgccaggccgcacacaagctggctgacccggtttgtaaaaatggaatttcaagcagtagtgatggcagtaggtggaggatctcggatgacagacctaacttccagcattcccaaacctctgcttccagttgggaacaaacctttaatttggtacccattgaacctgcttgagcgtgttggatttgaagaagtcattgtggttacaaccagggatgttcaaaaggctctatgtgcagaattcaagatgaaaatgaagccagatattgtgtgtattcctgatgacgctgacatgggaactgcagattctttgcgctacatatatccaaaacttaagctacccaaacctctttccctgacttatcaagagagattattggttcattcattctcccaggccctggacagatgtgctggtgctgagctgtgatctgataacagacgttgccttacatgaggttgtggacctgtttagagcttatgatgcatcacttgctatgttgatgagaaaaggccaagatagcatagaacctgttcccggtcaaaaggggaaaaaaaaagcagtggagcagcgtgacttcattggagtggacagcacaggaaagaggctgctcttcatggctaatgaagcagacttggatgaagagctggtcattaagggatccatcctacagaagcatcctagaatacgtttccacacgggtcttgtggatgcccacctctactgtttgaaaaaatacatcgtggatttcctaatggaaaatgggtcaataacttctatccggagtgaactgattccatatttagtgagaaaacagttttcctcagcttcctcacaacagggacaagaagaaaaagaggaggatctaaagaaaaaggagctgaagtccttagatatctacagttttataaaagaagccaatacactgaacctggctccctatgatgcctgctggaatgcctgtcgaggagacaggtgggaagacttgtccagatcacaggtgcgctgctatgtccacatcatgaaagaggggctctgctctcgagtgagcacactgggactctacatggaagcaaacagacaggtgcccaaattgctgtctgctctctgtccagaagaaccaccagtccattcgtcagcccagattgtcagcaaacacctggttggagttgacagcctcattgggccagagacacagattggagagaagtcatccattaagcgctcagtcattggctcatcctgtctcataaaagatagagtgactattaccaattgccttctcatgaactcagtcactgtggaggaaggaagcaatatccaaggcagtgtcatctgcaacaatgctgtgatcgagaagggtgcagacatcaaggactgcttgattggaagtggccagaggattgaagccaaagctaaacgagtgaatgaggtgatcgtggggaatgaccagctcatggagatctgagttctgagcaagtcagactccttccttttggcctccaaagccacagatgttggccggcccacctgtttaactctgtatttatttcccaataaagaagggcttccaaaggcatgctggagacttgtggagcagtccaaagctccatgtcaggtgggctccaggtgtacacagtgtatgttcatgtgtcatgtggtaaagatcatctggagcaagtgtgtgggacaggacagatacagtggcctaactcttgtgtgccaagatgtatcggtggggcagcagctgtccaatgtaaagctcctaggaaggctactttctgactggctgacccaacccagtcctgaaagtatccctcacctaaaaggacctgggagtacttcagtcccttatcctaatcagcctttctagacccataggcctagctgctggcagtgccacgcctgagcatcagcccaggactctgctcccatacctaccatacagattcccagccccttc

SEQ ID NO: 24649 - DNA, 1423 bp, Homo sapiens
ccatcgagtttctcggccatcgcgcgcctgcgccattgggctgtcagtcagaggcggcgtggagatcgctgggagcggttgcggcgtgccgggagctgagttatagctgtgacttctgccctgccaggccgcacacaagctggctgacccggtttgtaaaaatggaatttcaagcagtagtgatggcagtaggtggaggatctcggatgacagacctaacttccagcattcccaaacctctgcttccagttgggaacaaacctttaatttggtacccattgaacctgcttgagcgtgttggatttgaagaagtcattgtggttacaaccagggatgttcaaaaggctctatgtgcagaattcaagatgaaaatgaagccagatattgtgtgtattcctgatgacgctgacatgggaactgcagattctttgcgctacatatatccaaaacttaagacagatgtgctggtgctgagctgtgatctgataacagacgttgccttacatgaggttgtggacctgtttagagcttatgatgcatcacttgctatgttgatgagaaaaggccaagatagcatagaacctgttcccggtcaaaaggggaaaaaaaaagcagtggagcagcgtgacttcattggagtggacagcacaggaaagaggctgctcttcatggctaatgaagcagacttggatgaagagctggtcattaagggatccatcctacagaagcatcctagaatacgtttccacacgggtcttgtggatgcccacctctactgtttgaaaaaatacatcgtggatttcctaatggaaaatgggtcaataacttctatccggagtgaactgattccatatttagtgagaaaacagttttcctcagcttcctcacaacagggacaagaagaaaaagaggaggatctaaagaaaaaggagctgaagtccttagatatctacagttttataaaagaagccaatacactgaacctggctccctatgatgcctgctggaatgcctgtcgaggagacaggtgggaagacttgtccagatcacaggtgcgctgctatgtccacatcatgaaagaggggctctgctctcgagtgagcacactgggactctacatggaagcaaacagacaggtgcccaaattgctgtctgctctctgtccagaagaaccaccagtccattcgtcagcccagattgtcagcaaacacctgcattttgggaggctgaggcaggtgcatcacctgaggtcaggagttcgagattagcctggccaacatggtgtaaccccatctctactaaaaatacaaaaaaaaaaaaaattagccaggtgtggtggtgtgcacctgtagtcccagctactcaggaggctgaggcaggagaatggcttgaacccaggaggcagaggttgcagtgagctgag

SEQ ID NO: 24650 - DNA, 1060 bp, Homo sapiens
ccatcgagtttctcggccatcgcgcgcctgcgccattgggctgtcagtcagaggcggcgtggagatcgctgggagcggttgcggcgtgccgggagctgagttatagctgtgacttctgccctgccaggccgcacacaagctggctgacccggtttgtaaaaatggaatttcaagcagtagtgatggcagtaggtggaggatctcggatgacagacctaacttccagcattcccaaacctctgcttccagttgggaacaaacctttaatttggtacccattgaacctgcttgagcgtgttggatttgaagaagtcattgtggttacaaccagggatgttcaaaaggctctatgtgcagaattcaagatgaaaatgaagccagatattgtgtgtattcctgatgacgctgacatgggaactgcagattctttgcgctacatatatccaaaacttaagacagatgtgctggtgctgagctgtgatctgataacagacgttgccttacatgaggttgtggacctgtttagagcttatgatgcatcacttgctatgttgatgagaaaaggccaagatagcatagaacctgttcccggtcaaaaggggaaaaaaaaagcagtggagcagcgtgacttcattggagtggacagcacaggaaagaggctgctcttcatggctaatgaagcagacttggatgaagagctggtcattaagggatccatcctacagaaacatttgagttgctgccacctcttggctattgtgaatagtgctgcagtgaacgtgggtgtacagacatctcttcaagaccttgctttcagttcttttggatatatatttagaagtgggattactggatcatatggtagagaactatgatgtttaattttttgaggaaactacatactgtttccatggcattttcactattttacaatcccaccaacagtgcataagagccccagtttctccacaccagtacttacatggtagctggtctcagatacagaaggaaaagagaattcatttatgttatatcaaaacaaataaaacatctgggcaga

SEQ ID NO: 24651 - DNA, 459 bp, Homo sapiens
aaaactaagatcagtgaaatcacttcctatttgcgaggggaagataacgtccttgataacaacaaatgaaaagtctctctagtctcattgaaaagggttttattttgaagaatgtacaggttaagtattccttatctgaaatgctggggaccagaaatatttccgatttttttttttttagatatttgcattacatacttaacagttgagcatccttaatccccaaatccaaaattctccagtcagcatttcctttgagcatcatgtcattgctcaaaaagtttcagattttggagttttgaatttgggatactcaacttgtattagcttaagtaaaaaaaaaaaaaaaaaaaagcttaagaaacaacctatttcaatgagcttatatacctaggatcaatgtattcctgagtatagtcactgtcaggaattagggaaactacagaaaacataagatgc

SEQ ID NO: 24652 - DNA, 462 bp, Homo sapiens
cgatctccagccgtgatcggaggccatggatactggagtgtctctggagtgacctgattcacccagccctccttctaagaaatgctgtccttctcctctcccctgactagacagtccttgcttcacagcggtggattttctttcgttcccgttcactttcagggatctccccgttaaccagtgaaactgtacatttgttttacagtttgtttactaatgaaaacaggtaacagccggagttggctgacattggaaataggagacaaggtaccttctgcacttttggctattgtactcggctcagatggagacaaaggttgggtacagaccatatctcagtggccacctgagcctaggtgaaaagaattgataggagaggtcaggcctggtggctcacgcctgtaatcccagcactttgggaggctgaggcgggaggatcactggagcccaggagttgaagac

SEQ ID NO: 24653 - DNA, 504 bp, Homo sapiens
gcaaaaaaaagttcacagaagtacctgccaaatgtgccaactgactactatgaactaatttacttttgagaaacatgctatttcttatatgctactgacagtgcctataaaaatggtgcacattaactggctgttttattttctccccaatcttaatatctaatatccacagactgagattagagcaccaacgtatacaatgtaacttcatactagagttagaaggggatacaaagtgtagaaatcataatcttctccataaagttcctgtcaccttggaattaacctcccctttacatagtctcattgttcaccttgttcacatcttcatgggttcaggctcaggtctctgtggtcgcacagtgtgtctttttaccaaaaggaacacctcatgcacttttccaaaaggagaaaagtaaaggtttgaatggatttttagttctcggcatttttgaacagaaataatcaggtattaagttgctcaaagatccccacaagctttca

SEQ ID NO: 24654 - DNA, 1711 bp, Homo sapiens
gcctctgccccagcagtcagccagccgaccgcgcctgctccctcctgcttgcccaaggccgggcaagtcatccccactctgcttcgagaggccccgttttccagcgtgattgcgccgacactgctctgtgggtttctcttcttggcgtgggttgctgctgaggttccagaggagagcagcaggatggccgggagcggagccaggagtgaggaaggccgccggcagcatgccttcgtcccggaaccttttgatggggccaatgtcgtcccaaacctctggctgcacagctttgaagtcatcaatgacctcaaccattgggaccatatcaccaagctaaggttcctgaaagagtccctcagaggagaggccctgggtgtctacaataggctcagtccccaggaccagggagactatgggactgtgaaagaggccctcctgaaggcctttggggtccctggggctgcccccagccacctgcccaaagagatcgtctttgccaacagcatgggtaagggctactatctcaaggggaagattggcaaagtgcccgtgaggttcctggtggactctggggcccaggtctctgtggtccacccaaacttgtgggaggaggtcactgatggcgatctggacaccctgcagccctttgagaatgtggtaaaggtggccaatggtgctgaaatgaagatcctgggtgtctgggatacagcggtgtccctaggcaagctgaagctgaaggcacagttcctagtggccaatgcgagtgccgaggaagccatcattggcactgatgtgctccaggaccacaatgctatcctggactttgagcaccgcacatgcaccctgaaagggaagaagtttcgccttctgcctgtgggagggtccctggaagatgagtttgacctggagctcatagaggaggacccctcctcagaagaagggcggcaggagctatcccactgagaagccaccttttctttaacctcctaaatattggtgggaagacccaccgctgtggggggggttgcatatcctcatgggggtcactgggcttggccagtctgcttatcaactcttgctcttctctcccctttgcctccctctgcaggggccttaatctgcccctggtaggggaggcttccactgaacaggcacaggtgagggagagcaggctggcttagagggacagggtccccatggtcatcaagctgctgttgatgacaaagactcaaaggctggaagagctcccaaggaagctagaaatgcttgtctttgaaagaactgtgggaccccttcagattccctgaggtatggcttggtcactctcaggtcctcaaagcctgtcttagttgggctgggtcctagctgcagggtctttgtgagggtcacagttgctctgggacacctccctgaagagcctttccacctgtacaatcgtattttctttctgtcatttgctttgaagcccattgtgccttatgccaataattcaattgctgcaaacaccaataaagattgattcatggaaaaaccatgtaatgtgttgattgaggatgagaggaatgtgagagggagtcagcatcaaagacaagggagattcacatgtctactgagtgcctagctggaggtataagaacatatacacagggatgacaggtcttggattttctaagacagtctcagcataaaatattttgacttattccctcca

SEQ ID NO: 24655 - DNA, 196 bp, Homo sapiens
gaaccctgggcctgagataaatcttgaagagaattgatggggcagtggatcaataggtaatgtataaagaaatcggaacatatggcccatcccactctgtcatcttcaccgtcctcctgggcccccattctcgtggctgtgcgggcagttgccctagtgcatgcacacacggtcctgcctgtgtgcatgtgtgcat

SEQ ID NO: 24656 - DNA, 220 bp, Homo sapiens
ttttagttataagctgcacagcctagaaatcccatttgtccaagtgacatggattgaatgctcagtgctgtgtgggataccaaaggagacaccaccacgccagttcttgagaaattcacaggctggctgagcacaagctcaaacagaggataggaggtgcaattaattggtagcttgctgtttcggaccataaaaattttaaagattcagaaaaagtgtg

SEQ ID NO: 24657 - DNA, 432 bp, Homo sapiens
aggaagaagaaaccccttcaagtcaaaattgccctagtgtaccttctactcattctgccggcagggccagctcccaaagtggatgaagatgaagaagcactaaagcagttggctgagtgggtatcctgataaatctgggcttgtcttcctaatgctacctttgttggtcctttcttccttaagtgccaagtgctgagctaaaggaggataactttttggggaagtcatgctgagggtggtagtgtgaccctgcctgaaaaaagggtctcttaccctcccagccctggctcaactctgaagaaggatcttgctacagaaggagcccttgggctcccttctctttgatagcagttataatgcccttgttcccaataaaactgggcagatggaatcctagtgtctatactgccttgtctacccctgaaaatgttc

SEQ ID NO: 24658 - DNA, 262 bp, Homo sapiens
gcggccgcctactactactactgctcgaattcaagcttctaacgatgtacggggtcatgctgagggtggtagtgtgaccctgcctgaaaaaagggtctcttaccctcccagccctggctcaactctgaagaaggatcttgctacagaaggagcccttgggctcccttctctttgatagcagttataatgcccttgttcccaataaaactgggcagatggaatcctagtgtctatactgccttgtctacccctgaaaatgttc

SEQ ID NO: 24659 - DNA, 598 bp, Homo sapiens
ctatacagtcttttttttttaaacaaatttccatcatttcattacattcatgaaatattttgtcaagtggtatagttctcaatttttagcacacctgcgagtaccagaaatactgaacaggtacagttgccataagttatcttaagaagtttgatttaggtctgtcgcagtggctcatgcctgtgagtccagcgctttgggaggccaaggtgggaggatcacttgagcccaggagtctgagaccagcctaagcaacatagcaagacccccatctctaccaaaaagaaaaaaaaaattagccaggtgtggtggtgcacacctgtagtcccagctactcgggaggctgaggtaggaggatcacttgagcccaggagattgaggctgcagtgagctgtgatcacactgctgcactctagcctgggtgacagagactgtctcaaaaaacaaacaaaacaacaaagaagtttaaaatgttacctaacccatgtctaaattttaagtaggcatactgcagatagacactgaaactagtattccctcagtctgaacactggttcaccccaacatacccagtgacctcgctggcctacagcacatg

SEQ ID NO: 24660 - DNA, 2183 bp, Homo sapiens
  misc_feature (917)..(917): n is a, c, g, or t
  misc_feature (937)..(937): n is a, c, g, or t
  misc_feature (1016)..(1016): n is a, c, g, or t
  misc_feature (1106)..(1106): n is a, c, g, or t
  misc_feature (1146)..(1146): n is a, c, g, or t
  misc_feature (1209)..(1209): n is a, c, g, or t
  misc_feature (1225)..(1225): n is a, c, g, or t
  misc_feature (1230)..(1230): n is a, c, g, or t
  misc_feature (1291)..(1291): n is a, c, g, or t
  misc_feature (1369)..(1369): n is a, c, g, or t
  misc_feature (1518)..(1518): n is a, c, g, or t
  misc_feature (2139)..(2139): n is a, c, g, or t
gtccaggctggtctcgaacccttgagctcaagcaatccacctaccttggcctcccaaagtgctgggattacagccacaagccactgtgcctggctgcaatttatttcttaataaaataaactagttctagtaatatgcattgttccctaattttttttagaatagaacagttcatcatgtttatctcaaacttctagctccagttaggaagaccaagaaattacttaaggaagcttaagctgatgttagccagattggaaggaaaaccacgacccataagtaaatgcattctaaaccccatcctaactatctttgtccacagaggtggggttaatgctttatggcaggggccttttacctactttatttaatgaaaaacaggaagaaaaacttctgaaataggagtgtgttggtgaatttacgctgcaacccacataattcgaaaaatgattccatacctaacagagtacttttcctgatttactcctttagaagcttgaattacagccaggttgtatggaaatacaggttgagtgtcttaccttaggtatccaaaagcctgtaatctactcaaaagaaacattagtgagttggaattcaaataatccttttctattgttattttttgttacacacaaggcacatctgaaagcacaagagctcagtgttctagttgtgttataataatgaggtcacaagtcctgtactacgatgaggtaggagtgtgtgaaataccatggtggttaaaagcatgggctttggggtggagccaagatggccgaatacgaacagctccagtctacagctgccagtgtgagcgacgcagaagacgggtgatttctgcatttcccactgaggtaccgggttcatctcactggggagtgtcagaaagtgggtgcaggacagtgggcgcagcncaccgagcgtgagccgaagnagggcgaggcatcgcctcacccgggaagcgcaaggggtcagggagtaccctttcctagtcaaagaaggggtgacagacngcacttggaaaatcgggtcactcccaccctaatactgctcatttccaatggtcttagcaaacggcacaccaggagattatatcccacgcntggctctgagggtcctatgcccacggagcctcgctcattnctagcacagcagtctgagatcaaactgcaaggcagcagcgaggctaggggaggggcgccaacnattgccgaggcttgantaggnaaacaaagtggccatgaagctcgaactgggtggagcccaccgcagctcaaggaggcctgcntgcctctgtagactccacatctgggggcagggcacagccaaacaaaaggcagcagaaagctctgcaaacttaaatgtncctgtctgacaggcttgaagagagtaatggttctcccagcacacagctggacatctgagaatggacagactgcctcaagtgggtccctgacccccgagtagcctaactgggaggtatcccccagtacaggcagatggacacctcacacngccaggtactcctctgagacaaaacttccagactaatgatcaggcagcaacatctgctgttcaccaatatccgctgttctgcagcctccgctgctgatacccaggcaaacggtctggagtagacctccagcaaactccaacagacctgcagctgagggtcctgactgttagaaggaagactaacaaacagaaaggacatccacacaaaaaccccatctgtacgtcaccatcatcaaagaccaaaggtagataaaaccacaaagatggggaaaaaaacagagcagaaaaactggaaactctcaaaatcagagcgcctctcctcctctagaggaacgcggctcctcaccagtaacggaacaaagctggatggagaatgactttgacgagttgagagaagaaggcttcagacaatcaaactactctgagctaaaggaggaagtttgaacccatggcaaagaagttaaaaaccttgaaaaaaaattagatgaatggctaactagaataatcaatgcagagaagtccttaaaggacctgatggagctgaaaaccaaggcatgagaactatgtgacgaatgcacaagcctcagtagctgattcgatcaactggaagaaagggtatcngtgatggaagatgaaatgaatgaaatgaagcaagaagtttagag

SEQ ID NO: 24661 - DNA, 426 bp, Homo sapiens
tagaagcatcaaaagaaaaaatcatgttacttaaaaggaaaattacagttaaactgccagcagatttgtcaacaaaaagaaatagaagttagtagaataatagacgcaaagtattaagagaacattactgtcaatctagaatttaataataaaggcaaaacaaaattttactaacacaaatactaacaaaaactgagggcaaagaaacaacaaggtgaataacaagatgaaataaacacttaaacattttatgtaacatgccagagggtgatttaaagatttctgaagcctcggctgggtgcggtggctcacgcctgtaatcccagcactttgggaggctgaagcgggtggatcacaaggtgaggagattgagaccatactggctaacatggtgaaaccccgtctctactaaaaatacaaaaaaaa

SEQ ID NO: 24662 - DNA, 266 bp, Homo sapiens
agccacaggaagtaataaagctcaataattggaacagtaatgatattagctaccttttactgtgtgctcacttatgagcccaggtcctctgccagacacattctgttcatcatctctttcgtcatcacagcaaaccattttatagatgaggaaactgaagcttagagaagtaacttgcccaaaagtaaccagatctacactcctcagctccctgacacatccccactgcctcctgctactgtctgttttccttctttttcatcagc

SEQ ID NO: 24663 - DNA, 464 bp, Homo sapiens
ctccttgtagctctgtctaactccatggcacagctaatgcacctcatcataaaaacactgggctgggtatggtggctaatgcctgtaatcccaacactttgggaggccaaggcaggaggatcacttgaagccaggaatttgaaaccagcctgggcaacatagtgaaaccctgtctctacaaaagaataaaaaatgagctgggtatggtggtatgtgcctgtaaccccagccacttggggggctgaggtgggaggattacttgagcctgggcggtcaaggctacaatgagctgtgactgcatcactatgttacagtgagaccctctctcaggaaagaataaaaataaaaaacaacatctggtccatggattccatcaaacaagtgctattcctttttgtcttgtcataaaaactctctatcagtggatgctttctgcacgtccatttgctaatagtttcctgttc

SEQ ID NO: 24664 - DNA, 668 bp, Homo sapiens
caaggattctggtgttcctcaaatgtcttccacaggaactgtgcatatcacagttatagaccaaaatgacaatccttcacagtctcggacggtggagatatttgttaattattatggtaacttgtttcccggtgggattttaggctctgtgaagccacaggatccagatgtgttagacagcttccactgctcccttacttcaggagttaccagcctcttcagtattccagggggtacttgtgatctgaattcccagccaaggtccacagatggcacgtttgatctgactgtccttagcaatgatggagttcacagcacagtcacgagcaacatccgagttttctttgctggattttccaatgccacagtggataacagcatcttacttcgtctcggcgtaccaacagtaaaggacttcttgaccaaccactatcttcattttttacgcattgccagctcacagctgacaggcttagggactgctgtgcaactgtacagtgcatatgaagagaacaatagaacgtttcttttggcagctgtgaagcgaaatcataatcagtatgtgaatcccagtggcgtagccaccttctttgaaagcatcaaagagatccttctccggcagagtggagtaaaggtggaatctgtggatcatgactcctgtgtgcatg

SEQ ID NO: 24665 - DNA, 276 bp, Homo sapiens
caaagacaaacatgagctgaggctgttgaaacatgaaacctaagaattactttaaaaccttttagtgaaatccatagttgggtgaattaaggggaaagaaaaaagaataaaggtcacataaaacagaactgtgcagtgacatcggagcagaattaactgacagttgagccttagtttggaaaagaaaaaaaatcaagataattaaagcagagaaatgtgacgaggcagtaagtagtaacaggttttcaggcctaaacaaaaaatagttttcagcgt

SEQ ID NO: 24666 - DNA, 641 bp, Homo sapiens
  misc_feature (30)..(30): n is a, c, g, or t
tccctgcgatttatctgggaggtgtcaccnagcaacaggagaagcacagaaggctctggaatgtttttgtcaggcagcatctgaagtaggcaaagaggaattcttggatcgcttgattcgctcagaggatggggagatcgtgtctacccccaggctgcagtattatgacaaggttttacgactactagatgtcattggtttgcctgaactggttattcagttggctacatcagccataactgaagcaggtgatgactggaaaagtcaggctactctaaggacatgtattttcaaacatcatttggatttgggtcacaatagccaagcatatgaagccttaacccaaattcctgattccagcaggcaattagattgtttacggcagttggtggtagttctttgtgaacgctcacagctacaggatcttgtagagtttccctatgtgaatctgcataatgaggttgtgggaataattgagtcacgtgctagagctgtggaccttatgactcacaattactatgaacttctgtatgcctttcacatctatcgccacaattaccgcaaggctggcacagtgatgttgtagtatggatgcggctgccagagagtcgactctccgggactgcgccagcgtacggcct

SEQ ID NO: 24667 - DNA, 605 bp, Homo sapiens
tgatatcagaataaaatactgattttcacagttaaattgcttgttttgttttatcagtatgatcgccctggagcatcccctaagaggaatcatgatggagaatgcacagctgcccccagtgagtcaggagtctcacactggttctttgctagacagtagtaatgttgttattgttagttgtattatgatagaaatatgtagttaaataagctacatataatagtaatatataaatgttatagtagtaacagttgcccttgtaaaacacaagttttaactgcaggcacctattatacacagatttttgttttcaataagtatattggattctttttctggagattgtcacaatttgaaaaaactcccagttgaaccacatagcctagaaatattgaaaaagttaaggaagccgggtgtggtggctcacacctgtaatcccagcaccttgggaggccgaggcaggtggatcacctgaggtcaggtgttcaagaccagcctggtcagtgtggcgaaaccccatctctactaaaaatacaaaaattagctgggcagtagtggccctcacctgtaatcccagctactcaggaggcttgaggcaggagaat

SEQ ID NO: 24668 - DNA, 5191 bp, Homo sapiens
agccggccactggaaggttcccgcagatagagtctgcctcccctgcccccttctcttctggattcctcgctgcccaccctcattctcccggtggaagcctcgcaacgaagggccggagccgcctttctgctcccggaatgcttcacctgtccgcagctccgcccgccccacccccggaagtgacggcgaccgcgcggccctgcctttgttccgttgggcgtcgcggcgacggcgggaagatggcggcggcgggagccctggaacggagcttcgtggagctaagcggagctgagcgcgaaaggccgaggcactttcgggaattcacagtctgcagcattgggactgcaaatgccgtggctggcgccgtaaaatacagtgaaagcgcgggaggcttttactacgtggagagtggcaagttgttctccgtaaccagaaacaggttcattcattggaagacctctggagatacattggagctgatggaggagtcactggacataaatctgttgaataatgccattcgcctaaaattccaaaattgcagtgttttacctggaggggtttatgtctctgagactcagaatcgtgtgataatcttgatgttaaccaatcaaacagtgcacaggttacttttaccacacccctcccggatgtataggagtgagttggtagttgacagtcagatgcagtcaatattcactgacattggaaaagttgatttcacagatccttgcaactatcagttaattccagcagtacctggaatatctcctaattccaccgcctctacagcctggctcagcagtgatggggaggccctgtttgccttaccatgtgcttctgggggaatctttgttcttaagctacctccttatgacatacctggtatggtgtcagtcgtggaactgaaacagagttcagtaatgcaacgattgcttacaggctggatgccaacagctatcaggggtgaccagtcgccttcagatcgtcccctcagtcttgctgttcattgtgtggagcatgatgccttcatctttgctttgtgtcaggatcataaactacgaatgtggtcttacaaggagcaaatgtgcctaatggtagctgacatgctggagtatgtccctgtgaagaaagaccttcggcttactgctggaactggacacaaattacggcttgcttattcccccaccatgggactctacctggggatatacatgcatgcaccaaaacgaggacagttctgcattttccagttggtgagcactgagagtaatcgctatagtctcgatcatatttcttcactgttcacttctcaggagacactgattgactttgccttaacttccacggatatctgggccctgtggcatgatgctgagaaccaaacagtagtgaaatacatcaactttgaacataatgttgcaggtcagtggaatccagtttttatgcagcctctgccagaggaagagattgtcatcagagatgatcaagaccccagagagatgtatctgcaaagtctttttacaccaggacaattcacaaatgaagctttatgtaaggctttacagattttctgccgaggaactgagaggaatttggatctttcctggagtgaactgaagaaagaagttactttagctgttgaaaatgagcttcaaggaagtgtaacagagtatgaattctcccaggaggagtttcgaaatttacaacaagaattctggtgcaagttctatgcctgttgtcttcagtatcaagaagccctctctcaccctcttgccctacatttgaatccacacacaaacatggtgtgcctgctgaaaaaagggtacctgtctttccttattccctcatccttagtggatcatttgtatctcctgccttatgagaaccttttgacagaagatgagacaaccatatctgatgatgtggatatcgctcgggatgtcatatgtcttataaaatgcctccggctgattgaagagtcagtaactgtggatatgtcagttataatggaaatgagttgttataacctacagtctccggaaaaggctgcagagcagattctggaagatatgatcactattgatgtagaaaatgtgatggaggatatttgtagtaaactgcaagagattaggaacccaatccatgcaattggactacttatacgggaaatggattatgaaacagaagtggaaatggaaaagggattcaatccagctcagcctttgaatattcgaatgaatcttacccagctctatggtagtaacacagcagggtatattgtgtgcagaggggtgcataaaatcgccagtactcgtttcctgatctgcagagatcttttgatcttacagcagctgttaatgaggcttggagatgctgtgatttggggaactggtcagctctttcaagctcagcaagacctactacatcgaacagctcccctactcttatcttattacctcattaaatggggaagtgagtgcttggcaactgatgttccacttgacacactggagtctaatctccaacacttatcagtactggaattaacagactctggtgctttaatggcaaataggtttgtatctagtcctcagactattgtggagttattcttccaagaagttgcaagaaaacacattatatctcacctcttctctcagccaaaggcacctctgagccaaactggattgaattggcctgaaatgattactgcaattaccagttatttattgcagcttttatggcctagcaatcctggttgtctctttctagaatgtttgatgggaaattgccaatatgtacaattgcaggattatattcaactgctacatccctggtgtcaagtcaatgttggttcctgtcgatttatgctgggaaggtgttacctagttacaggagaaggacagaaggctctggaatgtttttgtcaggcagcatctgaagtaggcaaagaggaattcttggatcgcttgattcgctcagaggatggggagatcgtgtctacccccaggctgcagtattatgacaaggttttacgactactagatgtcattggtttgcctgaactggttattcagttggctacatcagccataactgaagcaggtgatgactggaaaagtcaggctactctaaggacatgtattttcaaacatcatttggatttgggtcacaatagccaagcatatgaagccttaacccaaattcctgattccagcaggcaattagattgtttacggcagttggtggtagttctttgtgaacgctcacagctacaggatcttgtagagtttccctatgtgaatctgcataatgaggttgtgggaataattgagtcacgtgctagagctgtggaccttatgactcacaattactatgaacttctgtatgcctttcacatctatcgccacaattaccgcaaggctggcacagtgatgtttgagtatggaatgcggcttggcagagaagttcgaactctccggggacttgagaaacaaggcaactgttatctggctgctctcaattgtttacgacttattcgtccagaatatgcgtggattgtgcagccagtgtctggtgcagtgtatgatcgccctggagcatcccctaagaggaatcatgatggagaatgcacagctgcccccacaaatcgacaaattgaaatcctggaactggaagatctggagaaagagtgttccttggctcgcatccgcctcactttggctcagcatgatccatcagcggttgcagttgctggaagttcatcagcagaggaaatggtcactctcttggttcaggcgggcctctttgacactgccatatcactctgtcagacttttaagcttcccttaacgccagtctttgaagggcttgccttcaaatgcatcaaattgcaatttggaggagaggcagcacaagcagaagcctgggcctggctagcagccaatcagctctcatctgtcatcactactaaggagtctagtgctacagatgaagcatggcgactattatccacttacctggagaggtacaaagtccagaataacttgtatcaccactgtgtaatcaacaagctcttgtctcatggagtgcctctgcctaattggcttataaacagttacaaggactaccagcaaaaagttgataaggcaacacgggatttattatatcgtcggaccttgtgatttggattgtcacctagcctttgtaaccgcttggtgcctcttaggacttaagactaccctacaggaaccctgtactcaaggccgatttttgtaactgtaaatgatgtgtacaacattcaagtctgcattctgcacaagataggagggcggaagagtcagaggaccctgtgcttgctggtggtgctaacacaatttctggtgttcaaccttggtctcaaatagctgcttttgtatatgattcacgagcttttttagagtttatatttttttaaactaccgaagacattcattatctgcaaattaagactcaccttcactttccaaaatagctgagggttgttggcttgttgtagctgaccaccaaaagcagtcactgcaaatcttttaattcttccctatcaccttttgtattttaatgcaattattttggtccagaactgacctgtattttctgtattgtacacaaaagctaataattttgtgtactttttatttattttggaggttttatatgatcttcaattgagtattaaataatttgcctagattaagcctaaaatgatgaccagctaattaaagaagatattttgaatctggttctgagctaaagttgagtaaattcttagctaagaaaaaattggaaatccatcatctatattagcaacagattctcagagtaaattgttaacttctatgatttatgataatcaagctggacttgatcatacaagttagtctcataatgtattggaccaaaatgtaaacttcattggtcagatttagaagcattcatgctcacaagttttgggaaagtgaaaaataataaaatcatcttggattttattctgtatattaaaatttatcttttaaggaaacaatctgtatactacttgcttgtatagccttttgacccttcttgagtttttcagaagcctttaatttttatactttcaataccatatttacattatatactttaattaacaatgtgagtttctctgtga

SEQ ID NO: 24669 - DNA, 5241 bp, Homo sapiens
agccggccactggaaggttcccgcagatagagtctgcctcccctgcccccttctcttctggattcctcgctgcccaccctcattctcccggtggaagcctcgcaacgaagggccggagccgcctttctgctcccggaatgcttcacctgtccgcagctccgcccgccccacccccggaagtgacggcgaccgcgcggccctgcctttgttccgttgggcgtcgcggcgacggcgggaagatggcggcggcgggagccctggaacggagcttcgtggagctaagcggagctgagcgcgaaaggccgaggcactttcgggaattcacagtctgcagcattgggactgcaaatgccgtggctggcgccgtaaaatacagtgaaagcgcgggaggcttttactacgtggagagtggcaagttgttctccgtaaccagaaacaggttcattcattggagttggtagttgacagtcagatgcagtcaatattcactgacattggaaaagttgatttcacagatccttgcaactatcagttaattccagcagtacctggaatatctcctaattccaccgcctctacagcctggctcagcagtgatggggaggccctgtttgccttaccatgtgcttctgggggaatctttgttcttaagctacctccttatgacatacctggtatggtgtcagtcgtggaactgaaacagagttcagtaatgcaacgattgcttacaggctggatgccaacagctatcaggggtgaccagtcgccttcagatcgtcccctcagtcttgctgttcattgtgtggagcatgatgccttcatctttgctttgtgtcaggatcataaactacgaatgtggtcttacaaggagcaaatgtgcctaatggtagctgacatgctggagtatgtccctgtgaagaaagaccttcggcttactgctggaactggacacaaattacggcttgcttattcccccaccatgggactctacctggggatatacatgcatgcaccaaaacgaggacagttctgcattttccagttggtgagcactgagagtaatcgctatagtctcgatcatatttcttcactgttcacttctcaggagacactgattgactttgccttaacttccacggatatctgggccctgtggcatgatgctgagaaccaaacagtagtgaaatacatcaactttgaacataatgttgcaggtcagtggaatccagtttttatgcagcctctgccagaggaagagattgtcatcagagatgatcaagaccccagagagatgtatctgcaaagtctttttacaccaggacaattcacaaatgaagctttatgtaaggctttacagattttctgccgaggaactgagaggaatttggatctttcctggagtgaactgaagaaagaagttactttagctgttgaaaatgagcttcaaggaagtgtaacagagtatgaattctcccaggaggagtttcgaaatttacaacaagaattctggtgcaagttctatgcctgttgtcttcagtatcaagaagccctctctcaccctcttgccctacatttgaatccacacacaaacatggtgtgcctgctgaaaaaagggtacctgtctttccttattccctcatccttagtggatcatttgtatctcctgccttatgagaaccttttgacagaagatgagacaaccatatctgatgatgtggatatcgctcgggatgtcatatgtcttataaaatgcctccggctgattgaagagtcagtaactgtggatatgtcagttataatggaaatgagttgttataacctacagtctccggaaaaggctgcagagcagattctggaagatatgatcactattgatgtagaaaatgtgatggaggatatttgtagtaaactgcaagagattaggaacccaatccatgcaattggactacttatacgggaaatggattatgaaacagaagtggaaatggaaaagggattcaatccagctcagcctttgaatattcgaatgaatcttacccagctctatggtagtaacacagcagggtatattgtgtgcagaggggtgcataaaatcgccagtactcgtttcctgatctgcagagatcttttgatcttacagcagctgttaatgaggcttggagatgctgtgatttggggaactggtcagctctttcaagctcagcaagacctactacatcgaacagctcccctactcttatcttattacctcattaaatggggaagtgagtgcttggcaactgatgttccacttgacacactggagtctaatctccaacacttatcagtactggaattaacagactctggtgctttaatggcaaataggtttgtatctagtcctcagactattgtggagttattcttccaagaagttgcaagaaaacacattatatctcacctcttctctcagccaaaggcacctctgagccaaactggattgaattggcctgaaatgattactgcaattaccagttatttattgcagcttttatggcctagcaatcctggttgtctctttctagaatgtttgatgggaaattgccaatatgtacaattgcaggattatattcaactgctacatccctggtgtcaagtcaatgttggttcctgtcgatttatgctgggaaggtgttacctagttacaggagaaggacagaaggctctggaatgtttttgtcaggcagcatctgaagtaggcaaagaggaattcttggatcgcttgattcgctcagaggatggggagatcgtgtctacccccaggctgcagtattatgacaaggttttacgactactagatgtcattggtttgcctgaactggttattcagttggctacatcagccataactgaagcaggtgatgactggaaaagtcaggctactctaaggacatgtattttcaaacatcatttggatttgggtcacaatagccaagcatatgaagccttaacccaaattcctgattccagcaggcaattagattgtttacggcagttggtggtagttctttgtgaacgctcacagctacaggatcttgtagagtttccctatgtgaatctgcataatgaggttgtgggaataattgagtcacgtgctagagctgtggaccttatgactcacaattactatgaacttctgtatgcctttcacatctatcgccacaattaccgcaaggctggcacagtgatgtttgagtatggaatgcggcttggcagagaagttcgaactctccggggacttgagaaacaaggcaactgttatctggctgctctcaattgtttacgacttattcgtccagaatatgcgtggattgtgcagccagtgtctggtgcagtgtatgatcgccctggagcatcccctaagaggaatcatgatggagaatgcacagctgcccccacaaatcgacaaattgaaatcctggaactggaagatctggagaaagagtgttccttggctcgcatccgcctcactttggctcagcatgatccatcagcggttgcagttgctggaagttcatcagcagaggaaatggtcactctcttggttcaggcgggcctctttgacactgccatatcactctgtcagacttttaagcttcccttaacgccagtctttgaagggcttgccttcaaatgcatcaaattgcaatttggaggagaggcagcacaagcagaagcctgggcctggctagcagccaatcagctctcatctgtcatcactactaaggagtctagtgctacagatgaagcatggcgactattatccacttacctggagaggtacaaagtccagaataacttgtatcaccactgtgtaatcaacaagctcttgtctcatggagtgcctctgcctaattggcttataaacagttacaagaaggttgatgctgctgaattgcttcgtttatacttaaactatgaccttttagaagaagctgtggatttggtgtcagaatatgtggatgctgtattgggaaaaggacatcaatacttcggaattgagtttccactgtccgcaacagccccaatggtgtggcttccatactcctctattgatcagcttctccaagctctgggagagaacagtgccaacagtcacaacatcgcactgtcccagaaaatacttgacaaattggaggactaccagcaaaaagttgataaggcaacacgggatttattatatcgtcggaccttgtgatttggattgtcacctagcctttgtaaccgcttggtgcctcttaggacttaagactaccctacaggaaccctgtactcaaggccgatttttgtaactgtaaatgatgtgtacaacattcaagtctgcattctgcacaagataggagggcggaagagtcagaggaccctgtgcttgctggtggtgctaacacaatttctggtgttcaaccttggtctcaaatagctgcttttgtatatgattcacgagcttttttagagtttatatttttttaaactaccgaagacattcattatctgcaaattaagactcaccttcactttccaaaatagctgagggttgttggcttgttgtagctgaccaccaaaagcagtcactgcaaatcttttaattcttccctatcaccttttgtattttaatgcaattattttggtccagaactgacctgtattttctgtattgtacacaaaagctaataattttgtgtactttttatttattttggaggttttatatgatcttcaattgagtattaaataatttgcctagattaagcctaaaatgatgaccagctaattaaagaagatattttgaatctggttctgagctaaagttgagtaaattcttagctaagaaaaaattggaaatccatcatctatattagcaacagattctcagagtaaattgttaacttctatgatttatgataatcaagctggacttgatcatacaagttagtctcataatgtattggaccaaaatgtaaacttcattggtcagatttagaagcattcatgctcacaagttttgggaaagtgaaaaataataaaatcatcttggattttattctgtatattaaaatttatcttttaaggaaacaatctgtatactacttgcttgtatagccttttgacccttcttgagtttttcagaagcctttaatttttatactttcaataccatatttacattatatactttaattaacaatgtgagtttctctgtga

SEQ ID NO: 24670 - DNA, 5712 bp, Homo sapiens
agccggccactggaaggttcccgcagatagagtctgcctcccctgcccccttctcttctggattcctcgctgcccaccctcattctcccggtggaagcctcgcaacgaagggccggagccgcctttctgctcccggaatgcttcacctgtccgcagctccgcccgccccacccccggaagtgacggcgaccgcgcggccctgcctttgttccgttgggcgtcgcggcgacggcgggaagatggcggcggcgggagccctggaacggagcttcgtggagctaagcggagctgagcgcgaaaggccgaggcactttcgggaattcacagtctgcagcattgggactgcaaatgccgtggctggcgccgtaaaatacagtgaaagcgcgggaggcttttactacgtggagagtggcaagttgttctccgtaaccagaaacaggttcattcattggaagacctctggagatacattggagctgatggaggagtcactggacataaatctgttgaataatgccattcgcctaaaattccaaaattgcagtgttttacctggaggggtttatgtctctgagactcagaatcgtgtgataatcttgatgttaaccaatcaaacagtgcacaggttacttttaccacacccctcccggatgtataggagtgtaagttggctaagtgcaatatcttttatttcccaaattactctgggtgtcacaaatgtagtgctggagcgatgtcttttggaattgaaggaaatttggattctcgttatccctcaccaagcatactttgatagctaccgcttaaaatgatcaggcatacattttaagttgagaattagttttcattaagaagaatagctttcttaaacttgacagttttttactttaaaaacttttttagcaatagagaggaactgagcaaaattctggttattttgatttaatagatttttctttttaattactcaacaggagttggtagttgacagtcagatgcagtcaatattcactgacattggaaaagttgatttcacagatccttgcaactatcagttaattccagcagtacctggaatatctcctaattccaccgcctctacagcctggctcagcagtgatggggaggccctgtttgccttaccatgtgcttctgggggaatctttgttcttaagctacctccttatgacatacctggtatggtgtcagtcgtggaactgaaacagagttcagtaatgcaacgattgcttacaggctggatgccaacagctatcaggggtgaccagtcgccttcagatcgtcccctcagtcttgctgttcattgtgtggagcatgatgccttcatctttgctttgtgtcaggatcataaactacgaatgtggtcttacaaggagcaaatgtgcctaatggtagctgacatgctggagtatgtccctgtgaagaaagaccttcggcttactgctggaactggacacaaattacggcttgcttattcccccaccatgggactctacctggggatatacatgcatgcaccaaaacgaggacagttctgcattttccagttggtgagcactgagagtaatcgctatagtctcgatcatatttcttcactgttcacttctcaggagacactgattgactttgccttaacttccacggatatctgggccctgtggcatgatgctgagaaccaaacagtagtgaaatacatcaactttgaacataatgttgcaggtcagtggaatccagtttttatgcagcctctgccagaggaagagattgtcatcagagatgatcaagaccccagagagatgtatctgcaaagtctttttacaccaggacaattcacaaatgaagctttatgtaaggctttacagattttctgccgaggaactgagaggaatttggatctttcctggagtgaactgaagaaagaagttactttagctgttgaaaatgagcttcaaggaagtgtaacagagtatgaattctcccaggaggagtttcgaaatttacaacaagaattctggtgcaagttctatgcctgttgtcttcagtatcaagaagccctctctcaccctcttgccctacatttgaatccacacacaaacatggtgtgcctgctgaaaaaagggtacctgtctttccttattccctcatccttagtggatcatttgtatctcctgccttatgagaaccttttgacagaagatgagacaaccatatctgatgatgtggatatcgctcgggatgtcatatgtcttataaaatgcctccggctgattgaagagtcagtaactgtggatatgtcagttataatggaaatgagttgttataacctacagtctccggaaaaggctgcagagcagattctggaagatatgatcactattgatgtagaaaatgtgatggaggatatttgtagtaaactgcaagagattaggaacccaatccatgcaattggactacttatacgggaaatggattatgaaacagaagtggaaatggaaaagggattcaatccagctcagcctttgaatattcgaatgaatcttacccagctctatggtagtaacacagcagggtatattgtgtgcagaggggtgcataaaatcgccagtactcgtttcctgatctgcagagatcttttgatcttacagcagctgttaatgaggcttggagatgctgtgatttggggaactggtcagctctttcaagctcagcaagacctactacatcgaacagctcccctactcttatcttattacctcattaaatggggaagtgagtgcttggcaactgatgttccacttgacacactggagtctaatctccaacacttatcagtactggaattaacagactctggtgctttaatggcaaataggtttgtatctagtcctcagactattgtggagttattcttccaagaagttgcaagaaaacacattatatctcacctcttctctcagccaaaggcacctctgagccaaactggattgaattggcctgaaatgattactgcaattaccagttatttattgcagcttttatggcctagcaatcctggttgtctctttctagaatgtttgatgggaaattgccaatatgtacaattgcaggattatattcaactgctacatccctggtgtcaagtcaatgttggttcctgtcgatttatgctgggaaggtgttacctagttacaggagaaggacagaaggctctggaatgtttttgtcaggcagcatctgaagtaggcaaagaggaattcttggatcgcttgattcgctcagaggatggggagatcgtgtctacccccaggctgcagtattatgacaaggttttacgactactagatgtcattggtttgcctgaactggttattcagttggctacatcagccataactgaagcaggtgatgactggaaaagtcaggctactctaaggacatgtattttcaaacatcatttggatttgggtcacaatagccaagcatatgaagccttaacccaaattcctgattccagcaggcaattagattgtttacggcagttggtggtagttctttgtgaacgctcacagctacaggatcttgtagagtttccctatgtgaatctgcataatgaggttgtgggaataattgagtcacgtgctagagctgtggaccttatgactcacaattactatgaacttctgtatgcctttcacatctatcgccacaattaccgcaaggctggcacagtgatgtttgagtatggaatgcggcttggcagagaagttcgaactctccggggacttgagaaacaaggcaactgttatctggctgctctcaattgtttacgacttattcgtccagaatatgcgtggattgtgcagccagtgtctggtgcagtgtatgatcgccctggagcatcccctaagaggaatcatgatggagaatgcacagctgcccccacaaatcgacaaattgaaatcctggaactggaagatctggagaaagagtgttccttggctcgcatccgcctcactttggctcagcatgatccatcagcggttgcagttgctggaagttcatcagcagaggaaatggtcactctcttggttcaggcgggcctctttgacactgccatatcactctgtcagacttttaagcttcccttaacgccagtctttgaagggcttgccttcaaatgcatcaaattgcaatttggaggagaggcagcacaagcagaagcctgggcctggctagcagccaatcagctctcatctgtcatcactactaaggagtctagtgctacagatgaagcatggcgactattatccacttacctggagaggtacaaagtccagaataacttgtatcaccactgtgtaatcaacaagctcttgtctcatggagtgcctctgcctaattggcttataaacagttacaagaagaagctgtggatttggtgtcagaatatgtggatgctgtattgggaaaaggacatcaatacttcggaattgagtttccactgtccgcaacagccccaatggtgtggcttccatactcctctattgatcagcttctccaagctctgggagagaacagtgccaacagtcacaacatcgcactgtcccagaaaatacttgacaaattggaggactaccagcaaaaagttgataaggcaacacgggatttattatatcgtcggaccttgtgatttggattgtcacctagcctttgtaaccgcttggtgcctcttaggacttaagactaccctacaggaaccctgtactcaaggccgatttttgtaactgtaaatgatgtgtacaacattcaagtctgcattctgcacaagataggagggcggaagagtcagaggaccctgtgcttgctggtggtgctaacacaatttctggtgttcaaccttggtctcaaatagctgcttttgtatatgattcacgagcttttttagagtttatatttttttaaactaccgaagacattcattatctgcaaattaagactcaccttcactttccaaaatagctgagggttgttggcttgttgtagctgaccaccaaaagcagtcactgcaaatcttttaattcttccctatcaccttttgtattttaatgcaattattttggtccagaactgacctgtattttctgtattgtacacaaaagctaataattttgtgtactttttatttattttggaggttttatatgatcttcaattgagtattaaataatttgcctagattaagcctaaaatgatgaccagctaattaaagaagatattttgaatctggttctgagctaaagttgagtaaattcttagctaagaaaaaattggaaatccatcatctatattagcaacagattctcagagtaaattgttaacttctatgatttatgataatcaagctggacttgatcatacaagttagtctcataatgtattggaccaaaatgtaaacttcattggtcagatttagaagcattcatgctcacaagttttgggaaagtgaaaaataataaaatcatcttggattttattctgtatattaaaatttatcttttaaggaaacaatctgtatactacttgcttgtatagccttttgacccttcttgagtttttcagaagcctttaatttttatactttcaataccatatttacattatatactttaattaacaatgtgagtttctctgtga

SEQ ID NO: 24671 - DNA, 4447 bp, Homo sapiens
agccggccactggaaggttcccgcagatagagtctgcctcccctgcccccttctcttctggattcctcgctgcccaccctcattctcccggtggaagcctcgcaacgaagggccggagccgcctttctgctcccggaatgcttcacctgtccgcagctccgcccgccccacccccggaagtgacggcgaccgcgcggccctgcctttgttccgttgggcgtcgcggcgacggcgggaagatggcggcggcgggagccctggaacggagcttcgtggagctaagcggagctgagcgcgaaaggccgaggcactttcgggaattcacagtctgcagcattgggactgcaaatgccgtggctggcgccgtaaaatacagtgaaagcgcgggaggcttttactacgtggagagtggcaagttgttctccgtaaccagaaacaggttcattcattggaagacctctggagatacattggagctgatggaggagtcactggacataaatctgttgaataatgccattcgcctaaaattccaaaattgcagtgttttacctggaggggtttatgtctctgagactcagaatcgtgtgataatcttgatgttaaccaatcaaacagtgcacaggttacttttaccacacccctcccggatgtataggagtgtaagttggctaagtgcaatatcttttatttcccaaattactctgggtgtcacaaatgtagtgctggagcgatgtcttttggaattgaaggaaatttggattctcgttatccctcaccaagcatactttgatagctaccgcttaaaatgatcaggcatacattttaagttgagaattagttttcattaagaagaatagctttcttaaacttgacagttttttactttaaaaacttttttagcaatagagaggaactgagcaaaattctggttattttgatttaatagatttttctttttaattactcaacaggagttggtagttgacagtcagatgcagtcaatattcactgacattggaaaagttgatttcacagatccttgcaactatcagttaattccagcagtacctggaatatctcctaattccaccgcctctacagcctggctcagcagtgatggggaggccctgtttgccttaccatgtgcttctgggggaatctttgttcttaagctacctccttatgacatacctggtatggtgtcagtcgtggaactgaaacagagttcagtaatgcaacgattgcttacaggctggatgccaacagctatcaggggtgaccagtcgccttcagatcgtcccctcagtcttgctgttcattgtgtggagcatgatgccttcatctttgctttgtgtcaggatcataaactacgaatgtggtcttacaaggagcaaatgtgcctaatggtagctgacatgctggagtatgtccctgtgaagaaagaccttcggcttactgctggaactggacacaaattacggcttgcttattcccccaccatgggactctacctggggatatacatgcatgcaccaaaacgaggacagttctgcattttccagttggtgagcactgagagtaatcgctatagtctcgatcatatttcttcactgttcacttctcaggagacactgattgactttgccttaacttccacggatatctgggccctgtggcatgatgctgagaaccaaacagtagtgaaatacatcaactttgaacataatgttgcaggtcagtggaatccagtttttatgcagcctctgccagaggaagagattgtcatcagagatgatcaagaccccagagagatgtatctgcaaagtctttttacaccaggacaattcacaaatgaagctttatgtaaggctttacagattttctgccgaggaactgagaggaatttggatctttcctggagtgaactgaagaaagaagttactttagctgttgaaaatgagcttcaaggaagtgtaacagagtatgaattctcccaggaggagtttcgaaatttacaacaagaattctggtgcaagttctatgcctgttgtcttcagtatcaagaagccctctctcaccctcttgccctacatttgaatccacacacaaacatggtgtgcctgctgaaaaaagggtacctgtctttccttattccctcatccttagtggatcatttgtatctcctgccttatgagaaccttttgacagaagatgagacaaccatatctgatgatgtggatatcgctcgggatgtcatatgtcttataaaatgcctccggctgattgaagagtcagtaactgtggatatgtcagttataatggaaatgagttgttataacctacagtctccggaaaaggctgcagagcagattctggaagatatgatcactattgatgtagaaaatgtgatggaggatatttgtagtaaactgcaagagattaggaacccaatccatgcaattggactacttatacgggaaatggattatgaaacagaagtggaaatggaaaagggattcaatccagctcagcctttgaatattcgaatgaatcttacccagctctatggtagtaacacagcagggtatattgtgtgcagaggggtgcataaaatcgccagtactcgtttcctgatctgcagagatcttttgatcttacagcagctgttaatgaggcttggagatgctgtgatttggggaactggtcagctctttcaagctcagcaagacctactacatcgaacagctcccctactcttatcttattacctcattaaatggggaagtgagtgcttggcaactgatgttccacttgacacactggagtctaatctccaacacttatcagtactggaattaacagactctggtgctttaatggcaaataggtttgtatctagtcctcagactattgtggagttattcttccaagaagttgcaagaaaacacattatatctcacctcttctctcagccaaaggcacctctgagccaaactggattgaattggcctgaaatgattactgcaattaccagttatttattgcagcttttatggcctagcaatcctggttgtctctttctagaatgtttgatgggaaattgccaatatgtacaattgcaggattatattcaactgctacatccctggtgtcaagtcaatgttggttcctgtcgatttatgctgggaaggtgttacctagttacaggagaaggacagaaggctctggaatgtttttgtcaggcagcatctgaagtaggcaaagaggaattcttggatcgcttgattcgctcagaggatggggagatcgtgtctacccccaggctgcagtattatgacaaggttttacgactactagatgtcattggtttgcctgaactggttattcagttggctacatcagccataactgaagcaggtgatgactggaaaagtcaggctactctaaggacatgtattttcaaacatcatttggatttgggtcacaatagccaagcatatgaagccttaacccaaattcctgattccagcaggcaattagattgtttacggcagttggtggtagttctttgtgaacgctcacagctacaggatcttgtagagtttccctatgtgaatctgcataatgaggttgtgggaataattgagtcacgtgctagagctgtggaccttatgactcacaattactatgaacttctgtatgcctttcacatctatcgccacaattaccgcaaggctggcacagtgatgtttgagtatggaatgcggcttggcagagaagttcgaactctccggggacttgagaaacaaggcaactgttatctggctgctctcaattgtttacgacttattcgtccagaatatgcgtggattgtgcagccagtgtctggtgcagtgtatgatcgccctggagcatcccctaagaggaatcatgatggagaatgcacagctgcccccagtgagtcaggagtctcacactggttctttgctagacagtagtaatgttgttattgttagttgtattatgatagaaatatgtagttaaataagctacatataatagtaatatataaatgttatagtagtaacagttgcccttgtaaaacacaagttttaactgcaggcacctattatacacagatttttgttttcaataagtatattggattctttttctggagattgtcacaatttgaaaaaactcccagttgaaccacatagcctagaaatattgaaaaagttaaggaagccgggtgtggtggctcacacctgtaatcccagcaccttgggaggccgaggcaggtggatcacctgaggtcaggtgttcaagaccagcctggtcagtgtggcgaaaccccatctctactaaaaatacaaaaattagctgggcagtagtggccctcacctgtaatcccagctactcaggaggcttgaggcaggagaat

SEQ ID NO: 24672 - DNA, 3987 bp, Homo sapiens
agccggccactggaaggttcccgcagatagagtctgcctcccctgcccccttctcttctggattcctcgctgcccaccctcattctcccggtggaagcctcgcaacgaagggccggagccgcctttctgctcccggaatgcttcacctgtccgcagctccgcccgccccacccccggaagtgacggcgaccgcgcggccctgcctttgttccgttgggcgtcgcggcgacggcgggaagatggcggcggcgggagccctggaacggagcttcgtggagctaagcggagctgagcgcgaaaggccgaggcactttcgggaattcacagtctgcagcattgggactgcaaatgccgtggctggcgccgtaaaatacagtgaaagcgcgggaggcttttactacgtggagagtggcaagttgttctccgtaaccagaaacaggttcattcattggaagacctctggagatacattggagctgatggaggagtcactggacataaatctgttgaataatgccattcgcctaaaattccaaaattgcagtgttttacctggaggggtttatgtctctgagactcagaatcgtgtgataatcttgatgttaaccaatcaaacagtgcacaggttacttttaccacacccctcccggatgtataggagtgtaagttggctaagtgcaatatcttttatttcccaaattactctgggtgtcacaaatgtagtgctggagcgatgtcttttggaattgaaggaaatttggattctcgttatccctcaccaagcatactttgatagctaccgcttaaaatgatcaggcatacattttaagttgagaattagttttcattaagaagaatagctttcttaaacttgacagttttttactttaaaaacttttttagcaatagagaggaactgagcaaaattctggttattttgatttaatagatttttctttttaattactcaacaggagttggtagttgacagtcagatgcagtcaatattcactgacattggaaaagttgatttcacagatccttgcaactatcagttaattccagcagtacctggaatatctcctaattccaccgcctctacagcctggctcagcagtgatggggaggccctgtttgccttaccatgtgcttctgggggaatctttgttcttaagctacctccttatgacatacctggtatggtgtcagtcgtggaactgaaacagagttcagtaatgcaacgattgcttacaggctggatgccaacagctatcaggggtgaccagtcgccttcagatcgtcccctcagtcttgctgttcattgtgtggagcatgatgccttcatctttgctttgtgtcaggatcataaactacgaatgtggtcttacaaggagcaaatgtgcctaatggtagctgacatgctggagtatgtccctgtgaagaaagaccttcggcttactgctggaactggacacaaattacggcttgcttattcccccaccatgggactctacctggggatatacatgcatgcaccaaaacgaggacagttctgcattttccagttggtgagcactgagagtaatcgctatagtctcgatcatatttcttcactgttcacttctcaggagacactgattgactttgccttaacttccacggatatctgggccctgtggcatgatgctgagaaccaaacagtagtgaaatacatcaactttgaacataatgttgcaggtcagtggaatccagtttttatgcagcctctgccagaggaagagattgtcatcagagatgatcaagaccccagagagatgtatctgcaaagtctttttacaccaggacaattcacaaatgaagctttatgtaaggctttacagattttctgccgaggaactgagaggaatttggatctttcctggagtgaactgaagaaagaagttactttagctgttgaaaatgagcttcaaggaagtgtaacagagtatgaattctcccaggaggagtttcgaaatttacaacaagaattctggtgcaagttctatgcctgttgtcttcagtatcaagaagccctctctcaccctcttgccctacatttgaatccacacacaaacatggtgtgcctgctgaaaaaagggtacctgtctttccttattccctcatccttagtggatcatttgtatctcctgccttatgagaaccttttgacagaagatgagacaaccatatctgatgatgtggatatcgctcgggatgtcatatgtcttataaaatgcctccggctgattgaagagtcagtaactgtggatatgtcagttataatggaaatgagttgttataacctacagtctccggaaaaggctgcagagcagattctggaagatatgatcactattgatgtagaaaatgtgatggaggatatttgtagtaaactgcaagagattaggaacccaatccatgcaattggactacttatacgggaaatggattatgaaacagaagtggaaatggaaaagggattcaatccagctcagcctttgaatattcgaatgaatcttacccagctctatggtagtaacacagcagggtatattgtgtgcagaggggtgcataaaatcgccagtactcgtttcctgatctgcagagatcttttgatcttacagcagctgttaatgaggcttggagatgctgtgatttggggaactggtcagctctttcaagctcagcaagacctactacatcgaacagctcccctactcttatcttattacctcattaaatggggaagtgagtgcttggcaactgatgttccacttgacacactggagtctaatctccaacacttatcagtactggaattaacagactctggtgctttaatggcaaataggtttgtatctagtcctcagactattgtggagttattcttccaagaagttgcaagaaaacacattatatctcacctcttctctcagccaaaggcacctctgagccaaactggattgaattggcctgaaatgattactgcaattaccagttatttattgcagcttttatggcctagcaatcctggttgtctctttctagaatgtttgatgggaaattgccaatatgtacaattgcaggattatattcaactgctacatccctggtgtcaagtcaatgttggttcctgtcgatttatgctgggaaggtgttacctagttacaggagaaggacagaaggctctggaatgtttttgtcaggcagcatctgaagtaggcaaagaggaattcttggatcgcttgattcgctcagaggatggggagatcgtgtctacccccaggctgcagtattatgacaaggttttacgactactagatgtcattggtttgcctgaactggttattcagttggctacatcagccataactgaagcaggtgatgactggaaaagtcaggctactctaaggacatgtattttcaaacatcatttggatttgggtcacaatagccaagcatatgaagccttaacccaaattcctgattccagcaggcaattagattgtttacggcagttggtggtagttctttgtgaacgctcacagctacaggatcttgtagagtttccctatgtgaatctgcataatgaggttgtgggaataattgagtcacgtgctagagctgtggaccttatgactcacaattactatgaacttctgtatgcctttcacatctatcgccacaattaccgcaaggctggcacagtgatgtttgagtatggaatgcggcttggcagagaagttcgaactctccggggacttgagaaacaaggcaactgttatctggctgctctcaattgtttacgacttattcgtccagaatatgcgtggattgtgcagccagtgtctggtgcagtggtatgaaaacatttcatcctggaatttgggggttcatcctggaacaagtaaatctacttgttttggtcctttcaaaactattgtgtca

SEQ ID NO: 24673 - DNA, 3324 bp, Homo sapiens
agccggccactggaaggttcccgcagatagagtctgcctcccctgcccccttctcttctggattcctcgctgcccaccctcattctcccggtggaagcctcgcaacgaagggccggagccgcctttctgctcccggaatgcttcacctgtccgcagctccgcccgccccacccccggaagtgacggcgaccgcgcggccctgcctttgttccgttgggcgtcgcggcgacggcgggaagatggcggcggcgggagccctggaacggagcttcgtggagctaagcggagctgagcgcgaaaggccgaggcactttcgggaattcacagtctgcagcattgggactgcaaatgccgtggctggcgccgtaaaatacagtgaaagcgcgggaggcttttactacgtggagagtggcaagttgttctccgtaaccagaaacaggttcattcattggaagacctctggagatacattggagctgatggaggagtcactggacataaatctgttgaataatgccattcgcctaaaattccaaaattgcagtgttttacctggaggggtttatgtctctgagactcagaatcgtgtgataatcttgatgttaaccaatcaaacagtgcacaggttacttttaccacacccctcccggatgtataggagtgtaagttggctaagtgcaatatcttttatttcccaaattactctgggtgtcacaaatgtagtgctggagcgatgtcttttggaattgaaggaaatttggattctcgttatccctcaccaagcatactttgatagctaccgcttaaaatgatcaggcatacattttaagttgagaattagttttcattaagaagaatagctttcttaaacttgacagttttttactttaaaaacttttttagcaatagagaggaactgagcaaaattctggttattttgatttaatagatttttctttttaattactcaacaggagttggtagttgacagtcagatgcagtcaatattcactgacattggaaaagttgatttcacagatccttgcaactatcagttaattccagcagtacctggaatatctcctaattccaccgcctctacagcctggctcagcagtgatggggaggccctgtttgccttaccatgtgcttctgggggaatctttgttcttaagctacctccttatgacatacctggtatggtgtcagtcgtggaactgaaacagagttcagtaatgcaacgattgcttacaggctggatgccaacagctatcaggggtgaccagtcgccttcagatcgtcccctcagtcttgctgttcattgtgtggagcatgatgccttcatctttgctttgtgtcaggatcataaactacgaatgtggtcttacaaggagcaaatgtgcctaatggtagctgacatgctggagtatgtccctgtgaagaaagaccttcggcttactgctggaactggacacaaattacggcttgcttattcccccaccatgggactctacctggggatatacatgcatgcaccaaaacgaggacagttctgcattttccagttggtgagcactgagagtaatcgctatagtctcgatcatatttcttcactgttcacttctcaggagacactgattgactttgccttaacttccacggatatctgggccctgtggcatgatgctgagaaccaaacagtagtgaaatacatcaactttgaacataatgttgcaggtcagtggaatccagtttttatgcagcctctgccagaggaagagattgtcatcagagatgatcaagaccccagagagatgtatctgcaaagtctttttacaccaggacaattcacaaatgaagctttatgtaaggctttacagattttctgccgaggaactgagaggaatttggatctttcctggagtgaactgaagaaagaagttactttagctgttgaaaatgagcttcaaggaagtgtaacagagtatgaattctcccaggaggagtttcgaaatttacaacaagaattctggtgcaagttctatgcctgttgtcttcagtatcaagaagccctctctcaccctcttgccctacatttgaatccacacacaaacatggtgtgcctgctgaaaaaagggtacctgtctttccttattccctcatccttagtggatcatttgtatctcctgccttatgagaaccttttgacagaagatgagacaaccatatctgatgatgtggatatcgctcgggatgtcatatgtcttataaaatgcctccggctgattgaagagtcagtaactgtggatatgtcagttataatggaaatgagttgttataacctacagtctccggaaaaggctgcagagcagattctggaagatatgatcactattgatgtagaaaatgtgatggaggatatttgtagtaaactgcaagagattaggaacccaatccatgcaattggactacttatacgggaaatggattatgaaacagaagtggaaatggaaaagggattcaatccagctcagcctttgaatattcgaatgaatcttacccagctctatggtagtaacacagcagggtatattgtgtgcagaggggtgcataaaatcgccagtactcgtttcctgatctgcagagatcttttgatcttacagcagctgttaatgaggcttggagatgctgtgatttggggaactggtcagctctttcaagctcagcaagacctactacatcgaacagctcccctactcttatcttattacctcattaaatggggaagtgagtgcttggcaactgatgttccacttgacacactggagtctaatctccaacacttatcagtactggaattaacagactctggtgctttaatggcaaataggtttgtatctagtcctcagactattgtggagttattcttccaagaagttgcaagaaaacacattatatctcacctcttctctcagccaaaggcacctctgagccaaactggattgaattggcctgaaatgattactgcaattaccagttatttattgcagcttttatggcctagcaatcctggttgtctctttctagaatgtttgatgggaaattgccaatatgtacaattgcaggtgagttcctgtgaacatttcatgtctacacattcttgtaaagcatgggattgctgaatttttttctttgtaaatgttaactgcattttaaagaaccacaataatttaaacttgattatgtgaagacataccccaaagagattgttctctatttctataccatcctgaacttgcttgattttgtctgatctacgaagct

SEQ ID NO: 24674 - DNA, 417 bp, Homo sapiens
catgatatatggaacaaaatttcatttagactttaccaaattcatgtggtaccatgttttgttttcatacatttacctctcctactgatgaaaaagtaagtcaccgtgaactactactttctttcttattttatccctttttttcccacatttcctcctaggagacactgattgactttgccttaacttccacggatatctgggccctgtggcatgatgctgagaaccaaacagtagtgaaatacatcaactttgaacagtatgggtcacttaattctgtcatcctacctcaccccaagcaatttcatgctaagaagacgagaggccgggcgccgtgtctcatgcctgtaatcctaacactttgagaggccgaggcaggcaaatcacttaagctcaggagttcgagaccaggctggg

SEQ ID NO: 24675 - DNA, 411 bp, Homo sapiens
cgagattcacattttcaataagataaaccatcctgtttgctctggctcctcattgaagggtcacgaagtgatattatgggcaacaatctatattataatgatttccaattttttttgtgctttcagtggagcttttatgtgcaatttattaattaaattgacagtgttcttcgtagaagagcttgtagaagtaatgtttagcataggagaatttactaagctgtcttttccccttttctcacagggagtctaatctccaacacttatcagtactggaattaacagactctggtgctttaatggcaaataggtttggtaaggagtggactatgtacacatttcattttaaactggggatttattgcatattcattaaagtggtcttttgccacctttgccatagaaaggttg

SEQ ID NO: 24676 - DNA, 710 bp, Homo sapiens
ggtacctgtctttccttattccctcatccttagtggatcatttgtatctcctgccttatgagaaccttttgacagaagatgagacaaccatatctgatggtaatagtaattgttatgtccatatttaatccccttcctatataaaccctatgcttcgtttcacatggatacaaaaaatatcgattgccacacctgtcttggtcactttaccacaccacaaatattttaatgaacacttaagagaccaaagcatctctgagacctcagatagatttcttgtcatttaattattaacattttaatgtaatatcaatcaatagattgtcattggcttaagacataaatgttaactttctcttatttgtagatgtggatatcgctcgggatgtcatatgtcttataaaatgcctccggctgattgaagagtcagtaactgtggatatgtcagttataatggaaatgagttgttataacctacagtctccggaaaaggctgcagagcagattctggaagatatgatcactattgatgtgtaaggagaattagggtaaagtgcatttcctaatggaaattcagcatttttagcgccaaagttggaattttaatgtatgttccagagcgtacagaatagtagcttaaagtcaaactgatgcgccatgattctaagtacatatttctacttttaacagaaaatttaacacgacttcaa

SEQ ID NO: 24677 - DNA, 204 bp, Homo sapiens
agcaaaagactagagatgaagttgtcatctatctctctagttttagtatcaaattaaagtggtacgtttcagcgttcagttttcaagtgtggaaccattttcattccagatgcatcaaattgcaatttggaggagaggcagcacaagcagaagcctgggcctggctagcagccaatcagctctcatctgtcatcactactaagg

SEQ ID NO: 24678 - DNA, 351 bp, Homo sapiens
aacagataagggcctcccaaactgcctagaggtaacggctcttagggatttaactttttttttttcctaactccccagatttgttatcagctcttatcctaagatacagatgagtaaaccaagccactggtttaattatattgagaaatacaaatgttagggaatcagccactcaacattctttggtcagtactcaagtaggagggaaataggtacatattcttaatcactgacttttcacagaaggttgatgctgctgaattgcttcgtttatacttaaactatgaccttttagaagaagctgtggatttggtgtcagaatatgtggatgctgtattgggaaaaggacat

SEQ ID NO: 24679 - DNA, 823 bp, Homo sapiens
gagctgttatgtaatgttttccttcttttctcttatagctgtcccagaaaatacttgacaaattggaggactaccagcaaaaagttgataaggcaacacgggatttattatatcgtcggaccttgtgatttggattgtcacctagcctttgtaaccgcttggtgcctcttaggacttaagactaccctacaggaaccctgtactcaaggccgatttttgtaactgtaaatgatgtgtacaacattcaagtctgcattctgcacaagataggagggcggaagagtcagaggaccctgtgcttgctggtggtgctaacacaatttctggtgttcaaccttggtctcaaatagctgcttttgtatatgattcacgagcttttttagagtttatatttttttaaactaccgaagacattcattatctgcaaattaagactcaccttcactttccaaaatagctgagggttgttggcttgttgtagctgaccaccaaaagcagtcactgcaaatcttttaattcttccctatcaccttttgtattttaatgcaattattttggtccagaactgacctgtattttctgtattgtacacaaaagctaataattttgtgtactttttatttattttggaggttttatatgatcttcaattgagtattaaataatttgcctagattaagcctaaaatgatgaccagctaattaaagaagatattttgaatctggttctgagctaaagttgagtaaattcttagctaagaaaaaattggaaatccatcatctatattagcaacagattctcagagtaaattgttaacttctat

SEQ ID NO: 24680 - DNA, 1544 bp, Homo sapiens
agccggccactggaaggttcccgcagatagagtctgcctcccctgcccccttctcttctggattcctcgctgcccaccctcattctcccggtggaagcctcgcaacgaagggccggagccgcctttctgctcccggaatgcttcacctgtccgcagctccgcccgccccacccccggaagtgacggcgaccgcgcggccctgcctttgttccgttgggcgtcgcggcgacggcgggaagatggcggcggcgggagccctggaacggagcttcgtggagctaagcggagctgagcgcgaaaggccgaggcactttcgggaattcacagtctgcagcattgggactgcaaatgccgtggctggcgccgtaaaatacagtgaaagcgcgggaggcttttactacgtggagagtggcaagttgttctccgtaaccagaaacaggttcattcattggaagacctctggagatacattggagctgatggaggagtcactggacataaatctgttgaataatgccattcgcctaaaattccaaaattgcagtgttttacctggaggggtttatgtctctgagactcagaatcgtgtgataatcttgatgttaaccaatcaaacagtgcacaggttacttttaccacacccctcccggatgtataggagtgtaagttggctaagtgcaatatcttttatttcccaaattactctgggtgtcacaaatgtagtgctggagcgatgtcttttggaattgaaggaaatttggattctcgttatccctcaccaagcatactttgatagctaccgcttaaaatgatcaggcatacattttaagttgagaattagttttcattaagaagaatagctttcttaaacttgacagttttttactttaaaaacttttttagcaatagagaggaactgagcaaaattctggttattttgatttaatagatttttctttttaattactcaacaggagttggtagttgacagtcagatgcagtcaatattcactgacattggaaaagttgatttcacagatccttgcaactatcagttaattccagcagtacctggaatatctcctaattccaccgcctctacagcctggctcagcagtgatggggaggccctgtttgccttaccatgtgcttctgggggaatctttgttcttaagctacctccttatgacatacctggtaagaatgggaactgagcatggatttaactttaaacaaggaatgttaacattgaaacagttcaacctcgtcatccaatgcagggattgcatctctactgccccggaactggtcattcattattgcttgcctaatgagtccctaatgctttacttttatacagtggataaggaactataaagcatattggagcacggaaaaacaaatagacaagtataagacagcctattctaaatcttgtagtagagatgggttgcctaattgtctgccctgagatggaggcattataacattataattaaattaattgaaacaaagacattaaataccctgcaccaagttgccac

SEQ ID NO: 24681 - DNA, 5764 bp, Homo sapiens
agccggccactggaaggttcccgcagatagagtctgcctcccctgcccccttctcttctggattcctcgctgcccaccctcattctcccggtggaagcctcgcaacgaagggccggagccgcctttctgctcccggaatgcttcacctgtccgcagctccgcccgccccacccccggaagtgacggcgaccgcgcggccctgcctttgttccgttgggcgtcgcggcgacggcgggaagatggcggcggcgggagccctggaacggagcttcgtggagctaagcggagctgagcgcgaaaggccgaggcactttcgggaattcacagtctgcagcattgggactgcaaatgccgtggctggcgccgtaaaatacagtgaaagcgcgggaggcttttactacgtggagagtggcaagttgttctccgtaaccagaaacaggttcattcattggaagacctctggagatacattggagctgatggaggagtcactggacataaatctgttgaataatgccattcgcctaaaattccaaaattgcagtgttttacctggaggggtttatgtctctgagactcagaatcgtgtgataatcttgatgttaaccaatcaaacagtgcacaggttacttttaccacacccctcccggatgtataggagtgtaagttggctaagtgcaatatcttttatttcccaaattactctgggtgtcacaaatgtagtgctggagcgatgtcttttggaattgaaggaaatttggattctcgttatccctcaccaagcatactttgatagctaccgcttaaaatgatcaggcatacattttaagttgagaattagttttcattaagaagaatagctttcttaaacttgacagttttttactttaaaaacttttttagcaatagagaggaactgagcaaaattctggttattttgatttaatagatttttctttttaattactcaacaggagttggtagttgacagtcagatgcagtcaatattcactgacattggaaaagttgatttcacagatccttgcaactatcagttaattccagcagtacctggaatatctcctaattccaccgcctctacagcctggctcagcagtgatggggaggccctgtttgccttaccatgtgcttctgggggaatctttgttcttaagctacctccttatgacatacctggtatggtgtcagtcgtggaactgaaacagagttcagtaatgcaacgattgcttacaggctggatgccaacagctatcaggggtgaccagtcgccttcagatcgtcccctcagtcttgctgttcattgtgtggagcatgatgccttcatctttgctttgtgtcaggatcataaactacgaatgtggtcttacaaggagcaaatgtgcctaatggtagctgacatgctggagtatgtccctgtgaagaaagaccttcggcttactgctggaactggacacaaattacggcttgcttattcccccaccatgggactctacctggggatatacatgcatgcaccaaaacgaggacagttctgcattttccagttggtgagcactgagagtaatcgctatagtctcgatcatatttcttcactgttcacttctcaggagacactgattgactttgccttaacttccacggatatctgggccctgtggcatgatgctgagaaccaaacagtagtgaaatacatcaactttgaacataatgttgcaggtcagtggaatccagtttttatgcagcctctgccagaggaagagattgtcatcagagatgatcaagaccccagagagatgtatctgcaaagtctttttacaccaggacaattcacaaatgaagctttatgtaaggctttacagattttctgccgaggaactgagaggaatttggatctttcctggagtgaactgaagaaagaagttactttagctgttgaaaatgagcttcaaggaagtgtaacagagtatgaattctcccaggaggagtttcgaaatttacaacaagaattctggtgcaagttctatgcctgttgtcttcagtatcaagaagccctctctcaccctcttgccctacatttgaatccacacacaaacatggtgtgcctgctgaaaaaagggtacctgtctttccttattccctcatccttagtggatcatttgtatctcctgccttatgagaaccttttgacagaagatgagacaaccatatctgatgatgtggatatcgctcgggatgtcatatgtcttataaaatgcctccggctgattgaagagtcagtaactgtggatatgtcagttataatggaaatgagttgttataacctacagtctccggaaaaggctgcagagcagattctggaagatatgatcactattgatgtagaaaatgtgatggaggatatttgtagtaaactgcaagagattaggaacccaatccatgcaattggactacttatacgggaaatggattatgaaacagaagtggaaatggaaaagggattcaatccagctcagcctttgaatattcgaatgaatcttacccagctctatggtagtaacacagcagggtatattgtgtgcagaggggtgcataaaatcgccagtactcgtttcctgatctgcagagatcttttgatcttacagcagctgttaatgaggcttggagatgctgtgatttggggaactggtcagctctttcaagctcagcaagacctactacatcgaacagctcccctactcttatcttattacctcattaaatggggaagtgagtgcttggcaactgatgttccacttgacacactggagtctaatctccaacacttatcagtactggaattaacagactctggtgctttaatggcaaataggtttgtatctagtcctcagactattgtggagttattcttccaagaagttgcaagaaaacacattatatctcacctcttctctcagccaaaggcacctctgagccaaactggattgaattggcctgaaatgattactgcaattaccagttatttattgcagcttttatggcctagcaatcctggttgtctctttctagaatgtttgatgggaaattgccaatatgtacaattgcaggattatattcaactgctacatccctggtgtcaagtcaatgttggttcctgtcgatttatgctgggaaggtgttacctagttacaggagaaggacagaaggctctggaatgtttttgtcaggcagcatctgaagtaggcaaagaggaattcttggatcgcttgattcgctcagaggatggggagatcgtgtctacccccaggctgcagtattatgacaaggttttacgactactagatgtcattggtttgcctgaactggttattcagttggctacatcagccataactgaagcaggtgatgactggaaaagtcaggctactctaaggacatgtattttcaaacatcatttggatttgggtcacaatagccaagcatatgaagccttaacccaaattcctgattccagcaggcaattagattgtttacggcagttggtggtagttctttgtgaacgctcacagctacaggatcttgtagagtttccctatgtgaatctgcataatgaggttgtgggaataattgagtcacgtgctagagctgtggaccttatgactcacaattactatgaacttctgtatgcctttcacatctatcgccacaattaccgcaaggctggcacagtgatgtttgagtatggaatgcggcttggcagagaagttcgaactctccggggacttgagaaacaaggcaactgttatctggctgctctcaattgtttacgacttattcgtccagaatatgcgtggattgtgcagccagtgtctggtgcagtgtatgatcgccctggagcatcccctaagaggaatcatgatggagaatgcacagctgcccccacaaatcgacaaattgaaatcctggaactggaagatctggagaaagagtgttccttggctcgcatccgcctcactttggctcagcatgatccatcagcggttgcagttgctggaagttcatcagcagaggaaatggtcactctcttggttcaggcgggcctctttgacactgccatatcactctgtcagacttttaagcttcccttaacgccagtctttgaagggcttgccttcaaatgcatcaaattgcaatttggaggagaggcagcacaagcagaagcctgggcctggctagcagccaatcagctctcatctgtcatcactactaaggagtctagtgctacagatgaagcatggcgactattatccacttacctggagaggtacaaagtccagaataacttgtatcaccactgtgtaatcaacaagctcttgtctcatggagtgcctctgcctaattggcttataaacagttacaagaaggttgatgctgctgaattgcttcgtttatacttaaactatgaccttttagaagaagctgtggatttggtgtcagaatatgtggatgctgtattgggaaaaggacatcaatacttcggaattgagtttccactgtccgcaacagccccaatggtgtggcttccatactcctctattgatcagcttctccaagctctgggagagaacagtgccaacagtcacaacatcgcactgtcccagaaaatacttgacaaattggaggactaccagcaaaaagttgataaggcaacacgggatttattatatcgtcggaccttgtgatttggattgtcacctagcctttgtaaccgcttggtgcctcttaggacttaagactaccctacaggaaccctgtactcaaggccgatttttgtaactgtaaatgatgtgtacaacattcaagtctgcattctgcacaagataggagggcggaagagtcagaggaccctgtgcttgctggtggtgctaacacaatttctggtgttcaaccttggtctcaaatagctgcttttgtatatgattcacgagcttttttagagtttatatttttttaaactaccgaagacattcattatctgcaaattaagactcaccttcactttccaaaatagctgagggttgttggcttgttgtagctgaccaccaaaagcagtcactgcaaatcttttaattcttccctatcaccttttgtattttaatgcaattattttggtccagaactgacctgtattttctgtattgtacacaaaagctaataattttgtgtactttttatttattttggaggttttatatgatcttcaattgagtattaaataatttgcctagattaagcctaaaatgatgaccagctaattaaagaagatattttgaatctggttctgagctaaagttgagtaaattcttagctaagaaaaaattggaaatccatcatctatattagcaacagattctcagagtaaattgttaacttctatgatttatgataatcaagctggacttgatcatacaagttagtctcataatgtattggaccaaaatgtaaacttcattggtcagatttagaagcattcatgctcacaagttttgggaaagtgaaaaataataaaatcatcttggattttattctgtatattaaaatttatcttttaaggaaacaatctgtatactacttgcttgtatagccttttgacccttcttgagtttttcagaagcctttaatttttatactttcaataccatatttacattatatactttaattaacaatgtgagtttctctgtga

SEQ ID NO: 24682 - DNA, 5187 bp, Homo sapiens
agccggccactggaaggttcccgcagatagagtctgcctcccctgcccccttctcttctggattcctcgctgcccaccctcattctcccggtggaagcctcgcaacgaagggccggagccgcctttctgctcccggaatgcttcacctgtccgcagctccgcccgccccacccccggaagtgacggcgaccgcgcggccctgcctttgttccgttgggcgtcgcggcgacggcgggaagatggcggcggcgggagccctggaacggagcttcgtggagctaagcggagctgagcgcgaaaggccgaggcactttcgggaattcacagtctgcagcattgggactgcaaatgccgtggctggcgccgtaaaatacagtgaaagcgcgggaggcttttactacgtggagagtggcaagttgttctccgtaaccagaaacaggttcattcattggaagacctctggagatacattggagctgatggaggagtcactggacataaatctgttgaataatgccattcgcctaaaattccaaaattgcagtgttttacctggaggggtttatgtctctgagactcagaatcgtgtgataatcttgatgttaaccaatcaaacagtgcacaggttacttttaccacacccctcccggatgtataggagtgagttggtagttgacagtcagatgcagtcaatattcactgacattggaaaagttgatttcacagatccttgcaactatcagttaattccagcagtacctggaatatctcctaattccaccgcctctacagcctggctcagcagtgatggggaggccctgtttgccttaccatgtgcttctgggggaatctttgttcttaagctacctccttatgacatacctggtatggtgtcagtcgtggaactgaaacagagttcagtaatgcaacgattgcttacaggctggatgccaacagctatcaggggtgaccagtcgccttcagatcgtcccctcagtcttgctgttcattgtgtggagcatgatgccttcatctttgctttgtgtcaggatcataaactacgaatgtggtcttacaaggagcaaatgtgcctaatggtagctgacatgctggagtatgtccctgtgaagaaagaccttcggcttactgctggaactggacacaaattacggcttgcttattcccccaccatgggactctacctggggatatacatgcatgcaccaaaacgaggacagttctgcattttccagttggtgagcactgagagtaatcgctatagtctcgatcatatttcttcactgttcacttctcaggagacactgattgactttgccttaacttccacggatatctgggccctgtggcatgatgctgagaaccaaacagtagtgaaatacatcaactttgaacataatgttgcaggtcagtggaatccagtttttatgcagcctctgccagaggaagagattgtcatcagagatgatcaagaccccagagagatgtatctgcaaagtctttttacaccaggacaattcacaaatgaagctttatgtaaggctttacagattttctgccgaggaactgagaggaatttggatctttcctggagtgaactgaagaaagaagttactttagctgttgaaaatgagcttcaaggaagtgtaacagagtatgaattctcccaggaggagtttcgaaatttacaacaagaattctggtgcaagttctatgcctgttgtcttcagtatcaagaagccctctctcaccctcttgccctacatttgaatccacacacaaacatggtgtgcctgctgaaaaaagggtacctgtctttccttattccctcatccttagtggatcatttgtatctcctgccttatgagaaccttttgacagaagatgagacaaccatatctgatgatgtggatatcgctcgggatgtcatatgtcttataaaatgcctccggctgattgaagagtcagtaactgtggatatgtcagttataatggaaatgagttgttataacctacagtctccggaaaaggctgcagagcagattctggaagatatgatcactattgatgtagaaaatgtgatggaggatatttgtagtaaactgcaagagattaggaacccaatccatgcaattggactacttatacgggaaatggattatgaaacagaagtggaaatggaaaagggattcaatccagctcagcctttgaatattcgaatgaatcttacccagctctatggtagtaacacagcagggtatattgtgtgcagaggggtgcataaaatcgccagtactcgtttcctgatctgcagagatcttttgatcttacagcagctgttaatgaggcttggagatgctgtgatttggggaactggtcagctctttcaagctcagcaagacctactacatcgaacagctcccctactcttatcttattacctcattaaatggggaagtgagtgcttggcaactgatgttccacttgacacactggagtctaatctccaacacttatcagtactggaattaacagactctggtgctttaatggcaaataggtttgtatctagtcctcagactattgtggagttattcttccaagaagttgcaagaaaacacattatatctcacctcttctctcagccaaaggcacctctgagccaaactggattgaattggcctgaaatgattactgcaattaccagttatttattgcagcttttatggcctagcaatcctggttgtctctttctagaatgtttgatgggaaattgccaatatgtacaattgcaggattatattcaactgctacatccctggtgtcaagtcaatgttggttcctgtcgatttatgctgggaaggtgttacctagttacaggagaaggacagaaggctctggaatgtttttgtcaggcagcatctgaagtaggcaaagaggaattcttggatcgcttgattcgctcagaggatggggagatcgtgtctacccccaggctgcagtattatgacaaggttttacgactactagatgtcattggtttgcctgaactggttattcagttggctacatcagccataactgaagcaggtgatgactggaaaagtcaggctactctaaggacatgtattttcaaacatcatttggatttgggtcacaatagccaagcatatgaagccttaacccaaattcctgattccagcaggcaattagattgtttacggcagttggtggtagttctttgtgaacgctcacagctacaggatcttgtagagtttccctatgtgaatctgcataatgaggttgtgggaataattgagtcacgtgctagagctgtggaccttatgactcacaattactatgaacttctgtatgcctttcacatctatcgccacaattaccgcaaggctggcacagtgatgtttgagtatggaatgcggcttggcagagaagttcgaactctccggggacttgagaaacaaggcaactgttatctggctgctctcaattgtttacgacttattcgtccagaatatgcgtggattgtgcagccagtgtctggtgcagtgtatgatcgccctggagcatcccctaagaggaatcatgatggagaatgcacagctgcccccacaaatcgacaaattgaaatcctggaactggaagatctggagaaagagtgttccttggctcgcatccgcctcactttggctcagcatgatccatcagcggttgcagttgctggaagttcatcagcagaggaaatggtcactctcttggttcaggcgggcctctttgacactgccatatcactctgtcagacttttaagcttcccttaacgccagtctttgaagggcttgccttcaaatgcatcaaattgcaatttggaggagaggcagcacaagcagaagcctgggcctggctagcagccaatcagctctcatctgtcatcactactaaggagtctagtgctacagatgaagcatggcgactattatccacttacctggagaggtacaaagtccagaataacttgtatcaccactgtgtaatcaacaagctcttgtctcatggagtgcctctgcctaattggcttataaacagttacaaggactaccagcaaaaagttgataaggcaacacgggatttattatatcgtcggaccttgtgatttggattgtcacctagcctttgtaaccgcttggtgcctcttaggacttaagactaccctacaggaaccctgtactcaaggccgatttttgtaactgtaaatgatgtgtacaacattcaagtctgcattctgcacaagataggagggcggaagagtcagaggaccctgtgcttgctggtggtgctaacacaatttctggtgttcaaccttggtctcaaatagctgcttttgtatatgattcacgagcttttttagagtttatatttttttaaactaccgaagacattcattatctgcaaattaagactcaccttcactttccaaaatagctgagggttgttggcttgttgtagctgaccaccaaaagcagtcactgcaaatcttttaattcttccctatcaccttttgtattttaatgcaattattttggtccagaactgacctgtattttctgtattgtacacaaaagctaataattttgtgtactttttatttattttggaggttttatatgatcttcaattgagtattaaataatttgcctagattaagcctaaaatgatgaccagctaattaaagaagatattttgaatctggttctgagctaaagttgagtaaattcttagctaagaaaaaattggaaatccatcatctatattagcaacagattctcagagtaaattgttaacttctatgatttatgataatcaagctggacttgatcatacaagttagtctcataatgtattggaccaaaatgtaaacttcattggtcagatttagaagcattcatgctcacaagttttgggaaagtgaaaaataataaaatcatcttggattttattctgtatattaaaatttatcttttaaggaaacaatctgtatactacttgcttgtatagccttttgacccttcttgagtttttcagaagccttttaaattatttcatatctcaactcccgataggcgcataatttagcaatatatagatataatact

SEQ ID NO: 24683 - DNA, 1248 bp, Homo sapiens
  misc_feature (24)..(24): n is a, c, g, or t
  misc_feature (28)..(28): n is a, c, g, or t
  misc_feature (30)..(30): n is a, c, g, or t
  misc_feature (47)..(47): n is a, c, g, or t
cctatagtgagtcgtatagggacnaggncnctatagtgagtcgtatnggtttccactgtccgcaacagccccaatggtgtggcttccatactcctctattgatcagcttctccaagctctgggagagaacagtgccaacagtcacaacatcgcactgtcccagaaaatacttgacaaattggaggactaccagcaaaaagttgataaggcaacacgggatttattatatcgtcggaccttgtgatttggattgtcacctagcctttgtaaccgcttggtgcctcttaggacttaagactaccctacaggaaccctgtactcaaggccgatttttgtaactgtaaatgatgtgtacaacattcaagtctgcattctgcacaagataggagggcggaagagtcagaggaccctgtgcttgctggtggtgctaacacaatttctggtgttcaaccttggtctcaaatagctgcttttgtatatgattcacgagcttttttagagtttatatttttttaaactaccgaagacattcattatctgcaaattaagactcaccttcactttccaaaatagctgagggttgttggcttgttgtagctgaccaccaaaagcagtcactgcaaatcttttaattcttccctatcaccttttgtattttaatgcaattattttggtccagaactgacctgtattttctgtattgtacacaaaagctaataattttgtgtactttttatttattttggaggttttatatgatcttcaattgagtattaaataatttgcctagattaagcctaaaatgatgaccagctaattaaagaagatattttgaatctggttctgagctaaagttgagtaaattcttagctaagaaaaaattggaaatccatcatctatattagcaacagattctcagagtaaattgttaacttctatgatttatgataatcaagctggacttgatcatacaagttagtctcataatgtattggaccaaaatgtaaacttcattggtcagatttagaagcattcatgctcacaagttttgggaaagtgaaaaataataaaatcatcttggattttattctgtatattaaaatttatcttttaaggaaacaatctgtatactacttgcttgtatagccttttgacccttcttgagtttttcagaagcctttaatttttatactttcaataccatatttacattatatactttaattaacaatgtgagtttctctgtga

SEQ ID NO: 24684 - DNA, 3978 bp, Homo sapiens
agccggccactggaaggttcccgcagatagagtctgcctcccctgcccccttctcttctggattcctcgctgcccaccctcattctcccggtggaagcctcgcaacgaagggccggagccgcctttctgctcccggaatgcttcacctgtccgcagctccgcccgccccacccccggaagtgacggcgaccgcgcggccctgcctttgttccgttgggcgtcgcggcgacggcgggaagatggcggcggcgggagccctggaacggagcttcgtggagctaagcggagctgagcgcgaaaggccgaggcactttcgggaattcacagtctgcagcattgggactgcaaatgccgtggctggcgccgtaaaatacagtgaaagcgcgggaggcttttactacgtggagagtggcaagttgttctccgtaaccagaaacaggttcattcattggaagacctctggagatacattggagctgatggaggagtcactggacataaatctgttgaataatgccattcgcctaaaattccaaaattgcagtgttttacctggaggggtttatgtctctgagactcagaatcgtgtgataatcttgatgttaaccaatcaaacagtgcacaggttacttttaccacacccctcccggatgtataggagtgtaagttggctaagtgcaatatcttttatttcccaaattactctgggtgtcacaaatgtagtgctggagcgatgtcttttggaattgaaggaaatttggattctcgttatccctcaccaagcatactttgatagctaccgcttaaaatgatcaggcatacattttaagttgagaattagttttcattaagaagaatagctttcttaaacttgacagttttttactttaaaaacttttttagcaatagagaggaactgagcaaaattctggttattttgatttaatagatttttctttttaattactcaacaggagttggtagttgacagtcagatgcagtcaatattcactgacattggaaaagttgatttcacagatccttgcaactatcagttaattccagcagtacctggaatatctcctaattccaccgcctctacagcctggctcagcagtgatggggaggccctgtttgccttaccatgtgcttctgggggaatctttgttcttaagctacctccttatgacatacctggtatggtgtcagtcgtggaactgaaacagagttcagtaatgcaacgattgcttacaggctggatgccaacagctatcaggggtgaccagtcgccttcagatcgtcccctcagtcttgctgttcattgtgtggagcatgatgccttcatctttgctttgtgtcaggatcataaactacgaatgtggtcttacaaggagcaaatgtgcctaatggtagctgacatgctggagtatgtccctgtgaagaaagaccttcggcttactgctggaactggacacaaattacggcttgcttattcccccaccatgggactctacctggggatatacatgcatgcaccaaaacgaggacagttctgcattttccagttggtgagcactgagagtaatcgctatagtctcgatcatatttcttcactgttcacttctcaggagacactgattgactttgccttaacttccacggatatctgggccctgtggcatgatgctgagaaccaaacagtagtgaaatacatcaactttgaacataatgttgcaggtcagtggaatccagtttttatgcagcctctgccagaggaagagattgtcatcagagatgatcaagaccccagagagatgtatctgcaaagtctttttacaccaggacaattcacaaatgaagctttatgtaaggctttacagattttctgccgaggaactgagaggaatttggatctttcctggagtgaactgaagaaagaagttactttagctgttgaaaatgagcttcaaggaagtgtaacagagtatgaattctcccaggaggagtttcgaaatttacaacaagaattctggtgcaagttctatgcctgttgtcttcagtatcaagaagccctctctcaccctcttgccctacatttgaatccacacacaaacatggtgtgcctgctgaaaaaagggtacctgtctttccttattccctcatccttagtggatcatttgtatctcctgccttatgagaaccttttgacagaagatgagacaaccatatctgatgatgtggatatcgctcgggatgtcatatgtcttataaaatgcctccggctgattgaagagtcagtaactgtggatatgtcagttataatggaaatgagttgttataacctacagtctccggaaaaggctgcagagcagattctggaagatatgatcactattgatgtagaaaatgtgatggaggatatttgtagtaaactgcaagagattaggaacccaatccatgcaattggactacttatacgggaaatggattatgaaacagaagtggaaatggaaaagggattcaatccagctcagcctttgaatattcgaatgaatcttacccagctctatggtagtaacacagcagggtatattgtgtgcagaggggtgcataaaatcgccagtactcgtttcctgatctgcagagatcttttgatcttacagcagctgttaatgaggcttggagatgctgtgatttggggaactggtcagctctttcaagctcagcaagacctactacatcgaacagctcccctactcttatcttattacctcattaaatggggaagtgagtgcttggcaactgatgttccacttgacacactggagtctaatctccaacacttatcagtactggaattaacagactctggtgctttaatggcaaataggtttgtatctagtcctcagactattgtggagttattcttccaagaagttgcaagaaaacacattatatctcacctcttctctcagccaaaggcacctctgagccaaactggattgaattggcctgaaatgattactgcaattaccagttatttattgcagcttttatggcctagcaatcctggttgtctctttctagaatgtttgatgggaaattgccaatatgtacaattgcaggattatattcaactgctacatccctggtgtcaagtcaatgttggttcctgtcgatttatgctgggaaggtgttacctagttacaggagaaggacagaaggctctggaatgtttttgtcaggcagcatctgaagtaggcaaagaggaattcttggatcgcttgattcgctcagaggatggggagatcgtgtctacccccaggctgcagtattatgacaaggttttacgactactagatgtcattggtttgcctgaactggttattcagttggctacatcagccataactgaagcaggtgatgactggaaaagtcaggctactctaaggacatgtattttcaaacatcatttggatttgggtcacaatagccaagcatatgaagccttaacccaaattcctgattccagcaggcaattagattgtttacggcagttggtggtagttctttgtgaacgctcacagctacaggatcttgtagagtttccctatgtgaatctgcataatgaggttgtgggaataattgagtcacgtgctagagctgtgcaagtgaatccacattaatgccttgtcgtggtgccattcccagcgcctgacgatacgctcttctatgtcttattctggcaggttttgacgttttaaattttttaaagaaattttattccttggaccaaaaggttggttaacaccccctcttacttgctttcacatttgagtgtccagaggaaacagaaaggaatgagtgtgtgacgttgctgcacgcctgactctgtgcgaacttctttctgtgtatatattgttattttccggtatattttaatcccgacagaacatcatgtgagatttctttaaaatg

SEQ ID NO: 24685 - DNA, 1421 bp, Homo sapiens
agccggccactggaaggttcccgcagatagagtctgcctcccctgcccccttctcttctggattcctcgctgcccaccctcattctcccggtggaagcctcgcaacgaagggccggagccgcctttctgctcccggaatgcttcacctgtccgcagctccgcccgccccacccccggaagtgacggcgaccgcgcggccctgcctttgttccgttgggcgtcgcggcgacggcgggaagatggcggcggcgggagccctggaacggagcttcgtggagctaagcggagctgagcgcgaaaggccgaggcactttcgggaattcacagtctgcagcattgggactgcaaatgccgtggctggcgccgtaaaatacagtgaaagcgcgggaggcttttactacgtggagagtggcaagttgttctccgtaaccagaaacaggttcattcattggaagacctctggagatacattggagctgatggaggagtcactggacataaatctgttgaataatgccattcgcctaaaattccaaaattgcagtgttttacctggaggggtttatgtctctgagactcagaatcgtgtgataatcttgatgttaaccaatcaaacagtgcacaggttacttttaccacacccctcccggatgtataggagtgtaagttggctaagtgcaatatcttttatttcccaaattactctgggtgtcacaaatgtagtgctggagcgatgtcttttggaattgaaggaaatttggattctcgttatccctcaccaagcatactttgatagctaccgcttaaaatgatcaggcatacattttaagttgagaattagttttcattaagaagaatagctttcttaaacttgacagttttttactttaaaaacttttttagcaatagagaggaactgagcaaaattctggttattttgatttaatagatttttctttttaattactcaacaggagttggtagttgacagtcagatgcagtcaatattcactgacattggaaaagttgatttcacagatccttgcaactatcagttaattccagcagtacctggaatatctcctaattccaccgcctctacagcctggctcagcagtgatggggaggccctgtttgccttaccatgtgcttctgggggaatctttgttcttaagctacctccttatgacatacctggtaagaatgggaactgagcatggatttaactttaaacaaggaatgttaacattgaaacagttcaacctcgtcatccaatgcagggattgcatctctactgccccggaactggtcattcattattgcttgcctaatgagtccctaatgctttacttttatacagtggataaggaactataaagcatattggagcacggaagtggatagagttcgaagatcctgtt

SEQ ID NO: 24686 - DNA, 544 bp, Homo sapiens
aagggggtgtgttttagcgtcttgtgtttaaacaggatctctaagtgagaacctgacttgatcaatcactcgaagagggtgatcctctctttttcttatgctttatcctctgcactcaaaaggagtccctttgtggcttgcaaaccaagtgtaatagcaaccaagtaacgtcgcgtgtaaggaggcaccttttctgagtgggggcttgatcaagggagggttttgggcaaactgtacctgtctaagaaatgaatagtgaggttagaaaagttcctttgagcatttattttaagtaaacctttttcttcagctccacagaaagggttacacgttaaacatgttatatccagagaagtagagtacttttcgtcagacagtacttttaagtaggagtgcacgtctcgctctgctcctgtagagacttgttttgttactcaaatagagttctcgtaactagttaagtgaacttggattaggtaattggacaaggtttttttttttttttttaggattttaaagctacaggccttgctaacaattacga

SEQ ID NO: 24687 - DNA, 432 bp, Homo sapiens
tctttatttacttcaagagtgttgtgcggaaaatatggaaggcacaaccaaattcattaattcattcaattgtttaccaagccccttctccatgtcaagcactaggttaggtgatggcagtaaaactctacaaattaatctggcctctgccctcaaagaccttcacgtacagatgtattctatcctagctatggtagggtggcagaatatgccacagcaaacttttccactttggcacaaggattactttgtgctgaaggcaattgagaagaaaaagatacaagaaaagctctctgttcttctgtcatctaaaagcaggacataaatttacaaagttgtcccccgctttctacaaggaaggacaaaacttaattaccagagacagctttagacccttacagcctgcagacagaatcagaggactgtatataa

SEQ ID NO: 24688 - DNA, 522 bp, Homo sapiens
agagaaactccatctcaaaaacaaaacaacacaaaacaaaaaaagaagagaaatcaaagcttgttccctgtctctctctctccacatgtgagcacacaaagaggtcacgtgaacacacaatgagaaggaggctgcctgcaagttaagagaagaggcctcagcatgaaacctgccttactggcactttggtcttgaacttcccagcctctaaaactgtgagaaataagtttctgttgttcaagccacccagtctatggtattctgtatggcagccagaattaagacaccagtgaagcaagataatcagtaactggatacttaactgtgtggtataaaacataggggctttagtagagaagaaaattggactttgttggggacatccttactacttctgctcatgtatcatgctttagcttgtttctgtctttggaggaggctgcatatttttaaaatacccccaaaagtacaaagactaatgttatagcccctgtgttctcattatccaggcttaataaatgt

SEQ ID NO: 24689 - DNA, 374 bp, Homo sapiens
gcaaattcaatcaaaacttactgacatcaattgaaatcacattagactttgtaaaaaataggataattatgctcgtcttgtaagttgcaggtattgtaacaactctaaaatgtgggcctgtttgaataaatgcttatgtttgctggctctacgcaagcagatgcagaaatgtataatctgcataaataaatcaggagattatttttcccccttatagctctttagttctatgagattcaattaattcaactttttttttttttaatgggcccagggtaatgaggtaagcaggtgttagtgtgttggccactgaagcaggatagcccctggtacagatttgtcacatggggttactttttaaatctcccttgatt

SEQ ID NO: 24690 - DNA, 131 bp, Homo sapiens
aaagtcacctgtgaaaactaaaaactccaagcctgaccaaatttatgtcatctatgggcatggacattcctagtttgaaaaattaacaataagacttatctaagtttggtgaaatccttggagcatccagc

SEQ ID NO: 24691 - DNA, 419 bp, Homo sapiens
cccgagaacaggagcaagagatatatgacaaagctatttcagtggctctttaatgtataaggaggcaaacacctgaaactctgaaaactctgaaattgagaggcaaaataaacttagagtcaagaaagaaatgccatttctgcagatcagaatataaacaccaaccacagctgtaaaaaagaaaagaatatatgcaacgaagggaaattatataaacaaaggatcattggaggtactgatgagttcatttagttcaatgaaaatagtgacgtattaggtagatctcttaattttattactagtattctactaaatgtggtagtataaagtcaaaaagcattccgaagtttctcaagacccttataattccatgatttttttcaggtcagtcaacatttgttgaatgataggtctgtgga

SEQ ID NO: 24692 - DNA, 374 bp, Homo sapiens
gtgccaccaagcccggctaatttttcatattttttagtagagacaaggtttcaccacgttggccaggctggtctcgacctcctgacctcatgatctgcccacctcggcctcccaaagtgctgggatgacaggcatgagccactgcacccatctggctttatactttatatagtctgtctggtaatgtaatacacataaagacagagttatattcatgagattgggggtggggcaaaacttataaacagcaaactgaaccataaacaagtgttgttttgttttattggcttccaacatttatgaaaatccttttccctcattttgatggtgaaaggcctaataaatgtactgcagcacaataaaacatctgttac

SEQ ID NO: 24693 - DNA, 716 bp, Homo sapiens
agtggttcttctgaggaaaaccagctgaagtattacagaaagaggaaatgctgcagagacccagccggaaacagtgctggccagctcacgcctgacccacccttattctaagcatagggtctgcctctgaagagctaaagacttcctgaaatttaaaaattagtgcttttatttgcttgtcctgctaagaccgtagcaaaggccatcctcctcccattgacagtttagagtgggcagaaacaaccacggttaccctagaagtaaatccagagctgcgggacgctggaggacaaaaccaaccttccagggaagccgaggagaagtcatgccttcaaaaggtgtctgcctttttttttttcaccctctctcctctaacctgtttgtaactgggaaatgaaatagttttggtttgcaagctgtcgccagggagtggagcaagactttgtaataaacaagagcaactgccagagcccccagcgagcctctccaaggccagactgccaagaaaagctggcagtgtgacagcaagtttcattcagcgtggccggtggtcactgaggagcgaccatgaggaggatggccagagggggtaccccccagtctcaccttggggaagagtacagcctcctattagtgagctgtgtgggctattaaaattcccccaggctgagtgtttcaggaagcaccataaataaataaaattgtctgtgtgtgtg

SEQ ID NO: 24694 - DNA, 2704 bp, Homo sapiens
tattggggtgggagcagggggacagaagatggtgacactggctcctctcacccctaggtctctgaaggtccagatagcactgatggcaagctttgggtctgcacactctggaaagaagagagaagtgaaggctctaggtagggaggacagggagacactgggcacaggcttctctcctcttgtttaaagaagcccagggagggatagatctccgactggacagaagactactctgcagcccgccttcctagagttgggttgtcactgtccggcagggggcagcagccaccagcaaacaccactgcctgcaggagcctgggctgactggttgggactcaccaaagatcccttcttcctgggcggtggcctgcaggaactggaacagctgttggagaggagaagaaaaagaagacatcaaaaagaaaatctagtgctgggtggatatagagtatgaagatgtggagctgggaaaacagaggatgtggtgggatggggaaggaaaggttgtggaaggcctgcaccccgtctcagttcctccactgcttcgtcccagattctgtttttgttttcctgaatcagacttagtctccctccattctcccgtcccctgtgtgcccccatcctggtcctgcctcactggacagcctctccgcggccttcctcctccctgctccagaattctacttggtgccccccaaccccactcgactcattgtccacctggcctctgaggccaggcaccctcattcccctctcccacccaccccacccaaggaagcccagcacagaccatctcatctcactccaccatcacttctttgccaaatgcatttccaaacaccctcatgagctttgctgatctctttgccatctctccctgccccactccgatggctcctcctgcctggtgaagactgccctgggtatcccagaactgaacctgcagcagccagcacagctgaccttggggcgataagcagccagggaaaggctttcttaaaaaaaaacaaaaaacaaaaccaataactcagtaagcagattaaacaaaggtagagacggagccctccacccctctcacacactcatcctcacacccagctataccacaccccacaaatgttgcttatgtttccttggtcattctgtccatcctcctgtctgtccaaagccaaggacactgctctactctaaattttttgtcccgaagcccccaaatactgcaaccctgacccaatgcacgaagccaccccaaaatacagcagaggacaccaggactttcattttccctcagtatggcccatcctttgggtatgccaactccatgtccaccaagcactgcatgtaggacagggcacagtttggaggccttggtccagccactgccccagacccaccttggctctctcctcactaacacccgagaagcccagacttcccagtgtttagcaacagattaaactctaagccaacaacaacagaacagggtggagtgagtggaaagcaaatgaaatgttaaaaaaaaaaaaaaagcaatacttgcattctcattagtaggaacatgtgagatgaagcatgttatgttattaggcattctcttgattcggtaaacacaagctgaataaatttataaatatcagcattaagcgagatttaacggggagctgtttatcttctgcctgtcaggcaggcggcaacactctccatgtatcactcgccagccgtgcagtcctcactctcttgcccaggtaagctggggaagagcctgctgccgcccagctctggttgtggaagggctggcaccaaggagctgcgagcttacctcaactcatctcacctcaccatgccggctgcgaggcggcccgtgcagtccgtgcgcaggaggtcacactcccatgctgcatcccagcccctccagaaggcagagcatgacctgggtgactttgaggatgctatttaacctctctaagctaaagctcctcgactgcagcatcaacagatcagtgccgacctgttaaggccgtcgagagcatcaaatgctactgttcagcaggtgcctgacacatagtaggtccacaagcaaatgattttcctgcttgcatcatttctagcacagagctggaggaaatggcgaggtgcaggtggccgctgggccctgctgttctacatgggagcaagacagctgctaggtgaaggggaatgaccaggcagccacagggaggacatgtggcctcaggaagcctgggtgtgtatcctggttctgctaggaacacgtgtggggctttgtgtgggtgactctctggctccccaagcctccctttcctactgttatatccttaaagtgcctctgaggccaaagcctttgtggcaattgtcaaatgagtccatatgcagtgagtaccgtgttgagggaggacaaggtcaccaagagctgagaatgtttctccgactgatgagacctagatattgggtacatggaggtccccggtccctttgtgattcctgcagcctgttgcctccttgcctggaccccgcctcagctcagaaagccaattccctagattccaaaggccttcccagaccaattagcatgtcctgcagctgtcagctccctgtgcctagcctggacctcagctcatgtctagcacccagtctcccaaccccacacatattcacaaataaaagaaaataacaaatgacatgaatt

SEQ ID NO: 24695 - DNA, 2780 bp, Homo sapiens
atgtgatgcatgctcacgtgtctccgcagccggctcgggaaagaatcccccaagctccatttcatgagtaagcgtgagagccgctcagtttcctccagctctgctgaagccagcacagaagtagcccaaactcttccctctgctgacagcaaattttaggcaaagtcttgagaaagaagaaattgggtccagaaagggaagtgaggagaatcagatcccagacctttggggagaaggagcaaccgcctctggcacagcccatcagggagaaagagcaggttgagaagagtcctaagctaacagccccaaacaggtgggtgttgctcagctccctgaggcatgtggttgtaaggcagaacccacagaccttgcaggaagaaggctctcggggccatggcccaggtcagcatcaacaatgactacagcgagtgggacttgagcacggatgccggggagcgggctcggctgctgcagagtccctgtgtggacacagcccccaagagtgagtgggaagcctctcctgggggtctggacagaggcaccacttccacacttggggccatcttcatcgtcgtcaacgcgtgcctgggtgcagggttactcaacttcccagcagccttcagcactgcggggggcgtggcagcaggcatcgcactgcagatgggtatgctggttttcatcatcagtggccttgtcatcctggcctactgctcccaggccagcaatgagaggacctaccaggaggtggtatgggctgtgtgtggcaagctgacaggtgtgctatgtgaggtggccatcgctgtctacacctttggcacctgcattgccttcctaatcatcattggcgaccagcaggacaagattatagctgtgatggcgaaagagccggagggggccagcggcccttggtacacagaccgcaagttcaccatcagcctcactgccttcctcttcatcctgcccctctccatccccagggagattggtttccagaaatatgccagcttcctgagcgtcgtgggtacctggtacgtcacagccatcgttatcatcaagtacatctggccagataaagagatgaccccagggaacatcctgaccaggccggcttcctggatggctgtgttcaatgccatgcccaccatctgcttcggatttcagtgccacgtcagcagtgtgcccgtcttcaacagcatgcagcagcctgaagtgaagacctggggtggagtggtgacagctgccatggtcatagccctcgctgtctacatggggacaggcatctgtggcttcctgacctttggagctgctgtggatcctgacgtgctcctgtcctatccctcggaggacatggccgtggccgttgcccgagccttcatcatcctgagcgtgctcacctcctaccctatcctgcacttctgtgggcgggcggtggtggaaggcctgtggctgcgctaccagggggtgccagtggaggaggacgtggggcgggagcggcggcggcgagtgctgcagacgctggtctggttcctgctcaccctgctgctggcgctcttcatccctgacatcggcaaggtgatctcagtcattggaggcctggccgcctgcttcatcttcgtcttcccagggctgtgcctcattcaagccaaactctctgagatggaagaggtcaaaccagccagctggtgggtgctggtcagctacggagtcctcttggtcaccctgggagccttcatcttcggccagaccacagccaacgccatctttgtggatctcttggcataaccactgcctcccagggaacacaaggcctttgccattggtcgcaggaacccatctcttagagctatggggccattcttagtccacgatcattccaactggtgggatgacatccggacatcctcttccagggactggggcaaactcaggccccacacctctggacagctcaaatccagtccccttcctgctccccagtcctggcagtgccgtggatggcggcaggaagtctcacatcatagaggacccctcctcctctcccagttctcaacttctccatgcctggaatccacgggtgaagagagtcggtagatctcataagaaagaatccagtctgacttccctctggagaatgactatggacagaaggccaccatcctccacagagcaccctgtcctgagtaggggttgtgctcattaccccaggccagtggtagcttcctcaggagcctggccacttccaacggtagcactgaagtcatgcaaatgcatagtcaggtagattcagaccttgtccacaccttcctgggcaacccccaccatgaacctgtcagcctctttcccatagctaatagacatttcccaggccttgaggggccccaccctgtctctttcatcaaacctgatggtccaggctgggcatccctctcctcctccatccccagacatcaccaggtctaatgtttacaaacggtgccagcccggctctgaagccaagggccgtcccgtgccacggtgctgtgagtattcctccgttagctttccccataaggttgggagtatctgcttttgtgtctgagatgggcccctcttttcagaggccgcagggtgggtgatggagaaggctgagaacctttcagaccctctgtgtgggctgggctggtcagaatcagggtgtacctccccgacaccttctttttcagtgatgttttctcttcttcctgcctttcctctgcctcctcccctgccagccctagcgtgactacccagagacaaaaaaa

SEQ ID NO: 24696 - DNA, 763 bp, Homo sapiens
agctgaaggtggatgtccctaggggtggaatcagataagaggcagctggggatgaggacacttagtctctccttcccggcagcttcctgagcgtcgtgggtacctggtacgtcacagccatcgttatcatcaagtacatctggccagataaagagatgaccccagggaacatcctgaccaggccggcttcctggatggctgtgttcaatgccatgcccaccatctgcttcggatttcaggtgccagtgccagttgcaaggtccctgctgtccccttagatcaccccaccctgggatggaacccagcaaggaggaggaacccaggcagaatggaggaaatcctggggggaaggatggaacaggggcctcaggacttgccccttgttcctggggtctttgttcccaaggtaccttcctctggaaactggggttgaggtcatttccccaccatgacggtgcccttcacctggacagtgccacgtcagcagtgtgcccgtcttcaacagcatgcagcagcctgaagtgaagacctggggtggagtggtgacagctgccatggtcatagccctcgctgtctacatggggacaggcatctgtggcttcctgacctttggagctgctgtggatcctgacgtgctcctgtcctatccctcggaggacatggccgtggccgttgcccgagccttcatcatcctgagcgtgctcacctcctaccctatcctgcacttctgtgggcggtgagcccccttccactccccagggcc

SEQ ID NO: 24697 - DNA, 2910 bp, Homo sapiens
atgtgatgcatgctcacgtgtctccgcagccggctcgggaaagaatcccccaagctccatttcatgagtaagcgtgagagccgctcagtttcctccagctctgctgaagccagcacagaagtagcccaaactcttccctctgctgacagcaaattttaggcaaagtcttgagaaagaagaaattgggtccagaaagggaagtgaggagaatcagatcccagacctttggggagaaggagcaaccgcctctggcacagcccatcagggagaaagagcaggttgagaagagtcctaagctaacagccccaaacaggtgggtgttgctcagctccctgaggcatgtggttgtaaggcagaacccacagaccttgcaggaagaaggctctcggggccatggcccaggtcagcatcaacaatgactacagcgagtgggacttgagcacggatgccggggagcgggctcggctgctgcagagtccctgtgtggacacagcccccaagagtgagtgggaagcctctcctgggggtctggacagaggcaccacttccacacttggggccatcttcatcgtcgtcaacgcgtgcctgggtgcagggttactcaacttcccagcagccttcagcactgcggggggcgtggcagcaggcatcgcactgcagatgggtatgctggttttcatcatcagtggccttgtcatcctggcctactgctcccaggccagcaatgagaggacctaccaggaggtggtatgggctgtgtgtggcaagctgacaggtgtgctatgtgaggtggccatcgctgtctacacctttggcacctgcattgccttcctaatcatcattggcgaccagcaggacaagattatagctgtgatggcgaaagagccggagggggccagcggcccttggtacacagaccgcaagttcaccatcagcctcactgccttcctcttcatcctgcccctctccatccccagggagattggtttccagaaatatgccagcttcctgagcgtcgtgggtacctggtacgtcacagccatcgttatcatcaagtacatctggccagataaagagatgaccccagggaacatcctgaccaggccggcttcctggatggctgtgttcaatgccatgcccaccatctgcttcggatttcagtgccacgtcagcagtgtgcccgtcttcaacagcatgcagcagcctgaagtgaagacctggggtggagtggtgacagctgccatggtcatagccctcgctgtctacatggggacagcagagacaaggtctcactatgttgcctagcctggtcttgaattcctgggctcaagcaattctcctgcctcggcctcccaaagtgctggggttacaggcatgagccaccaacccagcctaaaatggggaaggcatctgtggcttcctgacctttggagctgctgtggatcctgacgtgctcctgtcctatccctcggaggacatggccgtggccgttgcccgagccttcatcatcctgagcgtgctcacctcctaccctatcctgcacttctgtgggcgggcggtggtggaaggcctgtggctgcgctaccagggggtgccagtggaggaggacgtggggcgggagcggcggcggcgagtgctgcagacgctggtctggttcctgctcaccctgctgctggcgctcttcatccctgacatcggcaaggtgatctcagtcattggaggcctggccgcctgcttcatcttcgtcttcccagggctgtgcctcattcaagccaaactctctgagatggaagaggtcaaaccagccagctggtgggtgctggtcagctacggagtcctcttggtcaccctgggagccttcatcttcggccagaccacagccaacgccatctttgtggatctcttggcataaccactgcctcccagggaacacaaggcctttgccattggtcgcaggaacccatctcttagagctatggggccattcttagtccacgatcattccaactggtgggatgacatccggacatcctcttccagggactggggcaaactcaggccccacacctctggacagctcaaatccagtccccttcctgctccccagtcctggcagtgccgtggatggcggcaggaagtctcacatcatagaggacccctcctcctctcccagttctcaacttctccatgcctggaatccacgggtgaagagagtcggtagatctcataagaaagaatccagtctgacttccctctggagaatgactatggacagaaggccaccatcctccacagagcaccctgtcctgagtaggggttgtgctcattaccccaggccagtggtagcttcctcaggagcctggccacttccaacggtagcactgaagtcatgcaaatgcatagtcaggtagattcagaccttgtccacaccttcctgggcaacccccaccatgaacctgtcagcctctttcccatagctaatagacatttcccaggccttgaggggccccaccctgtctctttcatcaaacctgatggtccaggctgggcatccctctcctcctccatccccagacatcaccaggtctaatgtttacaaacggtgccagcccggctctgaagccaagggccgtcccgtgccacggtgctgtgagtattcctccgttagctttccccataaggttgggagtatctgcttttgtgtctgagatgggcccctcttttcagaggccgcagggtgggtgatggagaaggctgagaacctttcagaccctctgtgtgggctgggctggtcagaatcagggtgtacctccccgacaccttctttttcagtgatgttttctcttcttcctgcctttcctctgcctcctcccctgccagccctagcgtgactacccagagacaaaaaaa

SEQ ID NO: 24698 - DNA, 3255 bp, Homo sapiens
cggagacaggctctggagggtggaagtgttagatccccgaggtctgtggagcccctcagtccccgccaccgcggaaaagctcagaccctttccctgcaggggtccagatcctggcgtcctcgccccacgcccgtccctctgttgcgccagctctgccgcgcctttacccagccagagggtctccacccagtcctaggccgggatcgggtcccggagctcctccccaggttaccccacagtagcccacccttctcgctccaggcctgggaatcgccccgccccggcctcctggcccgggtgcgccctggctcacctcacaaagcctcacctcacaaagcagcccaccctttctatctcagggctccaaccccaggctggactgggagcacactccagttgggatctgaggggcctacatcgctggcctgagcatgtgggcatcaggcttctattctggctctgccagctacccactgtgaccttagtctaacctctccctcctgggcctgttttcctatctgtcctgaagctccatttcatgagtaagcgtgagagccgctcagtttcctccagctctgctgaagccagcacagaagtagcccaaactcttccctctgctgacagcaaattttaggcaaagtcttgagaaagaagaaattgggtccagaaagggaagtgaggagaatcagatcccagacctttggggagaaggagcaaccgcctctggcacagcccatcagggagaaagagcaggttgagaagagtcctaagctaacagccccaaacaggtgggtgttgctcagctccctgaggcatgtggttgtaaggcagaacccacagaccttgcaggaagaaggctctcggggccatggcccaggtcagcatcaacaatgactacagcgagtgggacttgagcacggatgccggggagcgggctcggctgctgcagagtccctgtgtggacacagcccccaagagtgagtgggaagcctctcctgggggtctggacagaggcaccacttccacacttggggccatcttcatcgtcgtcaacgcgtgcctgggtgcagggttactcaacttcccagcagccttcagcactgcggggggcgtggcagcaggcatcgcactgcagatgggtatgctggttttcatcatcagtggccttgtcatcctggcctactgctcccaggccagcaatgagaggacctaccaggaggtggtatgggctgtgtgtggcaagctgacaggtgtgctatgtgaggtggccatcgctgtctacacctttggcacctgcattgccttcctaatcatcattggcgaccagcaggacaagattatagctgtgatggcgaaagagccggagggggccagcggcccttggtacacagaccgcaagttcaccatcagcctcactgccttcctcttcatcctgcccctctccatccccagggagattggtttccagaaatatgccagcttcctgagcgtcgtgggtacctggtacgtcacagccatcgttatcatcaagtacatctggccagataaagagatgaccccagggaacatcctgaccaggccggcttcctggatggctgtgttcaatgccatgcccaccatctgcttcggatttcagtgccacgtcagcagtgtgcccgtcttcaacagcatgcagcagcctgaagtgaagacctggggtggagtggtgacagctgccatggtcatagccctcgctgtctacatggggacaggcatctgtggcttcctgacctttggagctgctgtggatcctgacgtgctcctgtcctatccctcggaggacatggccgtggccgttgcccgagccttcatcatcctgagcgtgctcacctcctaccctatcctgcacttctgtgggcgggcggtggtggaaggcctgtggctgcgctaccagggggtgccagtggaggaggacgtggggcgggagcggcggcggcgagtgctgcagacgctggtctggttcctgctcaccctgctgctggcgctcttcatccctgacatcggcaaggtgatctcagtcattggaggcctggccgcctgcttcatcttcgtcttcccagggctgtgcctcattcaagccaaactctctgagatggaagaggtcaaaccagccagctggtgggtgctggtcagctacggagtcctcttggtcaccctgggagccttcatcttcggccagaccacagccaacgccatctttgtggatctcttggcataaccactgcctcccagggaacacaaggcctttgccattggtcgcaggaacccatctcttagagctatggggccattcttagtccacgatcattccaactggtgggatgacatccggacatcctcttccagggactggggcaaactcaggccccacacctctggacagctcaaatccagtccccttcctgctccccagtcctggcagtgccgtggatggcggcaggaagtctcacatcatagaggacccctcctcctctcccagttctcaacttctccatgcctggaatccacgggtgaagagagtcggtagatctcataagaaagaatccagtctgacttccctctggagaatgactatggacagaaggccaccatcctccacagagcaccctgtcctgagtaggggttgtgctcattaccccaggccagtggtagcttcctcaggagcctggccacttccaacggtagcactgaagtcatgcaaatgcatagtcaggtagattcagaccttgtccacaccttcctgggcaacccccaccatgaacctgtcagcctctttcccatagctaatagacatttcccaggccttgaggggccccaccctgtctctttcatcaaacctgatggtccaggctgggcatccctctcctcctccatccccagacatcaccaggtctaatgtttacaaacggtgccagcccggctctgaagccaagggccgtcccgtgccacggtgctgtgagtattcctccgttagctttccccataaggttgggagtatctgcttttgtgtctgagatgggcccctcttttcagaggccgcagggtgggtgatggagaaggctgagaacctttcagaccctctgtgtgggctgggctggtcagaatcagggtgtacctccccgacaccttctttttcagtgatgttttctcttcttcctgcctttcctctgcctcctcccctgccagccctagcgtgactacccagagacaaaaaaa

SEQ ID NO: 24699 - DNA, 2760 bp, Homo sapiens
  misc_feature (24)..(25): n is a, c, g, or t
tcggctaggtacgaggctgggtgnngcccccaagctccatttcatgagtaagcgtgagagccgctcagtttcctccagctctgctgaagccagcacagaagtagcccaaactcttccctctgctgacagcaaattttaggcaaagtcttgagaaagaagaaattgggtccagaaagggaagtgaggagaatcagatcccagacctttggggagaaggagcaaccgcctctggcacagcccatcagggagaaagagcaggttgagaagagtcctaagctaacagccccaaacaggtgggtgttgctcagctccctgaggcatgtggttgtaaggcagaacccacagaccttgcaggaagaaggctctcggggccatggcccaggtcagcatcaacaatgactacagcgagtgggacttgagcacggatgccggggagcgggctcggctgctgcagagtccctgtgtggacacagcccccaagagtgagtgggaagcctctcctgggggtctggacagaggcaccacttccacacttggggccatcttcatcgtcgtcaacgcgtgcctgggtgcagggttactcaacttcccagcagccttcagcactgcggggggcgtggcagcaggcatcgcactgcagatgggtatgctggttttcatcatcagtggccttgtcatcctggcctactgctcccaggccagcaatgagaggacctaccaggaggtggtatgggctgtgtgtggcaagctgacaggtgtgctatgtgaggtggccatcgctgtctacacctttggcacctgcattgccttcctaatcatcattggcgaccagcaggacaagattatagctgtgatggcgaaagagccggagggggccagcggcccttggtacacagaccgcaagttcaccatcagcctcactgccttcctcttcatcctgcccctctccatccccagggagattggtttccagaaatatgccagcttcctgagcgtcgtgggtacctggtacgtcacagccatcgttatcatcaagtacatctggccagataaagagatgaccccagggaacatcctgaccaggccggcttcctggatggctgtgttcaatgccatgcccaccatctgcttcggatttcagtgccacgtcagcagtgtgcccgtcttcaacagcatgcagcagcctgaagtgaagacctggggtggagtggtgacagctgccatggtcatagccctcgctgtctacatggggacaggcatctgtggcttcctgacctttggagctgctgtggatcctgacgtgctcctgtcctatccctcggaggacatggccgtggccgttgcccgagccttcatcatcctgagcgtgctcacctcctaccctatcctgcacttctgtgggcgggcggtggtggaaggcctgtggctgcgctaccagggggtgccagtggaggaggacgtggggcgggagcggcggcggcgagtgctgcagacgctggtctggttcctgctcaccctgctgctggcgctcttcatccctgacatcggcaaggtgatctcagtcattggaggcctggccgcctgcttcatcttcgtcttcccagggctgtgcctcattcaagccaaactctctgagatggaagaggtcaaaccagccagctggtgggtgctggtcagctacggagtcctcttggtcaccctgggagccttcatcttcggccagaccacagccaacgccatctttgtggatctcttggcataaccactgcctcccagggaacacaaggcctttgccattggtcgcaggaacccatctcttagagctatggggccattcttagtccacgatcattccaactggtgggatgacatccggacatcctcttccagggactggggcaaactcaggccccacacctctggacagctcaaatccagtccccttcctgctccccagtcctggcagtgccgtggatggcggcaggaagtctcacatcatagaggacccctcctcctctcccagttctcaacttctccatgcctggaatccacgggtgaagagagtcggtagatctcataagaaagaatccagtctgacttccctctggagaatgactatggacagaaggccaccatcctccacagagcaccctgtcctgagtaggggttgtgctcattaccccaggccagtggtagcttcctcaggagcctggccacttccaacggtagcactgaagtcatgcaaatgcatagtcaggtagattcagaccttgtccacaccttcctgggcaacccccaccatgaacctgtcagcctctttcccatagctaatagacatttcccaggccttgaggggccccaccctgtctctttcatcaaacctgatggtccaggctgggcatccctctcctcctccatccccagacatcaccaggtctaatgtttacaaacggtgccagcccggctctgaagccaagggccgtcccgtgccacggtgctgtgagtattcctccgttagctttccccataaggttgggagtatctgcttttgtgtctgagatgggcccctcttttcagaggccgcagggtgggtgatggagaaggctgagaacctttcagaccctctgtgtgggctgggctggtcagaatcagggtgtacctccccgacaccttctttttcagtgatgttttctcttcttcctgcctttcctctgcctcctcccctgccagccctagcgtgactacccagagacaaaaaaa

SEQ ID NO: 24700 - DNA, 2764 bp, Homo sapiens
ctagacaggccgggcgtaatcgggcgaggatccccaagctccatttcatgagtaagcgtgagagccgctcagtttcctccagctctgctgaagccagcacagaagtagcccaaactcttccctctgctgacagcaaattttaggcaaagtcttgagaaagaagaaattgggtccagaaagggaagtgaggagaatcagatcccagacctttggggagaaggagcaaccgcctctggcacagcccatcagggagaaagagcaggttgagaagagtcctaagctaacagccccaaacaggtgggtgttgctcagctccctgaggcatgtggttgtaaggcagaacccacagaccttgcaggaagaaggctctcggggccatggcccaggtcagcatcaacaatgactacagcgagtgggacttgagcacggatgccggggagcgggctcggctgctgcagagtccctgtgtggacacagcccccaagagtgagtgggaagcctctcctgggggtctggacagaggcaccacttccacacttggggccatcttcatcgtcgtcaacgcgtgcctgggtgcagggttactcaacttcccagcagccttcagcactgcggggggcgtggcagcaggcatcgcactgcagatgggtatgctggttttcatcatcagtggccttgtcatcctggcctactgctcccaggccagcaatgagaggacctaccaggaggtggtatgggctgtgtgtggcaagctgacaggtgtgctatgtgaggtggccatcgctgtctacacctttggcacctgcattgccttcctaatcatcattggcgaccagcaggacaagattatagctgtgatggcgaaagagccggagggggccagcggcccttggtacacagaccgcaagttcaccatcagcctcactgccttcctcttcatcctgcccctctccatccccagggagattggtttccagaaatatgccagcttcctgagcgtcgtgggtacctggtacgtcacagccatcgttatcatcaagtacatctggccagataaagagatgaccccagggaacatcctgaccaggccggcttcctggatggctgtgttcaatgccatgcccaccatctgcttcggatttcagtgccacgtcagcagtgtgcccgtcttcaacagcatgcagcagcctgaagtgaagacctggggtggagtggtgacagctgccatggtcatagccctcgctgtctacatggggacaggcatctgtggcttcctgacctttggagctgctgtggatcctgacgtgctcctgtcctatccctcggaggacatggccgtggccgttgcccgagccttcatcatcctgagcgtgctcacctcctaccctatcctgcacttctgtgggcgggcggtggtggaaggcctgtggctgcgctaccagggggtgccagtggaggaggacgtggggcgggagcggcggcggcgagtgctgcagacgctggtctggttcctgctcaccctgctgctggcgctcttcatccctgacatcggcaaggtgatctcagtcattggaggcctggccgcctgcttcatcttcgtcttcccagggctgtgcctcattcaagccaaactctctgagatggaagaggtcaaaccagccagctggtgggtgctggtcagctacggagtcctcttggtcaccctgggagccttcatcttcggccagaccacagccaacgccatctttgtggatctcttggcataaccactgcctcccagggaacacaaggcctttgccattggtcgcaggaacccatctcttagagctatggggccattcttagtccacgatcattccaactggtgggatgacatccggacatcctcttccagggactggggcaaactcaggccccacacctctggacagctcaaatccagtccccttcctgctccccagtcctggcagtgccgtggatggcggcaggaagtctcacatcatagaggacccctcctcctctcccagttctcaacttctccatgcctggaatccacgggtgaagagagtcggtagatctcataagaaagaatccagtctgacttccctctggagaatgactatggacagaaggccaccatcctccacagagcaccctgtcctgagtaggggttgtgctcattaccccaggccagtggtagcttcctcaggagcctggccacttccaacggtagcactgaagtcatgcaaatgcatagtcaggtagattcagaccttgtccacaccttcctgggcaacccccaccatgaacctgtcagcctctttcccatagctaatagacatttcccaggccttgaggggccccaccctgtctctttcatcaaacctgatggtccaggctgggcatccctctcctcctccatccccagacatcaccaggtctaatgtttacaaacggtgccagcccggctctgaagccaagggccgtcccgtgccacggtgctgtgagtattcctccgttagctttccccataaggttgggagtatctgcttttgtgtctgagatgggcccctcttttcagaggccgcagggtgggtgatggagaaggctgagaacctttcagaccctctgtgtgggctgggctggtcagaatcagggtgtacctccccgacaccttctttttcagtgatgttttctcttcttcctgcctttcctctgcctcctcccctgccagccctagcgtgactacccagagacaaaaaaa

SEQ ID NO: 24701 - DNA, 464 bp, Homo sapiens
cttcctgagcgtcgtgggtacctggtacgtcacagccatcgttatcatcaagtacatctggccagataaagagatgaccccagggaacatcctgaccaggtgagggtgagggccctaggagacatggggaagaagccaccacttgggccccagcaggtgctgggtcaggaaccagaaggccacacaggtgctcttctcaaggctcatgagctcatcagggctgacttggtcattgtaggaaggaggaaagagcccctgctctgatgttactggaaggaagagcaagaatcagagacaggaggcactttgccacctacatccaacagatgagccagtgtgaggctaggccttgggttgtggaggaacctgagggtggaatcccagggtcgaattgcctgtgtttccagcatctgcttatctgtaatttctgtatctttgagggtgaatttattattaaaaaaaaa

SEQ ID NO: 24702 - DNA, 4289 bp, Homo sapiens
  misc_feature (1)..(3): n is a, c, g, or t
  misc_feature (5)..(5): n is a, c, g, or t
  misc_feature (7)..(7): n is a, c, g, or t
nnncngnctttctatgctgttcgtcacacagaaagctggaagctgatgagcacagatgatcaacagaaaatccaagcagctgcatttgacaaaggtgatgatcgaagacttggcaaaaagcctatattcagtagctcgcagcaaaggaaacaagtttctgactctggtgatataaaaatcaaatcttggaggggaaataacaagaaagagtgttggagttatctctctactaataaaaagatgaaatctgatggattaggagcatctggacattcgtcaagtaccaatagaaatagtataaataaaactctgaagcaagatgatgtaaaggaaaaagatggtacaaaaatagcatctaagattacaaaagaactaaaaactgggggaaaaaatgtttctggaaagcccaaaactgtaacaaaatccaaaacagaaaatggtgataaggcacggttggaaaacatgtcacctagacaagttgtagaaagatcagcaacagcagcagcagcagcaactggacagaagaatttactaaatggaaaaggagtgagaaatcaggaagggcaaatttcaggtgccagacccaaggtactcacaggaaacttaaatgtgcaagccaaagcaaagcctttgaagaaagctacagggaaggattcaccatgcctcagcatcgcaggaccctccagcagatccacagattcaagtatggaattctcaatttccactgaatgtctggatgaaccgaaagaaaatggatcaacagaagaagaaaagccttctggacataaactatccttttgtgattctccaggacagatgatgaaaaacagtgtagatagtgtcaaaaattccactgtagccataaaatctcgacctgtttcaagagttaccaatggaacttccaataaaaaaagtattcatgaacaagacactaatgtaaataacagtgtactaaagaaagtcagtggcaaaggatgtagtgagccagtaccacaggcaattttgaagaaaagaggaactagcaatggatgtactgcagctcagcagaggacaaagagtaccccatctaatcttactaaaactcaaggatcccaaggagagtcaccaaactcagtaaaatcttcagtctcttcaaggcagtctgatgaaaatgtggcaaagttggaccacaatacaactacagagaaacaagcacctaagagaaaaatggtcaagcaagtacacacagctttgcctaaggttaatgcaaaaatagtggcaatgcctaaaaatctaaatcagtcaaagaaaggtgaaactttgaataataaagattcaaaacagaaaatgcctcctggacaggttatatcaaaaactcagccttcctcccaaagacctttaaaacatgaaacatctactgtccaaaaaagtatgtttcatgatgtgcgtgataataacaacaaggacagtgtttctgaacagaagcctcacaaacctctcattaatcttgcatctgaaataagtgatgcagaagcactccagtcatcctgcaggcctgacccacaaaagccattaaacgatcaagaaaaagagaagttggcgttagaatgccaaaatatttcaaagctggataaatcattaaaacacgaactggaatcaaaacagatttgtttagataaaagtgaaacaaaatttcccaatcacaaagaaacagatgattgcgatgcagctaacatatgttgtcattctgttgggagtgataatgtaaattcaaaattttatagcaccacagccctaaaatacatggtttcaaatccaaatgaaaactccttgaactctaatccagtttgtgatttagactcaacaagtgcagggcaaatccatttgatatcagatagggagaaccaagtagggagaaaagatacaaacaaacaatcaagtattaaatgtgtggaagatgtttcactgtgtaatcctgaaaggacaaatggtaccttaaattctgctcaagaagacaaaaaatcgaaagttcctgtggaaggactgacaattcctagtaagttgtcagatgaatctgctatggatgaagacaaacatgctacagcagactcagatgtatcttccaagtgtttttcgggacagctatcagaaaaaaattctcctaaaaatatggaaacatcagaatctccagagagccatgaaactccagaaactccatttgtgggtcactggaatttgagtactggtgttctgcatcagcgagagagtcctgaatctgacactggcagtgctaccacctcctccgatgacataaagcccagatctgaagactatgatgctggagggtctcaggatgatgatgggtcaaatgacagaggtatctctaaatgtggcactatgctgtgccatgattttcttggaagaagtagcagtgataccagtactcctgaagaattaaaaatttatgatagtaatttaagaattgaagtaaaaatgaaaaagcaaagtaataatgatcttttccaagttaattcaacgagtgatgatgaaatccctaggaaaaggccagaaatttggtctcgatctgcaatagttcactctagggaaagagaaaatattccacgaggcagtgtccagtttgctcaggaaatagatcaggtatcttcttcagcagatgaaacagaagatgaaagatctgaagctgaaaacgttgcagaaaatttctctatatctaacccagctcctcagcagtttcagggaataattaatttagcttttgaagatgcaactgaaaatgaatgtcgtgaattttctgcaaataaaaagtttaaaaggtcagttttactttcagtcgatgaatgtgaagagctgggatcagatgaaggagaagtccatactccctttcaggcttctgtagattctttttcaccttctgatgtttttgatggcatttctcatgaacatcatggaaggacctgctattccagattctcacgagaaagtgaagataatattttagaatgtaaacaaaataaaggcaatagtgtatgtaaaaatgaaagcactgtcttggatcttagtagcattgactcttcaagaaaaaataaacagagtgtttcagccacagaaaaaaagaacacaatagacgtcctatccagtagaagcagacagcttcttcgagaagataaaaaagtaaacaatggaagcaatgtggaaaatgacattcagcaacgcagcaaattcttggatagtgatgtaaaatctcaagaaagaccatgtcacttggatcttcatcaaagagaacccaattctgacataccaaagaacagctctacaaaatctctagactcctttcggagtcaagttctgcctcaggaaggtccagtgaaagagagccattctacaactactgaaaaagctaatattgctttatctgcaggagacatagatgattgtgacacactggcacaaacccgcatgtatgaccatcggccttcaaaaaccctgtctccaatatatgagatggatgtaatagaagcatttgagcagaaagtggaatcagaaacacatgttacagatatggattttgaagatgaccaacattttgcaaaacaagattggacactactaaagcaactgctctctgaacaggattcaaacttagatgttacaaattccgttcctgaagacttaagtttagcacagtatctaatcaatcagacactacttttagcacgagatagctcaaaacctcagggtataacacatattgacactttgaacagatggagtgaactaacatctccacttgattcctcagcgagcatcaccatggctagtttttcctctgaagattgttcgcctcaaggcgagtggacaattctggaactggaaactcagcattaagtgttaacattttggaaaaatttatgccactcctttattttttgatgcctatattatatccaaatgataattgcattagccggatataaactttctttaatattgagtctttccaatttaatgaggtaaacatagtttatttattaatatatcacatatagaaaaatgtttttctaaagtttttgagcatgttttctctaattattagagaaattagaagacttataaggaaaccctagcttcagttttcctttcctagctgatgatttgttcacttaatcattattcaagaatttaaaatgtgaatgcagaagtagatcagtccctttactttttgctctgcatagggtaacatagtaatttaacaataaaaacttaccgtgcttgtgtccaaaaaaaaaaaa

SEQ ID NO: 24703 - DNA, 1886 bp, Homo sapiens
tgctgattctagaggatccacgtcgggatgcagtgtccagtttgctcaggaaatagatcaggtatcttcttcagcagatgaaacagaagatgaaagatctgaagctgaaaacgttgcagaaaatttctctatatctaacccagctcctcagcagtttcagggaataattaatttagcttttgaagatgcaactgaaaatgaatgtcgtgaattttctgcaaataaaaagtttaaaaggtcagttttactttcagtcgatgaatgtgaagagctgggatcagatgaaggagaagtccatactccctttcaggcttctgtagattctttttcaccttctgatgtttttgatggcatttctcatgaacatcatggaaggacctgctattccagattctcacgagaaagtgaagataatattttagaatgtaaacaaaataaaggcaatagtgtatgtaaaaatgaaagcactgtcttggatcttagtagcattgactcttcaagaaaaaataaacagagtgtttcagccacagaaaaaaagaacacaatagacgtcctatccagtagaagcagacagcttcttcgagaagataaaaaagtaaacaatggaagcaatgtggaaaatgacattcagcaacgcagcaaattcttggatagtgatgtaaaatctcaagaaagaccatgtcacttggatcttcatcaaagagaacccaattctgacataccaaagaacagctctacaaaatctctagactcctttcggagtcaagttctgcctcaggaaggtccagtgaaagagagccattctacaactactgaaaaagctaatattgctttatctgcaggtaatgtacagaaatagaaatgctaaatgcataagaaaataagtttataaaattttaaagttgtatgaagccctgaatgttatattttagtcagatagaataattacttaagcaacagattaaaattttaaatgaaaaatgtcttaatatgaaaattactcattctttattgttcacttaaaatcctaatgaagaagtaatatctagtaaaaattttgattgttatatagagctaacctactaagagattttaaatgaaagaataaaaagaaaaacttagtttgctgctatttagttatttatgtataatttaacacaagaattcttgactattagaaattttattatacattggatatgatttatagacttgatagtatataagaggcctgtgcaataactctagtaatatgtaactaaaagcactgaactattttaacaactagattgattattacaatttatatacattttacagagattaaaattttcaggatctgtctattctaaagttttcaaataaaaagataaatttcctaagagattatatttagaagcaatgataatatatgaaaaaagcccaggcttatttcatattgtttagatgattttctgtctaattgttttgtgttttttgtcttccttattatagtaattcagactaatgacccacatttaaaatatgcaatagtggctgactgagtagctattgtgtattataactaagaaaaatactgatcagtagtttcctgttcagcaaaatcggaagaataaggaggtctttaaagttgtactttttcgtttgtttgtccttgcttgcatcttcctttgcatgtgcaatatacaaataagcctttaggtgaaatgtatttatccctgccttttgcaacggacttaccctaaaagtcatcatcaaaacactatgtcttattttttttctctttttctattgtagtgaattagatatatgtgcacattctatgtttatgtttaaatgatttatgttttctgtatcacaagttttcaaattaaagtatggagaat

SEQ ID NO: 24704 - DNA, 4462 bp, Homo sapiens
  misc_feature (1)..(3): n is a, c, g, or t
  misc_feature (5)..(5): n is a, c, g, or t
  misc_feature (7)..(7): n is a, c, g, or t
nnncngnctttctatgctgttcgtcacacagaaagctggaagctgatgagcacagatgatcaacagaaaatccaagcagctgcatttgacaaaggtgatgatcgaagacttggcaaaaagcctatattcagtagctcgcagcaaaggaaacaagtttctgactctggtgatataaaaatcaaatcttggaggggaaataacaagaaagagtgttggagttatctctctactaataaaaagatgaaatctgatggattaggagcatctggacattcgtcaagtaccaatagaaatagtataaataaaactctgaagcaagatgatgtaaaggaaaaagatggtacaaaaatagcatctaagattacaaaagaactaaaaactgggggaaaaaatgtttctggaaagcccaaaactgtaacaaaatccaaaacagaaaatggtgataaggcacggttggaaaacatgtcacctagacaagttgtagaaagatcagcaacagcagcagcagcagcaactggacagaagaatttactaaatggaaaaggagtgagaaatcaggaagggcaaatttcaggtgccagacccaaggtactcacaggaaacttaaatgtgcaagccaaagcaaagcctttgaagaaagctacagggaaggattcaccatgcctcagcatcgcaggaccctccagcagatccacagattcaagtatggaattctcaatttccactgaatgtctggatgaaccgaaagaaaatggatcaacagaagaagaaaagccttctggacataaactatccttttgtgattctccaggacagatgatgaaaaacagtgtagatagtgtcaaaaattccactgtagccataaaatctcgacctgtttcaagagttaccaatggaacttccaataaaaaaagtattcatgaacaagacactaatgtaaataacagtgtactaaagaaagtcagtggcaaaggatgtagtgagccagtaccacaggcaattttgaagaaaagaggaactagcaatggatgtactgcagctcagcagaggacaaagagtaccccatctaatcttactaaaactcaaggatcccaaggagagtcaccaaactcagtaaaatcttcagtctcttcaaggcagtctgatgaaaatgtggcaaagttggaccacaatacaactacagagaaacaagcacctaagagaaaaatggtcaagcaagtacacacagctttgcctaaggttaatgcaaaaatagtggcaatgcctaaaaatctaaatcagtcaaagaaaggtgaaactttgaataataaagattcaaaacagaaaatgcctcctggacaggttatatcaaaaactcagccttcctcccaaagacctttaaaacatgaaacatctactgtccaaaaaagtatgtttcatgatgtgcgtgataataacaacaaggacagtgtttctgaacagaagcctcacaaacctctcattaatcttgcatctgaaataagtgatgcagaagcactccagtcatcctgcaggcctgacccacaaaagccattaaacgatcaagaaaaagagaagttggcgttagaatgccaaaatatttcaaagctggataaatcattaaaacacgaactggaatcaaaacagatttgtttagataaaagtgaaacaaaatttcccaatcacaaagaaacagatgattgcgatgcagctaacatatgttgtcattctgttgggagtgataatgtaaattcaaaattttatagcaccacagccctaaaatacatggtttcaaatccaaatgaaaactccttgaactctaatccagtttgtgatttagactcaacaagtgcagggcaaatccatttgatatcagatagggagaaccaagtagggagaaaagatacaaacaaacaatcaagtattaaatgtgtggaagatgtttcactgtgtaatcctgaaaggacaaatggtaccttaaattctgctcaagaagacaaaaaatcgaaagttcctgtggaaggactgacaattcctagtaagttgtcagatgaatctgctatggatgaagacaaacatgctacagcagactcagatgtatcttccaagtgtttttcgggacagctatcagaaaaaaattctcctaaaaatatggaaacatcagaatctccagagagccatgaaactccagaaactccatttgtgggtcactggaatttgagtactggtgttctgcatcagcgagagagtcctgaatctgacactggcagtgctaccacctcctccgatgacataaagcccagatctgaagactatgatgctggagggtctcaggatgatgatgggtcaaatgacagaggtatctctaaatgtggcactatgctgtgccatgattttcttggaagaagtagcagtgataccagtactcctgaagaattaaaaatttatgatagtaatttaagaattgaagtaaaaatgaaaaagcaaagtaataatgatcttttccaagttaattcaacgagtgatgatgaaatccctaggaaaaggccagaaatttggtctcgatctgcaatagttcactctagggaaagagaaaatattccacgaggcagtgtccagtttgctcaggaaatagatcaggtatcttcttcagcagatgaaacagaagatgaaagatctgaagctgaaaacgttgcagaaaatttctctatatctaacccagctcctcagcagtttcagggaataattaatttagcttttgaagatgcaactgaaaatgaatgtcgtgaattttctgcaaataaaaagtttaaaaggtcagttttactttcagtcgatgaatgtgaagagctgggatcagatgaaggagaagtccatactccctttcaggcttctgtagattctttttcaccttctgatgtttttgatggcatttctcatgaacatcatggaaggacctgctattccagattctcacgagaaagtgaagataatattttagaatgtaaacaaaataaaggcaatagtgtatgtaaaaatgaaagcactgtcttggatcttagtagcattgactcttcaagaaaaaataaacagagtgtttcagccacagaaaaaaagaacacaatagacgtcctatccagtagaagcagacagcttcttcgagaagataaaaaagtaaacaatggaagcaatgtggaaaatgacattcagcaacgcagcaaattcttggatagtgatgtaaaatctcaagaaagaccatgtcacttggatcttcatcaaagagaacccaattctgacataccaaagaacagctctacaaaatctctagactcctttcggagtcaagttctgcctcaggaaggtccagtgaaagagagccattctacaactactgaaaaagctaatattgctttatctgcaggtaatgtacagaaatagaaatgctaaatgcataagaaaataagtttataaaattttaaagttgtatgaagccctgaatgttatattttagtcagatagaataattacttaagcaacagattaaaattttaaatgaaaaatgtcttaatatgaaaattactcattctttattgttcacttaaaatcctaatgaagaagtaatatctagtaaaaattttgattgttatatagagctaacctactaagagattttaaatgaaagaataaaaagaaaaacttagtttgctgctatttagttatttatgtataatttaacacaagaattcttgactattagaaattttattatacattggatatgatttatagacttgatagtatataagaggcctgtgcaataactctagtaatatgtaactaaaagcactgaactattttaacaactagattgattattacaatttatatacattttacagagattaaaattttcaggatctgtctattctaaagttttcaaataaaaagataaatttcctaagagattatatttagaagcaatgataatatatgaaaaaagcccaggcttatttcatattgtttagatgattttctgtctaattgttttgtgttttttgtcttccttattatagtaattcagactaatgacccacatttaaaatatgcaatagtggctgactgagtagctattgtgtattataactaagaaaaatactgatcagtagtttcctgttcagcaaaatcggaagaataaggaggtctttaaagttgtactttttcgtttgtttgtccttgcttgcatcttcctttgcatgtgcaatatacaaataagcctttaggtgaaatgtatttatccctgccttttgcaacggacttaccctaaaagtcatcatcaaaacactatgtcttattttttttctctttttctattgtagtgaattagatatatgtgcacattctatgtttatgtttaaatgatttatgttttctgtatcacaagttttcaaattaaagtatggagaat

SEQ ID NO: 24705 - DNA, 591 bp, Homo sapiens
gatcaagcaaccctcccccatcggcttccccaaatgctgggattacaggtgtgagccactgtgcccagcctagtatcatattttatacaagataaattttaccaaaaattctaccatcaaatatagaagttactttagttttttaaaaaataatagttcacatattctgtttcatgtcttctcttgcctctcaccctgagcacccactgattcatacctgtttatctccccctcctttgcttcttagctcctgtttattcttcaggtctgagttttgggatcatttcatttggaaagcctcagggctgtgcccagggtgctctgcctggcccctgtactcccccgagccatctcttatgcctcactgtaatcccacctgtacttgtcagtggctttgctaccctgtgtgctctgaaagcacagggacgagtcttgtttgctcctgaatcctcatctgtcagggctggtcaggcacatagatgctacatggttagtaaatatttgtgcaatataaaggttggacttctttgttactatcattacagcttcttaaaaatgaacggccacaaaattatgaccggccgcaagctt

SEQ ID NO: 24706 - DNA, 323 bp, Homo sapiens
tttttggctaagcatactaaatgaactacaatcacgtattatgtaactccaaaaacggaattttctttaaatgctggaaagaaatgtaccattgctccatctccttttaagttactgtgtgataaatacaagtaaatattgtgacttccatctctactttcactttctaaaatactgctgtagaaaaatgaatgtaccattctgacagcttatgaaatggcagacaccacatgtaactgcatcaaagccaaacataaatttttagagaaaaattacaagaaagtttttctttccacttgggaggaaaaaagaaaacaggaaaa

SEQ ID NO: 24707 - DNA, 580 bp, Homo sapiens
cggaggtgggtagatagacccggagagacggcgaaggagctggaaaccgagccagggctgagccggctgacaacaggcatcgatcgaaggtttccggtaaccagcatacaccatctcatccgaaacagcggggttcggcttctcctatggcaggatctggggcgaaaagatcaagagatggtgaactggagaccagtctaaacacccaaggttgtaccacagagggagacctgctgtttgcccagaagtgtaaagaactccaaggatttatacctcctctcacagacctactcaatgggctgaagatgggtcgttttgagagaggattaagcagttttcagcagagtgtggcaatggacaggatccagcgtattgtaggtgttttgcagaagccacagatgggggaacgttacctaggaaccttgctacaggtagaagggatgttaaagacttggtttccacaaatagctgcccagaagtcatcattgggtggtggcaagcatcagctgaccaagcattttttccaaggccacccacaagtgaatttaagcttgcttttccttttccctggcattttccg

SEQ ID NO: 24708 - DNA, 2051 bp, Homo sapiens
cggaggtgggtagatagacccggagagacggcgaaggagctggaaaccgagccagggctgagccggctgacaacaggtaaggagattcggaggacaaagcgagctgttagggagtatttgggagtggatttgggggctgaatgcagatcttggtattgggagggtttgcatcacgtggcaggtgcgagcccagagagaccggcgcagggatcctgatcttgaaagattgggagagggcaggaggccagtctctatgggggcggttcccgtaggatcaccaggtgggttcgcgtgcccagattgactgcttgtgggtggcatggcctcaggtggagaggcttgctgcggactcaggctggcgaatagccctggcgaacaacgggcggaggggaaggtgtctttcaagtcggtatttactctgaactgagggaacgaaaagaacggaggccgcgtcagaccgagagctgctctgcggcggccagagagggaatcccaagctcttaatgggcgggggtgggggtagaaatgtctttttctattgtgtttgagaccggtaatattggggagggggagaacaagtattatcccacgcagtacaccccaatctcccagttcatttcctaatccttaaactccggtttcaaactccctcgctttgctcttcagttgcaggttccgatctttgggtactccaggagctgttctatagcccctgcttctggacctatggattctccatctagcgtttcttcctattcctcctactctctctcttcgtcttttcccacctccccagtgaacagtgactttggcttcccctctgatagtgagagggaggacaagggggcccatgggcccaggccagacactgttgggcagaggggaggttcacggcccagcccgggtcctatccgctgcaggcatcgatcgaaggtttccggtaaccagcatacaccatctcatccgaaacagcggggttcggcttctcctatggcaggatctggggcgaaaagatcaagagatggtgaactggagaccagtctaaacacccaaggttgtaccacagagggagacctgctgtttgcccagaagtgtaaagaactccaaggatttatacctcctctcacagacctactcaatgggctgaagatgggtcgttttgagagaggattaagcagttttcagcagagtgtggcaatggacaggatccagcgtattgtaggtgttttgcagaagccacagatgggggaacgttacctaggaaccttgctacaggtagaagggatgttaaagacttggtttccacaaatagctgcccagaagtcatcattgggtggtggcaagcatcagctgaccaagcattttccaagccaccacagtgattcagctgcttcctctcctgcatctcctatggaaaagatggaccagacacagctaggacatctagctttaaaaccaaagcagccttggcacctcacacaatggccagctatgaacctcacctggatccacaccactccaatttgcaacccccctctcagctccccaggtactatctcctttagccatggtcctttaggcactggaaccggcattggcgtcattcttttcctccagcatggagtgcaacccttcacccactctgccccaaccaccccagtcccacctactacagcatctcctgtcatccctggtgagcctatgaaactatctggagagggtcctcgttgctacagtttgccagtaactctgccatcagactggagctataccctatcccctcccagtctacccaccttggccagaaagatgaccataggacaccgggagcagcagagaagccatcctccagttgctgctgatgctcatcttctcaacctctagcccagggcatacagctgtccactgtgacttctaatttgtgtaaatatttatgtatatatgtatttttactattaatgtgtgcatttgtgttgagggaagataaatcctttctgattaaagaaatttttttatacctaaaaaaacaccacacacccacacacaccaac

SEQ ID NO: 24709 - DNA, 1461 bp, Homo sapiens
cggaggtgggtagatagacccggagagacggcgaaggagctggaaaccgagccagggctgagccggctgacaacagttgcaggttccgatctttgggtactccaggagctgttctatagcccctgcttctggacctatggattctccatctagcgtttcttcctattcctcctactctctctcttcgtcttttcccacctccccagtgaacagtgactttggcttcccctctgatagtgagagggaggacaagggggcccatgggcccaggccagacactgttgggcagaggggaggttcacggcccagcccgggtcctatccgctgcaggcatcgatcgaaggtttccggtaaccagcatacaccatctcatccgaaacagcggggttcggcttctcctatggcaggatctggggcgaaaagatcaagagatggtgaactggagaccagtctaaacacccaaggttgtaccacagagggagacctgctgtttgcccagaagtgtaaagaactccaaggatttatacctcctctcacagacctactcaatgggctgaagatgggtcgttttgagagaggattaagcagttttcagcagagtgtggcaatggacaggatccagcgtattgtaggtgttttgcagaagccacagatgggggaacgttacctaggaaccttgctacaggtagaagggatgttaaagacttggtttccacaaatagctgcccagaagtcatcattgggtggtggcaagcatcagctgaccaagcattttccaagccaccacagtgattcagctgcttcctctcctgcatctcctatggaaaagatggaccagacacagctaggacatctagctttaaaaccaaagcagccttggcacctcacacaatggccagctatgaacctcacctggatccacaccactccaatttgcaacccccctctcagctccccaggtactatctcctttagccatggtcctttaggcactggaaccggcattggcgtcattcttttcctccagcatggagtgcaacccttcacccactctgccccaaccaccccagtcccacctactacagcatctcctgtcatccctggtgagcctatgaaactatctggagagggtcctcgttgctacagtttgccagtaactctgccatcagactggagctataccctatcccctcccagtctacccaccttggccagaaagatgaccataggacaccgggagcagcagagaagccatcctccagttgctgctgatgctcatcttctcaacctctagcccagggcatacagctgtccactgtgacttctaatttgtgtaaatatttatgtatatatgtatttttactattaatgtgtgcatttgtgttgagggaagataaatcctttctgattaaagaaatttttttatacctaaaaaaacaccacacacccacacacaccaac

SEQ ID NO: 24710 - DNA, 1975 bp, Homo sapiens
cggaggtgggtagatagacccggagagacggcgaaggagctggaaaccgagccagggctgagccggctgacaacaggtaaggagattcggaggacaaagcgagctgttagggagtatttgggagtggatttgggggctgaatgcagatcttggtattgggagggtttgcatcacgtggcaggtgcgagcccagagagaccggcgcagggatcctgatcttgaaagattgggagagggcaggaggccagtctctatgggggcggttcccgtaggatcaccaggtgggttcgcgtgcccagattgactgcttgtgggtggcatggcctcaggtggagaggcttgctgcggactcaggctggcgaatagccctggcgaacaacgggcggaggggaaggtgtctttcaagtcggtatttactctgaactgagggaacgaaaagaacggaggccgcgtcagaccgagagctgctctgcggcggccagagagggaatcccaagctcttaatgggcgggggtgggggtagaaatgtctttttctattgtgtttgagaccggtaatattggggagggggagaacaagtattatcccacgcagtacaccccaatctcccagttcatttcctaatccttaaactccggtttcaaactccctcgctttgctcttcagttgcaggttccgatctttgggtactccaggagctgttctatagcccctgcttctggacctatggattctccatctagcgtttcttcctattcctcctactctctctcttcgtcttttcccacctccccagtgaacagtgactttggcttcccctctgatagtgagagggaggacaagggggcccatgggcccaggccagacactgttgggcagaggggaggttcacggcccagcccgggtcctatccgctgcaggcatcgatcgaaggtttccggtaaccagcatacaccatctcatccgaaacagcggggttcggcttctcctatggcaggatctggggcgaaaagatcaagagatggtgaactggagaccagtctaaacacccaaggttgtaccacagagggagacctgctgtttgcccagaaggattaagcagttttcagcagagtgtggcaatggacaggatccagcgtattgtaggtgttttgcagaagccacagatgggggaacgttacctaggaaccttgctacaggtagaagggatgttaaagacttggtttccacaaatagctgcccagaagtcatcattgggtggtggcaagcatcagctgaccaagcattttccaagccaccacagtgattcagctgcttcctctcctgcatctcctatggaaaagatggaccagacacagctaggacatctagctttaaaaccaaagcagccttggcacctcacacaatggccagctatgaacctcacctggatccacaccactccaatttgcaacccccctctcagctccccaggtactatctcctttagccatggtcctttaggcactggaaccggcattggcgtcattcttttcctccagcatggagtgcaacccttcacccactctgccccaaccaccccagtcccacctactacagcatctcctgtcatccctggtgagcctatgaaactatctggagagggtcctcgttgctacagtttgccagtaactctgccatcagactggagctataccctatcccctcccagtctacccaccttggccagaaagatgaccataggacaccgggagcagcagagaagccatcctccagttgctgctgatgctcatcttctcaacctctagcccagggcatacagctgtccactgtgacttctaatttgtgtaaatatttatgtatatatgtatttttactattaatgtgtgcatttgtgttgagggaagataaatcctttctgattaaagaaatttttttatacctaaaaaaacaccacacacccacacacaccaac

SEQ ID NO: 24711 - DNA, 1207 bp, Homo sapiens
cggaggtgggtagatagacccggagagacggcgaaggagctggaaaccgagccagggctgagccggctgacaacaggcatcgatcgaaggtttccggtaaccagcatacaccatctcatccgaaacagcggggttcggcttctcctatggcaggatctggggcgaaaagatcaagagatggtgaactggagaccagtctaaacacccaaggttgtaccacagagggagacctgctgtttgcccagaagtgtaaagaactccaaggatttatacctcctctcacagacctactcaatgggctgaagatgggtcgttttgagagaggattaagcagttttcagcagagtgtggcaatggacaggatccagcgtattgtaggtgttttgcagaagccacagatgggggaacgttacctaggaaccttgctacaggtagaagggatgttaaagacttggtttccacaaatagctgcccagaagtcatcattgggtggtggcaagcatcagctgaccaagcattttccaagccaccacagtgattcagctgcttcctctcctgcatctcctatggaaaagatggaccagacacagctaggacatctagctttaaaaccaaagcagccttggcacctcacacaatggccagctatgaacctcacctggatccacaccactccaatttgcaacccccctctcagctccccaggtactatctcctttagccatggtcctttaggcactggaaccggcattggcgtcattcttttcctccagcatggagtgcaacccttcacccactctgccccaaccaccccagtcccacctactacagcatctcctgtcatccctggtgagcctatgaaactatctggagagggtcctcgttgctacagtttgccagtaactctgccatcagactggagctataccctatcccctcccagtctacccaccttggccagaaagatgaccataggacaccgggagcagcagagaagccatcctccagttgctgctgatgctcatcttctcaacctctagcccagggcatacagctgtccactgtgacttctaatttgtgtaaatatttatgtatatatgtatttttactattaatgtgtgcatttgtgttgagggaagataaatcctttctgattaaagaaatttttttatacctaaaaaaacaccacacacccacacacaccaac

SEQ ID NO: 24712 - DNA, 1412 bp, Homo sapiens
cggaggtgggtagatagacccggagagacggcgaaggagctggaaaccgagccagggctgagccggctgacaacaggtaaggagattcggaggacaaagcgagctgttagggagtatttgggagtggatttgggggctgaatgcagatcttggtattgggagggtttgcatcacgtggcaggtgcgagcccagagagaccggcgcagggatcctgatcttgaaagattgggagagggcaggaggccagtctctatgggggcggttcccgtaggatcaccaggcatcgatcgaaggtttccggtaaccagcatacaccatctcatccgaaacagcggggttcggcttctcctatggcaggatctggggcgaaaagatcaagagatggtgaactggagaccagtctaaacacccaaggttgtaccacagagggagacctgctgtttgcccagaagtgtaaagaactccaaggatttatacctcctctcacagacctactcaatgggctgaagatgggtcgttttgagagaggattaagcagttttcagcagagtgtggcaatggacaggatccagcgtattgtaggtgttttgcagaagccacagatgggggaacgttacctaggaaccttgctacaggtagaagggatgttaaagacttggtttccacaaatagctgcccagaagtcatcattgggtggtggcaagcatcagctgaccaagcattttccaagccaccacagtgattcagctgcttcctctcctgcatctcctatggaaaagatggaccagacacagctaggacatctagctttaaaaccaaagcagccttggcacctcacacaatggccagctatgaacctcacctggatccacaccactccaatttgcaacccccctctcagctccccaggtactatctcctttagccatggtcctttaggcactggaaccggcattggcgtcattcttttcctccagcatggagtgcaacccttcacccactctgccccaaccaccccagtcccacctactacagcatctcctgtcatccctggtgagcctatgaaactatctggagagggtcctcgttgctacagtttgccagtaactctgccatcagactggagctataccctatcccctcccagtctacccaccttggccagaaagatgaccataggacaccgggagcagcagagaagccatcctccagttgctgctgatgctcatcttctcaacctctagcccagggcatacagctgtccactgtgacttctaatttgtgtaaatatttatgtatatatgtatttttactattaatgtgtgcatttgtgttgagggaagataaatcctttctgattaaagaaatttttttatacctaaaaaaacaccacacacccacacacaccaac

SEQ ID NO: 24713 - DNA, 1155 bp, Homo sapiens
cggaggtgggtagatagacccggagagacggcgaaggagctggaaaccgagccagggctgagccggctgacaacagcggggttcggcttctcctatggcaggatctggggcgaaaagatcaagagatggtgaactggagaccagtctaaacacccaaggttgtaccacagagggagacctgctgtttgcccagaagtgtaaagaactccaaggatttatacctcctctcacagacctactcaatgggctgaagatgggtcgttttgagagaggattaagcagttttcagcagagtgtggcaatggacaggatccagcgtattgtaggtgttttgcagaagccacagatgggggaacgttacctaggaaccttgctacaggtagaagggatgttaaagacttggtttccacaaatagctgcccagaagtcatcattgggtggtggcaagcatcagctgaccaagcattttccaagccaccacagtgattcagctgcttcctctcctgcatctcctatggaaaagatggaccagacacagctaggacatctagctttaaaaccaaagcagccttggcacctcacacaatggccagctatgaacctcacctggatccacaccactccaatttgcaacccccctctcagctccccaggtactatctcctttagccatggtcctttaggcactggaaccggcattggcgtcattcttttcctccagcatggagtgcaacccttcacccactctgccccaaccaccccagtcccacctactacagcatctcctgtcatccctggtgagcctatgaaactatctggagagggtcctcgttgctacagtttgccagtaactctgccatcagactggagctataccctatcccctcccagtctacccaccttggccagaaagatgaccataggacaccgggagcagcagagaagccatcctccagttgctgctgatgctcatcttctcaacctctagcccagggcatacagctgtccactgtgacttctaatttgtgtaaatatttatgtatatatgtatttttactattaatgtgtgcatttgtgttgagggaagataaatcctttctgattaaagaaatttttttatacctaaaaaaacaccacacacccacacacaccaac

SEQ ID NO: 24714 - DNA, 488 bp, Homo sapiens
ctttctccacatttctttttttctcatttctcccctctctagcattttccaagccaccacagtgattcagctgcttcctctcctgcatctcctatggaaaagatggaccagacacagctaggacatctagctttaaaaccaaagcagccttggcacctcacacaatggccagctatgaacctcacctggatccacaccactccaatttgcaacccccctctcagctccccaggtactatctcctttagccatggtcctttaggcactggaaccggcattggcgtcattcttttcctccagcatggagtgcaacccttcacccactctgccccaaccaccccagtcccacctactacagcatctcctgtcatccctggtgagcctatgaaactatctggagagggtcctcgttgctacagtttgccagtaactctgccatcagactggagctataccctatcccctcccagtctacccaccttggccag

SEQ ID NO: 24715 - DNA, 1189 bp, Homo sapiens
ggagagacgaccaaggaagctggaacgcgagccaggtctgataccggatgatgactaggcatcgatcgaaggtttccggtaaccagcatacaccatctcatccgaaacagcggggttcggcttctcctatggcaggatctggggcgaaaagatcaagagatggtgaactggagaccagtctaaacacccaaggttgtaccacagagggagacctgctgtttgcccagaagtgtaaagaactccaaggatttatacctcctctcacagacctactcaatgggctgaagatgggtcgttttgagagaggattaagcagttttcagcagagtgtggcaatggacaggatccagcgtattgtaggtgttttgcagaagccacagatgggggaacgttacctaggaaccttgctacaggtagaagggatgttaaagacttggtttccacaaatagctgcccagaagtcatcattgggtggtggcaagcatcagctgaccaagcattttccaagccaccacagtgattcagctgcttcctctcctgcatctcctatggaaaagatggaccagacacagctaggacatctagctttaaaaccaaagcagccttggcacctcacacaatggccagctatgaacctcacctggatccacaccactccaatttgcaacccccctctcagctccccaggtactatctcctttagccatggtcctttaggcactggaaccggcattggcgtcattcttttcctccagcatggagtgcaacccttcacccactctgccccaaccaccccagtcccacctactacagcatctcctgtcatccctggtgagcctatgaaactatctggagagggtcctcgttgctacagtttgccagtaactctgccatcagactggagctataccctatcccctcccagtctacccaccttggccagaaagatgaccataggacaccgggagcagcagagaagccatcctccagttgctgctgatgctcatcttctcaacctctagcccagggcatacagctgtccactgtgacttctaatttgtgtaaatatttatgtatatatgtatttttactattaatgtgtgcatttgtgttgagggaagataaatcctttctgattaaagaaatttttttatacctaaaaaaacaccacacacccacacacaccaac

SEQ ID NO: 24716 - DNA, 493 bp, Homo sapiens
taacatggtacttaggcacataaagttaacagcctattggatgcatactcaggcctgttaagtaatgaatccatgatcctggctgtgaactccaggtatgataagctatcatgctcttttatttcaccaattggatatattagtgaaatgttatatctttaaaaacatgcaattgtgaaagataagaaattactccaaacttcaccatcataatttggtgactactatttctttcttatactctttcccagtctttttgtattgcgtagacaagcagataatctttctagctgctgaggcaagcttcatttgccatcagtttgaagatgcatctcaatgtaagaaatactaagatgtgaaaaacatattatcattgattacagaaaatgggtcagtaatatatctcaactgtttaaagcttagcatggctttgtggacttggctgggaatgtaaccactctttgcattattatgtttatggagaaatatattc

SEQ ID NO: 24717 - DNA, 424 bp, Homo sapiens
gcccagcaactctcatttgaattgagggtggaagcggttctcgggcacagtatgccaaggcccagggcgtccaagggacagagcagagatcacagatgctgaacgggtggggaaggagcactaggcagggcatttctgatgagactttgatttgggaggtacgaaagttgtatgaggaatcttgataaactgcttagagtgaatggagatgagtaggaatcaccaccattcacatactggctctgcaagccactcagcacagctctgcacctgctcttatggaggagaagacaagcagaagagaatgttctgatctagaagagttcgtgtaagagcatgaaggcaacagcacttgagatgtggtgcacatgagcaaaatttcagtttatgtggaccatgtttaagtttaagttcatttaagttc

SEQ ID NO: 24718 - DNA, 575 bp, Homo sapiens
acccagagccagcaaatgagacacagggtttattgagaggactgacttacagggtgatccagtggcagtgggctggacaggagaatcccaatcgcttgcaaaaagcctgcagttgataaatcaccttcacttagcacctgctcctacatggcaatcctcatttaactcaaagcaaagggcctcaatcccttgtgtggtccatgttccacaggatgggccaggggttcacatgttccttatagacaaggaatgaatctctggattccttagctcggaattctgaacacacattcttcttctgaagttattgctgtcaggtgcacctacactgaatgctgccaactgccagacttagaggagtaattggctgagggattctggcttccccatcataaattccaaaaaaagcaggagatctcattaaaaaaaaaaaattgactatgatgctcatagatgacttttccacattttccatgatcgatttggaagttggttgaagatggagatcctgacattctatttttcctcgatagtcttggtttaaaataaaggcctaggaaaaatatgtgaacttt

SEQ ID NO: 24719 - DNA, 2665 bp, Homo sapiens
cccgcacccccaagctgccactgcagcagtcagagtggcagctgaaggctcggttcatgccgtgcccccgggcagttctggtgaggctaagcaagaggcctctgcatcttgacacctaggagagcagggacggagtctcccagggtggaggaccatgctgcgccgcaagccctccaatgccagtgagaaggagcccactcagaagaaaaagctctcccttcagcgctccagcagcttcaaggattttgccaaatccaaacccagctcccccgtggtgagcgagaaggagtttaatctggatgataacattccagaagatgactcaggtgtccccaccccagaagatgctgggaagagtggcaaaaagctggggaagaagtggagggcagtgatttcccgaaccatgaacaggaagatgggcaagatgatggtgaaggccctgtcagaagagatggcagacactctggaggagggctctgcctccccgacatctccagactacagcctggacagccctggccctgagaagatggcgctggccttttctgagcaagaggagcatgaacttccggtgctcagccgccaggcatcaacaggcagtgagctctgcagccccagcccaggttctggcagcttcggggaggaaccacctgccccccagtacacagggcctttctgtggccgggcacgagtccacaccgacttcactcccagcccctatgaccacgactcgctgaaactgcagaaaggagatgtgatccagatcattgaaaagccacctgtgggcacgtggctgggcctactcaatggcaaggtgggctctttcaaattcatctatgtggatgtgctgcccgaggaggccgtggggcatgcccgccccagccgccgacagagcaagggcaagaggcccaagcctaagaccctgcatgagctgctggagcgcatcggcctggaggagcacacatccaccctcctgctcaatggctaccagacactggaagacttcaaagagctgcgagaaacacacctcaatgagctgaacatcatggatccacagcaccgggccaagctgctcacggccgccgagctgctgctggactatgacactggcagtgaggaggctgaagagggcgccgagagcagccaggagccagtggcacacacagtgtcggaacccaaggtggacatcccgcgcgactcaggctgctttgagggctcggagagcgggcgcgatgacgcagagctggcaggcactgaggagcagctgcaaggcctctccctggccggggcaccttgaggtggcggtggcaataggccaaggctgggacccagctgcaaaggctgtaggagtgggcccagcctcccgtggtggcccaggtcctgaggactggcactgagcctggccctgcttccccagggacacttagggccacagaggccaggccagggccctacaggttccaggctcagctggagtggttggggagtcgcccaagggcacatcccacctgcctgagccccgccctccaccagcgactgacagcgcagcccctcctggcaccaactgctcccctgccatggccacggccacagcaagtggggcactgggaaaccctgcccatgtccctcaccaacaaggcctccaaatcctcctcacccccaaacacctacccctgtcgcactgctcctgaaaagggggccaagtcaatgtttcaggtcagtctaaaaaccctagggaagctggccatttaaaagaacccaaactgaccatgggtaaatccagttcccctaaataaggcctgaagaaatccacaggtaccattcccactttccttctccctagctttcttagaggtttggccactaaatcttatgagacttgaaccaagtggcttcctctttctaggcttaggacgggttggggttagaaagggtgatcactgaaggccttgcctgctctgacattctgtgacattaaatgtctattctcctgttacctgtggcctgggacaccagtggggtttatcgaggggaccagaggggcctcaggctttcagatgaaatggctcctcctactcacccactttattcctctccatgtaattcaggacaagctgcaacttcccccagcttaacacaatgcccatacctcatacgatatgcgccctcccgttccatccctggccccctcaaacgagacttctcacaaggctgattacagatggtcaaacctggcttccaaggacagaattgcctctcggaagccagctgtggatctgagtccagagttggccacttgtgtgggtcctcacaagcaaagagagcactaaacttgacattgggggtccaccactccaactttgctttctgaaggttttggtgtacattgagccccagaaggaaaggagagtatctgtgagtgggggcctcccttgaccccagtacgaagtctatgccctgaatccccagagtagcccttcctggtgcccaactggcctggggacaaacagcgtccactacatctaggactgccggctaagtggacacacttcttgacctcctaccaggaactttggtaaaagctagctttggggaaggggttgggtgtaaatatgagagggtggagggagaccagctggtagcaataaacatgggtagaactaaa

SEQ ID NO: 24720 - DNA, 2376 bp, Homo sapiens
cccgcacccccaagctgccactgcagcagtcagagtggcagctgaaggctcggttcatgccgtgcccccgggcagttctggtgaggctaagcaagaggcctctgcatcttgacacctaggagagcagggacggagtctcccagggtggaggaccatgctgcgccgcaagccctccaatgccagtgagaaggagcccactcagaagaaaaagctctcccttcagcgctccagcagcttcaaggattttgccaaatccaaacccagctcccccgtggtgagcgagaaggagtttaatctggatgataacattccagaagatgactcaggtgtccccaccccagaagatgctgggaagagtggcaaaaagctggggaagaagtggagggcagtgatttcccgaaccatgaacaggaagatgggcaagatgatggtgaaggccctgtcagaagagatggcagacactctggaggagggctctgcctccccgacatctccagactacagcctggacagccctggccctgagaagatggcgctggccttttctgagcaagaggagcatgaacttccggtgctcagccgccaggcatcaacaggcagtgagctctgcagccccagcccaggttctggcagcttcggggaggaaccacctgccccccagtacacagggcctttctgtggccgggcacgagtccacaccgacttcactcccagcccctatgaccacgactcgctgaaactgcagaaaggagatgtgatccagatcattgaaaagccacctgtgggcacgtggctgggcctactcaatggcaaggtgggctctttcaaattcatctatgtggatgtgctgcccgaggaggccgtggggcatgcccgccccagccgccgacagagcaagggcaagaggcccaagcctaagaccctgcatgagctgctggagcgcatcggcctggaggagcacacatccaccctcctgctcaatggctaccagacactggaagacttcaaagagctgcgagaaacacacctcaatgagctgaacatcatggatccacagcaccgggccaagctgctcacggccgccgagctgctgctggactatgacactggcagtgaggaggctgaagagggcgccgagagcagccaggagccagtggcacacacagtgtcggaacccaaggtggacatcccgcgcgactcaggctgctttgagggctcggagagcgggcgcgatgacgcagagctggcaggcactgaggagcagctgcaaggcctctccctggccggggcaccttgaggtggcggtggcaataggccaaggctgggacccagctgcaaaggctgtaggagtgggcccagcctcccgtggtggcccaggtcctgaggactggcactgagcctggccctgcttccccagggacacttagggccacagaggccaggccagggccctacaggttccaggctcagctggagtggttggggagtcgcccaagggcacatcccacctgcctgagccccgccctccaccagcgactgacagcgcagcccctcctggcaccaactgctcccctgccatggccacggccacagcaagtggggcactgggaaaccctgcccatgtccctcaccaacaaggcctccaaatcctcctcacccccaaacacctacccctgtcgcactgctcctgaaaagggggccaagtcaatgtttcaggtcagtctaaaaaccctagggaagctggccatttaaaagaacccaaactgaccatgggtaaatccagttcccctaaataaggcctgaagaaatccacaggtaccattcccactttcttcccccagcttaacacaatgcccatacctcatacgatatgcgccctcccgttccatccctggccccctcaaacgagacttctcacaaggctgattacagatggtcaaacctggcttccaaggacagaattgcctctcggaagccagctgtggatctgagtccagagttggccacttgtgtgggtcctcacaagcaaagagagcactaaacttgacattgggggtccaccactccaactttgctttctgaaggttttggtgtacattgagccccagaaggaaaggagagtatctgtgagtgggggcctcccttgaccccagtacgaagtctatgccctgaatccccagagtagcccttcctggtgcccaactggcctggggacaaacagcgtccactacatctaggactgccggctaagtggacacacttcttgacctcctaccaggaactttggtaaaagctagctttggggaaggggttgggtgtaaatatgagagggtggagggagaccagctggtagcaataaacatgggtagaactaaa

SEQ ID NO: 24721 - DNA, 2213 bp, Homo sapiens
  misc_feature (1996)..(1996): n is a, c, g, or t
cccgcacccccaagctgccactgcagcagtcagagtggcagctgaaggctcggttcatgccgtgcccccgggcagttctggtgaggctaagcaagaggcctctgcatcttgacacctaggagagcagggacggagtctcccagggtggaggaccatgctgcgccgcaagccctccaatgccagtgagaaggagcccactcagaagaaaaagctctcccttcagcgctccagcagcttcaaggattttgccaaatccaaacccagctcccccgtggtgagcgagaaggagtttaatctggatgataacattccagaagatgactcaggtgtccccaccccagaagatgctgggaagagtggcaaaaagctggggaagaagtggagggcagtgatttcccgaaccatgaacaggaagatgggcaagatgatggtgaaggccctgtcagaagagatggcagacactctggaggagggctctgcctccccgacatctccagactacagcctggacagccctggccctgagaagatggcgctggccttttctgagcaagaggagcatgaacttccggtgctcagccgccaggcatcaacaggcagtgagctctgcagccccagcccaggttctggcagcttcggggaggaaccacctgccccccagtacacagggcctttctgtggccgggcacgagtccacaccgacttcactcccagcccctatgaccacgactcgctgaaactgcagaaaggagatgtgatccagatcattgaaaagccacctgtgggcacgtggctgggcctactcaatggcaaggtgggctctttcaaattcatctatgtggatgtgctgcccgaggaggccgtggggcatgcccgccccagccgccgacagagcaagggcaagaggcccaagcctaagaccctgcatgagctgctggagcgcatcggcctggaggagcacacatccaccctcctgctcaatggctaccagacactggaagacttcaaagagctgcgagaaacacacctcaatgagctgaacatcatggatccacagcaccgggccaagctgctcacggccgccgagctgctgctggactatgacactggcagtgaggaggctgaagagggcgccgagagcagccaggagccagtggcacacacagtgtcggaacccaaggtggacatcccgcgcgactcaggctgctttgagggctcggagagcgggcgcgatgacgcagagctggcaggcactgaggagcagctgcaaggcctctccctggccggggcaccttgaggtggcggtggcaataggccaaggctgggacccagctgcaaaggctgtaggagtgggcccagcctcccgtggtggcccaggtcctgaggactggcactgagcctggccctgcttccccagggacacttagggccacagaggccaggccagggccctacaggttccaggctcagctggagtggttggggagtcgcccaagggcacatcccacctgcctgagccccgccctccaccagcgactgacagcgcagcccctcctggcaccaactgctcccctgccatggccacggccacagcaagtggggcactgggaaaccctgcccatgtccctcaccaacaaggcctccaaatcctcctcacccccaaacacctacccctgtcgcactgctcctgaaaagggggccaagtcaatgtttcaggtcagtctaaaaaccctagggaagctggccatttaaaagaacccaaactgaccatgggtaaatccagttcccctaaataaggcctgaagaaatccacaggtaccattcccactttccttctccctagctttcttagaggtttggccactaaatcttatgagacttgaaccaagtggcttcctctttctaggcttaggacgggttggggttagaaagggtgatcactgaaggccttgcctgctctgacattctgtgacattaaatgtctattctcctgttngaaaaaaaaaaaaaaaaaaaaaacaaaaaaaaaaaaaaaaaaaaaaaataaaaaaaaaaaaacaaaaaaaaaggacaaacaaaaaaaaaacaagaaaaaaaaaaaaaagggggcccggggtcccaaaaaggggccccgccctttgaaaaaccccctaaagatttgggaaaaaaaatttaattaaggggggaccccccctttgtctaaaaaaaaaagg

SEQ ID NO: 24722 - DNA, 2832 bp, Homo sapiens
cccgcacccccaagctgccactgcagcagtcagagtggcagctgaaggctcggttcatgccgtgcccccgggcagttctggtgaggctaagcaagaggcctctgcatcttgacacctaggagagcagggacggagtctcccagggtggaggaccatgctgcgccgcaagccctccaatgccagtgagaaggagcccactcagaagaaaaagctctcccttcagcgctccagcagcttcaaggattttgccaaatccaaacccagctcccccgtggtgagcgagaaggagtttaatctggatgataacattccagaagatgactcaggtgtccccaccccagaagatgctgggaagagtggcaaaaagctggggaagaagtggagggcagtgatttcccgaaccatgaacaggaagatgggcaagatgatggtgaaggccctgtcagaagagatggcagacactctggaggagggctctgcctccccgacatctccagactacagcctggacagccctggccctgagaagatggcgctggccttttctgagcaagaggagcatgaacttccggtgctcagccgccaggcatcaacaggcagtgagctctgcagccccagcccaggttctggcagcttcggggaggaaccacctgccccccagtacacagggcctttctgtggccgggcacgagtccacaccgacttcactcccagcccctatgaccacgactcgctgaaactgcagaaaggagatgtgatccagatcattgaaaagccacctgtgggcacgtggctgggcctactcaatggcaaggtgggctctttcaaattcatctatgtggatgtgctgcccgaggaggccgtggggcatgcccgccccagccgccgacagagcaagggcaagaggcccaagcctaagaccctgcatgagctgctggagcgcatcggcctggaggagcacacatccaccctcctgctcaatggctaccagacactggaagacttcaaagagctgcgagaaacacacctcaatgagctgaacatcatggatccacagcaccgggccaagctgctcacggccgccgagctgctgctggactatgacactggcagtgaggaggctgaagagggcgccgagagcagccaggagccagtggcacacacagtgtcggaacccaaggtggacatcccgcgcgactcaggctgctttgagggctcggagagcgggcgcgatgacgcagagctggcaggcactgaggagcagctgcaaggcctctccctggccggggcaccttgaggtggcggtggcaataggccaaggctgggacccagctgcaaaggctgtaggagtgggcccagcctcccgtggtggcccaggtcctgaggactggcactgagcctggccctgcttccccagggacacttagggccacagaggccaggccagggccctacaggttccaggctcagctggagtggttggggagtcgcccaagggcacatcccacctgcctgagccccgccctccaccagcgactgacagcgcagcccctcctggcaccaactgctcccctgccatggccacggccacagcaagtggggcactgggaaaccctgcccatgtccctcaccaacaaggcctccaaatcctcctcacccccaaacacctacccctgtcgcactgctcctgaaaagggggccaagtcaatgtttcaggtcagtctaaaaaccctagggaagctggccatttaaaagaacccaaactgaccatgggtaaatccagttcccctaaataaggcctgaagaaatccacaggtaccattcccactttccttctccctagctttcttagaggtttggccactaaatcttatgagacttgaaccaagtggcttcctctttctaggcttaggacgggttggggttagaaagggtgatcactgaaggccttgcctgctctgacattctgtgacattaaatgtctattctcctgttacctgtggcctgggacaccagtggggtttatcgaggggaccagaggggcctcaggctttcagatgaaatggctcctcctactcacccactttattcctctccatgtaattcaggacaagctgcaacttcccccagcttaacacaatgcccatacctcatacgatatgcgccctcccgttccatccctggccccctcaaacgagacttctcacaaggctgattacagatggtcaaacctggcttccaaggacagaattgcctctcggaagccagctgtggatctgagtccagagttggccacttgtgtgggtcctcacaagcaaagagagcactaaacttgacattgggggtccaccactccaactttgctttctgaaggttttggtgtacattgagccccagaaggaaaggagagtatctgtgagtgggggcctcccttgaccccagtacgaagtctatgccctgaatccccagagtagcccttcctggtgcccaactggcctggggacaaacagcgtccactacatctaggactgccggctaagtggacacacttcttgacctcctaccaggaactttggtaaaagctagctttggggaaggggttgggtgtaaatatgagagggtggagggagaccagctggtagcaataaacatgggtagaactaaaaaaaaacataaaaaaacaagggggcggtaaaaatacacaagggggaccagttaggatccggtttgtaaagggccaaaggggataaaagaagcacgggataaaggggagggaacgcgtggttgggagacactttggggatggaacagaaagaggaaaagtgagggcag

SEQ ID NO: 24723 - DNA, 1811 bp, Homo sapiens
ggaggctcgccctaccctgcctcgccgctgctgggccgccccctctactacacgtcgcccttctacggcaactacacaaactacgggaacttgaacgcggcgctgcagggccagggtctcctgcggtacaactctgcggccgcggcccccggcgaggccctgcacaccgcgccaaaggcggccagcgacgcgggcaaggcgggcgcgcacccgctcgagtcccactaccggtccccgggcggcggctacgagcccaagaaagatgccagcgagggctgcaccgtggttggcgggggcgtccagccctacctatagaagggccgagcacagcaatgcaagtaagtgggcaccctggtgcttcccagaccctgtggagcctcccagcaccaacttgcttaatgtgtttttcttgcttctggtcatggggttagaagacagagcatttcaatcttgtccagcttttctttccttaagggggaaactatattttctgttttatagattccctctttttggcacaagttctatcactcctttacctagggaaggaaaaaaaaatatatatatatatgtgtgtgtgtgtgtgtgtaatatatatatgtatatatatagtacatgtatatatatagtacatgtgtatatatatattacacactactgttgttttcttttgaaacaatagattattaaaatctgggcatttatatgcaatttagagccatttttactatgctagacacataatagacacatgctttgatgagcttgggctaccaaaacttggagtagcaaaaacctttatagatgatgtttgcaaaataagactgaagagacacgaggcgtactagtcttttatcagccctgcccaacctcccctccacccatgtccaagtggacaggactctgacattctcccggggctcacaacagtatctcaaaaaatatgttgctttgcaacgagtcagaattactaatcatagatcttgaagataagaaagatttggaaccacttcagatcaactcgtttttataatggtgttgttgtggaactgaaagattggggatgatttggttttttccttggtccacaggtaggtgtcacaattgctttgaaaaaaaaaaaaaaaaaaaaaagtcagcaggccattctctcttcccaagctcataaatttacagatacaacaaacagatgtctaaatccagaccacatcttgtgccactgtaaaagagaaggatccacacagcactgtcagcccacagactctaacaattggaacagactattgttggacatatgtgaatttgttggcatagtatagtttccccgatgtatgtgtgacttttgaaaacaatctgtttttctcaggatatcttgaattgatcacttcattgccacggtatatattctataggtgtgataggatttactgtaaagtttatttgtaaaagatgtacacagtagaaataaaacgtgatggaagaacttgagtacttcagaagtggaaacaaatttgatatttatttttataatgatataaagcttctagtaatttatgcaagttgtattgcaatggaatctaaactttttgtaaataaattctgcctggtttttatttgaacattgctggttatacaatctttgttggttgtttaacacgaattctttactaatttatatcttaaattgtaaataaaaacagactagtctacaataatatgatgtttggggcttatttttcctagaagaatgatttggggtagagctctagtgaataacctccaggtgatctgacctcacctttttaatgaaa

SEQ ID NO: 24724 - DNA, 1989 bp, Homo sapiens
ggaggctcgccctaccctgcctcgccgctgctgggccgccccctctactacacgtcgcccttctacggcaactacacaaactacgggaacttgaacgcggcgctgcagggccagggtctcctgcggtacaactctgcggccgcggcccccggcgaggccctgcacaccgcgccaaaggcggccagcgacgcgggcaaggcgggcgcgcacccgctcgagtcccactaccggtccccgggcggcggctacgagcccaagaaagatgccagcgagggctgcaccgtggttggcgggggcgtccagccctacctatagaagggccgagcacagcaatgcaagtaagtgggcaccctggtgcttcccagaccctgtggagcctcccagcaccaacttgcttaatgtgtttttcttgcttctggtcatggggttagaagacagagcatttcaatcttgtccagcttttctttccttaagggggaaactatattttctgttttatagattccctctttttggcacaagttctatcactcctttacctagggaaggaaaaaaaaatatatatatatatgtgtgtgtgtgtgtgtgtaatatatatatgtatatatatagtacatgtatatatatagtacatgtgtatatatatattacacactactgttgttttcttttgaaacaatagattattaaaatctgggcatttatatgcaatttagagccatttttactatgctagacacataatagacacatgctttgatgagcttgggctaccaaaacttggagtagcaaaaacctttatagatgatgtttgcaaaataagactgaagagacacgaggcgtactagtcttttatcagccctgcccaacctcccctccacccatgtccaagtggacaggactctgacattctcccggggctcacaacagtatctcaaaaaatatgttgctttgcaacgagtcagaattactaatcatagatcttgaagataagaaagatttggaaccacttcagatcaactcgtttttataatggtgttgttgtggaactgaaagattggggatgatttggttttttccttggtccacaggtaggtgtcacaattgctttgaaaaaaaaaaaaaaaaaaaaaagtcagcaggccattctctcttcccaagctcataaatttacagatacaacaaacagatgtctaaatccagaccacatcttgtgccactgtaaaagagaaggatccacacagcactgtcagcccacagactctaacaattggaacagactattgttggacatatgtgaatttgttggcatagtatagtttccccgatgtatgtgtgacttttgaaaacaatctgtttttctcaggatatcttgaattgatcacttcattgccacggtatatattctataggtgtgataggatttactgtaaagtttatttgtaaaagatgtacacagtagaaataaaacgtgatggaagaacttgagtacttcagaagtggaaacaaatttgatatttatttttataatgatataaagcttctagtaatttatgcaagttgtattgcaatggaatctaaactttttgtaaataaattctgcctggtttttatttgaaaaaaaaaaaaaaaaaaaaaaaaaaaaaaaaaaaaaaaaaaaaaaaaaaaaaaagaaaaaaaaaaaaccaaaagacgagcgggaagactaacaagaagagcaccacaaggaggaggatcgctgaaatagtgaatagggtctcggtgaagaaaatagcgaggagggagcggggagactaagccaaggagagtgaaaaaagaagaatgagagaaggtaggggtcagagacatgataaacagacaggaggtaagggaagaaaagcgggataagaacataaatagaggggagagacagaaccaggagatgggttggagacaaaagactggtcggaaactcgcgagagggcggagaaaagaacgacggaaaagaga

SEQ ID NO: 24725 - DNA, 876 bp, Homo sapiens
ggaggctcgccctaccctgcctcgccgctgctgggccgccccctctactacacgtcgcccttctacggcaactacacaaactacgggaacttgaacgcggcgctgcagggccagggtctcctgcggtacaactctgcggccgcggcccccggcgaggccctgcacaccgcgccaaaggcggccagcgacgcgggcaaggcgggcgcgcacccgctcgagtcccactaccggtccccgggcggcggctacgagcccaagaaagatgccagcgagggctgcaccgtggttggcgggggcgtccagccctacctatagaagggccgagcacagcaatgcaaatacaacaaacagatgtctaaatccagaccacatcttgtgccactgtaaaagagaaggatccacacagcactgtcagcccacagactctaacaattggaacagactattgttggacatatgtgaatttgttggcatagtatagtttccccgatgtatgtgtgacttttgaaaacaatctgtttttctcaggatatcttgaattgatcacttcattgccacggtatatattctataggtgtgataggatttactgtaaagtttatttgtaaaagatgtacacagtagaaataaaacgtgatggaagaacttgagtacttcagaagtggaaacaaatttgatatttatttttataatgatataaagcttctagtaatttatgcaagttgtattgcaatggaatctaaactttttgtaaataaattctgcctggtttttatttgaacattgctggttatacaatctttgttggttgtttaacacgaattctttactaatttatatcttaaattgtaaataaaaacagactagtctacaata

SEQ ID NO: 24726 - DNA, 1714 bp, Homo sapiens
ggaggctcgccctaccctgcctcgccgctgctgggccgccccctctactacacgtcgcccttctacggcaactacacaaactacgggaacttgaacgcggcgctgcagggccagggtctcctgcggtacaactctgcggccgcggcccccggcgaggccctgcacaccgcgccaaaggcggccagcgacgcgggcaaggcgggcgcgcacccgctcgagtcccactaccggtccccgggcggcggctacgagcccaagaaagatgccagcgagggctgcaccgtggttggcgggggcgtccagccctacctatagaagggccgagcacagcaatgcaagtaagtgggcaccctggtgcttcccagaccctgtggagcctcccagcaccaacttgcttaatgtgtttttcttgcttctggtcatggggttagaagacagagcatttcaatcttgtccagcttttctttccttaagggggaaactatattttctgttttatagattccctctttttggcacaagttctatcactcctttacctagggaaggaaaaaaaaatatatatatatatgtgtgtgtgtgtgtgtgtaatatatatatgtatatatatagtacatgtatatatatagtacatgtgtatatatatattacacactactgttgttttcttttgaaacaatagattattaaaatctgggcatttatatgcaatttagagccatttttactatgctagacacataatagacacatgctttgatgagcttgggctaccaaaacttggagtagcaaaaacctttatagatgatgtttgcaaaataagactgaagagacacgaggcgtactagtcttttatcagccctgcccaacctcccctccacccatgtccaagtggacaggactctgacattctcccggggctcacaacagtatctcaaaaaatatgttgctttgcaacgagtcagaattactaatcatagatcttgaagataagaaagatttggaaccacttcagatcaactcgtttttataatggtgttgttgtggaactgaaagattggggatgatttggttttttccttggtccacaggtaggtgtcacaattgctttgaaaaaaaaaaaaaaaaaaaaaagtcagcaggccattctctcttcccaagctcataaatttacagatacaacaaacagatgtctaaatccagaccacatcttgtgccactgtaaaagagaaggatccacacagcactgtcagcccacagactctaacaattggaacagactattgttggacatatgtgaatttgttggcatagtatagtttccccgatgtatgtgtgacttttgaaaacaatctgtttttctcaggatatcttgaattgatcacttcattgccacggtatatattctataggtgtgataggatttactgtaaagtttatttgtaaaagatgtacacagtagaaataaaacgtgatggaagaacttgagtacttcagaagtggaaacaaatttgatatttatttttataatgatataaagcttctagtaatttatgcaagttgtattgcaatggaatctaaactttttgtaaataaattctgcctggtttttatttgaacattgctggttatacaatctttgttggttgtttaacacgaattctttactaatttatatcttaaattgtaaataaaaacagactagtctacaata

SEQ ID NO: 24727 - DNA, 961 bp, Homo sapiens
ggaggctcgccctaccctgcctcgccgctgctgggccgccccctctactacacgtcgcccttctacggcaactacacaaactacgggaacttgaacgcggcgctgcagggccagggtctcctgcggtacaactctgcggccgcggcccccggcgaggccctgcacaccgcgccaaaggcggccagcgacgcgggcaaggcgggcgcgcacccgctcgagtcccactaccggtccccgggcggcggctacgagcccaagaaagatgccagcgagggctgcaccgtggttggcgggggcgtccagccctacctatagaagggccgagcacagcaatgcaagtaggtgtcacaattgctttgaaaaaaaaaaaaaaaaaaaaaagtcagcaggccattctctcttcccaagctcataaatttacagatacaacaaacagatgtctaaatccagaccacatcttgtgccactgtaaaagagaaggatccacacagcactgtcagcccacagactctaacaattggaacagactattgttggacatatgtgaatttgttggcatagtatagtttccccgatgtatgtgtgacttttgaaaacaatctgtttttctcaggatatcttgaattgatcacttcattgccacggtatatattctataggtgtgataggatttactgtaaagtttatttgtaaaagatgtacacagtagaaataaaacgtgatggaagaacttgagtacttcagaagtggaaacaaatttgatatttatttttataatgatataaagcttctagtaatttatgcaagttgtattgcaatggaatctaaactttttgtaaataaattctgcctggtttttatttgaacattgctggttatacaatctttgttggttgtttaacacgaattctttactaatttatatcttaaattgtaaataaaaacagactagtctacaata

SEQ ID NO: 24728 - DNA, 860 bp, Homo sapiens
ggaggctcgccctaccctgcctcgccgctgctgggccgccccctctactacacgtcgcccttctacggcaactacacaaactacgggaacttgaacgcggcgctgcagggccagggtctcctgcggtacaactctgcggccgcggcccccggcgaggccctgcacaccgcgccaaaggcggccagcgacgcgggcaaggcgggcgcgcacccgctcgagtcccactaccggtccccgggcggcggctacgagcccaagaaaggtaggcggcccgcggccggcggcgcccgggaggggagggagagccagccccggggaggcggagcgcccgggagacccgagggagggtccgggaagaagatccagggggccactcctgggacccagaattagcagagtgagggcggagggcgagatggaagccaaagaaggtgtggccctctttttagacttgccctgttattatttatttttacttaatttactgttattttgactattactatcgtggctgtcttagtttcggcaaacccagattgccacgaaattcaaattacagcgtgtcgccctaatgagcctgggtgtgtttcggtgtcttgttaaggagtcagagttgaatccgcttttctgccgttggctagaggcaaacagaacgttccagttactctcagaggcgttttgtcttcaaaagataaaatcaaatgttttttccgcttttctgatgccgtacgacgatcataaacaaagccgttatttgacgtgcactctcttcccggtggtgctcatggccttggctcctcagggagactacttagaagcgggacttacgaaaaatcagccattaaagtttacaacttttg

SEQ ID NO: 24729 - DNA, 4435 bp, Homo sapiens
cggggtttcaccgtgttggccaggatggtctcgatctcctgacctcgtgatctgtccacctcggcttccccaagtgctgggattacaggcatgagccaccgcgcccagcctagccatatttttatctgcatatatcagaatgtttctctcctttgaacttattaacaaaaaaggaacatgcttttcatacctagagtcctaatttcttcatcatgaaggttgctattcaaattgatccatcattttaattttaccaatggctcaaaaattctgttcagtaaatgtctttgtgactggccaatggcataaattatgtttaagattatgaacttttctgacagttgcagccaatgttttccctacgataccagatttccatcttggggcatattggattgttgtatttaagacagtcagaataatgatagtgtgtggtctccagaggtagtcagaatcctgctattgagttctttttatatcttccttttcaattttttattaccattttgtttgtttagactacactttgtagggattgaggggccaaatatctcttggagtggaattcctgtgttttgagccttaccacccggaaatatgagctatactagatagcctcatgatagcatttacgataagaacttatctcgtgtgttcatgtaattttttgagtaggaactgttttatcttgaatattgtagctaactatatatagcagaactgcctcagtctttttaagaaggaaataaataatatatgtgtatgaatttatatatacatatacactcatagacaaacttaacagttggggtcattctaacagttaaaacaattgttccattgtttaaatctcagatcctggtaaaatgttcttaatttgtctgtgtacattttcctttcatggacagaccattggagtacattaattttcttaatctgccatttggcagttcatttaatataccattttttggcaacttggtaactaagaatcacagccaaaatttgttaacatcaaagaaagctctgccatataccccgttactaaattattatacatccagcagattctgggatgtactaacttagggttaactttgttgttgttgataatactagattgctccctctttaattcttcttctggtgcaaggttgctgcttaagttaccctgggaaatactactacaaggtcaaattttctagtatcttacagcctgattgaaggtgattcagatctttgctcaatataaatggattttccaagattctctgggccatccttgacccacaggtgatctcgctggagtatattaacttaacttcagtgccagttggtttggtgccatgagatccataatgaatccagaacttcaccattgcttagatataagagtcccttggaagaataatgccactgatgatgggggtcagaaggtgtattaactcaacatagagggcttttagatttttcttcaaaaaaatttcgagaaaagtattcttttaccctccaaacagttaacagctcttagtttctccaaatatgctctttgatttacttatttttagttaaagatggtaatttattgaacaatgaaatccgtaatatattgatttaaggacaaaagtgaagttttagaattataaaagtacttaaatattatatattttccatttcataattgttttcctttctctgtggctttaaagtttttgactattttacaatgttaatcactaggtaacttgccatatttctggttctatattaagttctatcctttataatgctgttattataaagctggtttttagcatttgtctgtagcaatagaaattttactaagtctctgttctcccagtaagttttttcttttctcagtaagtccctaagaaaacatttgtttgccactcttactattcccaatcttggattgttcgagctgaaaaaaaatttgatgagaaacaggaggatccttttctggtgaatataggttcctgctttaagaatgtggaaatccattgctttatataactaatatacacacagattaattaaaattgtgagaaataattcacacatgacaagtaggtaacatgcatgagttttgaatttttttaaaaacccaactgtttgacaaaatatagaacccaaattggtactttcttagaccagtgtaacctcacacctcagttttgcttttccaaccctgacttgaaaggcatatttgtatctttttattagtgatagtgaagctgtgacactaaccttttatacaaaagagtaaagaaagaaaaactacagcgattaagatgagaacagttctgcagttgttgaactagatcacagcattgtaggcagaataaaaaatgttcatatctgagaatattcctttcgccatcttttcccaaggccagacctcctggtggagcacagttaaaagtaacattctgggcctttgtaatcggagggctgtgtctccagctggcagcctttgttttaatatataatgcaggactgtggaaaacagttggcatagaatattttcacctaaaaaaagaaagaaaagacatacaaaactggattaattgcaaaaagagaatacagtaaaataccatataactggacaaagctagaagaacctttagaagatttgtctgaaaacagatttcaagagtgagcttttatacactgctcactaatttgcttgattactaccaactcttcttaaagttaacacgtttaaataaggtatttctggacttcctagcctttcagcaagcttagaggaactagccattagctagtgatgtaaaaatattttggggactgatgcccttaaaggttatgcccttgaaagttcttaccttttctctagtgatattaaggaacgagtgggtagtgttctcagggtgaccagctgccctaaagtgcctgggattgagggtttccctggatgcgggactttccctggatacaaaacttttaagcagagttttgtatatatgtggatttttctgataagtagcacatcagaggccttaaccactgcccaaaagcgattctccattgagagtacatatcttgaacttaagaaattcatttgctctgatttttaatcttgtaaagtttttgctaaactcaaaacaagtcccaggcacaccagaaggagctgaccaccttaggtgttcttgtgatttatccttacttccctatgttgtcatagttgcttctaaactcagctgcactatggctgtcaacatttctgatacttattgggatatgtgccatccagtcatttagtactttgaatggaacatgagatttataacacaggtaatagctgaaggtaccagtatggtggtgagactcacacttagtgatccagctaaggtaactgatgttataatggaacagagaagaggccaactagatagctaagttcttctgaacctatgtgtatatgtaagtacaaatcatgcgtccttatggggttaaacttaatctgaaatttacatttttcatagtaaaaggaaaccaattgttgcagatttcttttcttgtgaggaaatacatggcctttgatgctctggcgtctactgcatttcccagtctgttctgctcgagaagccagaatgtgttgttaacatttttccgtgaatgttgtgttaaaatgattaaatgcatcagccaatggcaagtgaaggaattgggtgtcctgatgcagactgagcagtttctctcaattgtagcctcatactcataaggtgcttaccagctagaacattgagcacgtgaggtgagattttttttctctgatggcattaactttgtaatgcaatatgatggatgcagaccctgttcttgtttccctctggaagtccttagtggctgcatccttggtgcactgtgatggagatattaaatgtgttctttgtgagctttcgttctatgattgtcaaaagtacgatgtggttccttttttatttttattaaacaatgagctgaggctttattacagctggttttcaagttaaaattgttgaatactgatgtctttctcccacctacaccaaatattttagtctatttaaagtacaaaaaaagttctgcttaagaaaacattgcttacatgtcctgtgatttctggtcaatttttatatatatttgtgtgcatcatctgtatgtgctttcactttttaccttgtttgctcttacctgtgttaacagccctgtcaccgttgaaaggtggacagttttcctagcattaaaagaaagccatttgagttgtttaccatgttactatgggactaatttttaattgttttaatttttatttaaactgatctttttttatatgggattacattttggtgttcactccctaaattatatggaaaccaaaaaaagtgattgtatttcacatatggacata

SEQ ID NO: 24730 - DNA, 4381 bp, Homo sapiens
cggggtttcaccgtgttggccaggatggtctcgatctcctgacctcgtgatctgtccacctcggcttccccaagtgctgggattacaggcatgagccaccgcgcccagcctagccatatttttatctgcatatatcagaatgtttctctcctttgaacttattaacaaaaaaggaacatgcttttcatacctagagtcctaatttcttcatcatgaaggttgctattcaaattgatccatcattttaattttaccaatggctcaaaaattctgttcagtaaatgtctttgtgactggccaatggcataaattatgtttaagattatgaacttttctgacagttgcagccaatgttttccctacgataccagatttccatcttggggcatattggattgttgtatttaagacagtcagaataatgatagtgtgtggtctccagaggtagtcagaatcctgctattgagttctttttatatcttccttttcaattttttattaccattttgtttgtttagactacactttgtagggattgaggggccaaatatctcttggagtggaattcctgtgttttgagccttaccacccggaaatatgagctatactagatagcctcatgatagcatttacgataagaacttatctcgtgtgttcatgtaattttttgagtaggaactgttttatcttgaatattgtagctaactatatatagcagaactgcctcagtctttttaagaaggaaataaataatatatgtgtatgaatttatatatacatatacactcatagacaaacttaacagttggggtcattctaacagttaaaacaattgttccattgtttaaatctcagatcctggtaaaatgttcttaatttgtctgtgtacattttcctttcatggacagaccattggagtacattaattttcttaatctgccatttggcagttcatttaatataccattttttggcaacttggtaactaagaatcacagccatacatccagcagattctgggatgtactaacttagggttaactttgttgttgttgataatactagattgctccctctttaattcttcttctggtgcaaggttgctgcttaagttaccctgggaaatactactacaaggtcaaattttctagtatcttacagcctgattgaaggtgattcagatctttgctcaatataaatggattttccaagattctctgggccatccttgacccacaggtgatctcgctggagtatattaacttaacttcagtgccagttggtttggtgccatgagatccataatgaatccagaacttcaccattgcttagatataagagtcccttggaagaataatgccactgatgatgggggtcagaaggtgtattaactcaacatagagggcttttagatttttcttcaaaaaaatttcgagaaaagtattcttttaccctccaaacagttaacagctcttagtttctccaaatatgctctttgatttacttatttttagttaaagatggtaatttattgaacaatgaaatccgtaatatattgatttaaggacaaaagtgaagttttagaattataaaagtacttaaatattatatattttccatttcataattgttttcctttctctgtggctttaaagtttttgactattttacaatgttaatcactaggtaacttgccatatttctggttctatattaagttctatcctttataatgctgttattataaagctggtttttagcatttgtctgtagcaatagaaattttactaagtctctgttctcccagtaagttttttcttttctcagtaagtccctaagaaaacatttgtttgccactcttactattcccaatcttggattgttcgagctgaaaaaaaatttgatgagaaacaggaggatccttttctggtgaatataggttcctgctttaagaatgtggaaatccattgctttatataactaatatacacacagattaattaaaattgtgagaaataattcacacatgacaagtaggtaacatgcatgagttttgaatttttttaaaaacccaactgtttgacaaaatatagaacccaaattggtactttcttagaccagtgtaacctcacacctcagttttgcttttccaaccctgacttgaaaggcatatttgtatctttttattagtgatagtgaagctgtgacactaaccttttatacaaaagagtaaagaaagaaaaactacagcgattaagatgagaacagttctgcagttgttgaactagatcacagcattgtaggcagaataaaaaatgttcatatctgagaatattcctttcgccatcttttcccaaggccagacctcctggtggagcacagttaaaagtaacattctgggcctttgtaatcggagggctgtgtctccagctggcagcctttgttttaatatataatgcaggactgtggaaaacagttggcatagaatattttcacctaaaaaaagaaagaaaagacatacaaaactggattaattgcaaaaagagaatacagtaaaataccatataactggacaaagctagaagaacctttagaagatttgtctgaaaacagatttcaagagtgagcttttatacactgctcactaatttgcttgattactaccaactcttcttaaagttaacacgtttaaataaggtatttctggacttcctagcctttcagcaagcttagaggaactagccattagctagtgatgtaaaaatattttggggactgatgcccttaaaggttatgcccttgaaagttcttaccttttctctagtgatattaaggaacgagtgggtagtgttctcagggtgaccagctgccctaaagtgcctgggattgagggtttccctggatgcgggactttccctggatacaaaacttttaagcagagttttgtatatatgtggatttttctgataagtagcacatcagaggccttaaccactgcccaaaagcgattctccattgagagtacatatcttgaacttaagaaattcatttgctctgatttttaatcttgtaaagtttttgctaaactcaaaacaagtcccaggcacaccagaaggagctgaccaccttaggtgttcttgtgatttatccttacttccctatgttgtcatagttgcttctaaactcagctgcactatggctgtcaacatttctgatacttattgggatatgtgccatccagtcatttagtactttgaatggaacatgagatttataacacaggtaatagctgaaggtaccagtatggtggtgagactcacacttagtgatccagctaaggtaactgatgttataatggaacagagaagaggccaactagatagctaagttcttctgaacctatgtgtatatgtaagtacaaatcatgcgtccttatggggttaaacttaatctgaaatttacatttttcatagtaaaaggaaaccaattgttgcagatttcttttcttgtgaggaaatacatggcctttgatgctctggcgtctactgcatttcccagtctgttctgctcgagaagccagaatgtgttgttaacatttttccgtgaatgttgtgttaaaatgattaaatgcatcagccaatggcaagtgaaggaattgggtgtcctgatgcagactgagcagtttctctcaattgtagcctcatactcataaggtgcttaccagctagaacattgagcacgtgaggtgagattttttttctctgatggcattaactttgtaatgcaatatgatggatgcagaccctgttcttgtttccctctggaagtccttagtggctgcatccttggtgcactgtgatggagatattaaatgtgttctttgtgagctttcgttctatgattgtcaaaagtacgatgtggttccttttttatttttattaaacaatgagctgaggctttattacagctggttttcaagttaaaattgttgaatactgatgtctttctcccacctacaccaaatattttagtctatttaaagtacaaaaaaagttctgcttaagaaaacattgcttacatgtcctgtgatttctggtcaatttttatatatatttgtgtgcatcatctgtatgtgctttcactttttaccttgtttgctcttacctgtgttaacagccctgtcaccgttgaaaggtggacagttttcctagcattaaaagaaagccatttgagttgtttaccatgttactatgggactaatttttaattgttttaatttttatttaaactgatctttttttatatgggattacattttggtgttcactccctaaattatatggaaaccaaaaaaagtgattgtatttcacatatggacata

SEQ ID NO: 24731 - DNA, 2175 bp, Homo sapiens
cccgggtcgacaactaatactaaattctcggccgcgtcgaccagcgattaagatgagaacagttctgcagttgttgaactagatcacagcattgtaggcagaataaaaaatgttcatatctgagaatattcctttcgccatcttttcccaaggccagacctcctggtggagcacagttaaaagtaacattctgggcctttgtaatcggagggctgtgtctccagctggcagcctttgttttaatatataatgcaggactgtggaaaacagttggcatagaatattttcacctaaaaaaagaaagaaaagacatacaaaactggattaattgcaaaaagagaatacagtaaaataccatataactggacaaagctagaagaacctttagaagatttgtctgaaaacagatttcaagagtgagcttttatacactgctcactaatttgcttgattactaccaactcttcttaaagttaacacgtttaaataaggtatttctggacttcctagcctttcagcaagcttagaggaactagccattagctagtgatgtaaaaatattttggggactgatgcccttaaaggttatgcccttgaaagttcttaccttttctctagtgatattaaggaacgagtgggtagtgttctcagggtgaccagctgccctaaagtgcctgggattgagggtttccctggatgcgggactttccctggatacaaaacttttaagcagagttttgtatatatgtggatttttctgataagtagcacatcagaggccttaaccactgcccaaaagcgattctccattgagagtacatatcttgaacttaagaaattcatttgctctgatttttaatcttgtaaagtttttgctaaactcaaaacaagtcccaggcacaccagaaggagctgaccaccttaggtgttcttgtgatttatccttacttccctatgttgtcatagttgcttctaaactcagctgcactatggctgtcaacatttctgatacttattgggatatgtgccatccagtcatttagtactttgaatggaacatgagatttataacacaggtaatagctgaaggtaccagtatggtggtgagactcacacttagtgatccagctaaggtaactgatgttataatggaacagagaagaggccaactagatagctaagttcttctgaacctatgtgtatatgtaagtacaaatcatgcgtccttatggggttaaacttaatctgaaatttacatttttcatagtaaaaggaaaccaattgttgcagatttcttttcttgtgaggaaatacatggcctttgatgctctggcgtctactgcatttcccagtctgttctgctcgagaagccagaatgtgttgttaacatttttccgtgaatgttgtgttaaaatgattaaatgcatcagccaatggcaagtgaaggaattgggtgtcctgatgcagactgagcagtttctctcaattgtagcctcatactcataaggtgcttaccagctagaacattgagcacgtgaggtgagattttttttctctgatggcattaactttgtaatgcaatatgatggatgcagaccctgttcttgtttccctctggaagtccttagtggctgcatccttggtgcactgtgatggagatattaaatgtgttctttgtgagctttcgttctatgattgtcaaaagtacgatgtggttccttttttatttttattaaacaatgagctgaggctttattacagctggttttcaagttaaaattgttgaatactgatgtctttctcccacctacaccaaatattttagtctatttaaagtacaaaaaaagttctgcttaagaaaacattgcttacatgtcctgtgatttctggtcaatttttatatatatttgtgtgcatcatctgtatgtgctttcactttttaccttgtttgctcttacctgtgttaacagccctgtcaccgttgaaaggtggacagttttcctagcattaaaagaaagccatttgagttgtttaccatgttactatgggactaatttttaattgttttaatttttatttaaactgatctttttttatatgggattacattttggtgttcactccctaaattatatggaaaccaaaaaaagtgattgtatttcacatatggacata

SEQ ID NO: 24732 - DNA, 2779 bp, Homo sapiens
  misc_feature (2759)..(2759): n is a, c, g, or t
  misc_feature (2774)..(2774): n is a, c, g, or t
cggggtttcaccgtgttggccaggatggtctcgatctcctgacctcgtgatctgtccacctcggcttccccaagtgctgggattacaggcatgagccaccgcgcccagcctagccatatttttatctgcatatatcagaatgtttctctcctttgaacttattaacaaaaaaggaacatgcttttcatacctagagtcctaatttcttcatcatgaaggttgctattcaaattgatccatcattttaattttaccaatggctcaaaaattctgttcagtaaatgtctttgtgactggccaatggcataaattatgtttaagattatgaacttttctgacagttgcagccaatgttttccctacgataccagatttccatcttggggcatattggattgttgtatttaagacagtcagaataatgatagtgtgtggtctccagaggtagtcagaatcctgctattgagttctttttatatcttccttttcaattttttattaccattttgtttgtttagactacactttgtagggattgaggggccaaatatctcttggagtggaattcctgtgttttgagccttaccacccggaaatatgagctatactagatagcctcatgatagcatttacgataagaacttatctcgtgtgttcatgtaattttttgagtaggaactgttttatcttgaatattgtagctaactatatatagcagaactgcctcagtctttttaagaaggaaataaataatatatgtgtatgaatttatatatacatatacactcatagacaaacttaacagttggggtcattctaacagttaaaacaattgttccattgtttaaatctcagatcctggtaaaatgttcttaatttgtctgtgtacattttcctttcatggacagaccattggagtacattaattttcttaatctgccatttggcagttcatttaatataccattttttggcaacttggtaactaagaatcacagccaaaatttgttaacatcaaagaaagctctgccatataccccgttactaaattattatacatccagcagattctgggatgtactaacttagggttaactttgttgttgttgataatactagattgctccctctttaattcttcttctggtgcaaggttgctgcttaagttaccctgggaaatactactacaaggtcaaattttctagtatcttacagcctgattgaaggtgattcagatctttgctcaatataaatggattttccaagattctctgggccatccttgacccacaggtgatctcgctggagtatattaacttaacttcagtgccagttggtttggtgccatgagatccataatgaatccagaacttcaccattgcttagatataagagtcccttggaagaataatgccactgatgatgggggtcagaaggtgtattaactcaacatagagggcttttagatttttcttcaaaaaaatttcgagaaaagtattcttttaccctccaaacagttaacagctcttagtttctccaaatatgctctttgatttacttatttttagttaaagatggtaatttattgaacaatgaaatccgtaatatattgatttaaggacaaaagtgaagttttagaattataaaagtacttaaatattatatattttccatttcataattgttttcctttctctgtggctttaaagtttttgactattttacaatgttaatcactaggtaacttgccatatttctggttctatattaagttctatcctttataatgctgttattataaagctggtttttagcatttgtctgtagcaatagaaattttactaagtctctgttctcccagtaagttttttcttttctcagtaagtccctaagaaaacatttgtttgccactcttactattcccaatcttggattgttcgagctgaaaaaaaatttgatgagaaacaggaggatccttttctggtgaatataggttcctgctttaagaatgtggaaatccattgctttatataactaatatacacacagattaattaaaattgtgagaaataattcacacatgacaagtaggtaacatgcatgagttttgaatttttttaaaaacccaactgtttgacaaaatatagaacccaaattggtactttcttagaccagtgtaacctcacacctcagttttgcttttccaaccctgacttgaaaggcatatttgtatctttttattagtgatagtgaagctgtgacactaaccttttatacaaaagagtaaagaaagaaaaactacagcgattaagatgagaacagttctgcagttgttgaactagatcacagcattgtaggcagaataaaaaatgttcatatctgagaatattcctttcgccatcttttcccaaggccagacctcctggtggagcacagttaaaagtaacattctgggcctttgtaatcggagggctgtgtctccagctggcagcctttgttttaatatataatgcaggactgtggaaaacagttggcatagaatattttcacctaaaaaaagaaagaaaagacatacaaaactggattaattgcaaaaagagaatacagtaaaataccatataactggacaaagctagaagaacctttagaagatttgtctgaaaacagatttcaagagtgagcttttatacactgctcactaatttgcttgattactaccaactcttcttaaagttaacacgttttgatcaaaggagaancaataaagggataanccata

SEQ ID NO: 24733 - DNA, 286 bp, Homo sapiens
gcgtcgactatatcttctttttgtgttagttttggtcatctctttggacccatcatcaaggggtctaatataagtatagctggaatcccagagaagaagaaatagagaggggggtatgagaaatatttgagggaacaatggctgagattttcccccaaattaatgacatatactaaaccacagatctaagaagttaagaaaaaccaagcaggatcaataacaacaacagcaacaacagtgataaaacctacatatatcataataaaattgctaaaaggacaaagag

SEQ ID NO: 24734 - DNA, 492 bp, Homo sapiens
  misc_feature (86)..(86): n is a, c, g, or t
gacacttgaagttcctaggacacaagaagttggacgttaatgttgtcatgacaagacttcaaagctccaaggcctgtagagctganactctgcttttggagaagtaactgacagagtgtagcctgtcacagactaagtgttcagaatgtcaaactgttatgtttatatgtattttgaagtccactagttaaggtcagttactcacatggggtctgagaaagtgtaatgtaacattcccaagaggggaaggagttcaccccaagtactcacatatggagtttgtattggcattctccagagggacagaactaatgggatatatgtataagtggaaggaagtttattagggagaattggctcacctgatcacaagttgaagtctcacagtaggccgtctgcacgctgaggaagaaagaagccagtagtggcgcagtacaagtttgaaagtctcaaaaccagaagagccgacagtgctgccttcagtctgtggcc

SEQ ID NO: 24735 - DNA, 595 bp, Homo sapiens
caaataaaagacagactcctttttctatgctgtttcctccctcgggactcttttgtttgtttggggatctgtcgtttatgtggcagactctccttacctgtcccttcgcattagcagtgccatactgaaagggtacatggccgctgaatgtggggacaagccttttggcctggagaggctcagtagctgtgggaaggtagcttatccccagaggactcctcggcctcctgcctggctgcaggcaggacaatgggaagagccagttgataggcagactatcccttgacccctgtggcttgaccttgatgtcacacccccagtctcaactgtgccaccggtccctgagtgtagagcagcttggctcccctccccacatgggcagagcagggcagggcaagatgggaggcccaggggctctctgggcttccacccttgctgcagacaactcagtacagttttctctggtcaacgaagtagactactatttgcccaggctggtctcagacaatctgcctgccttggcctcccaaagtcctggaattacaggcatgagcaactgcacccggccgtcgacgcggccgcgaatatagtagta

SEQ ID NO: 24736 - DNA, 566 bp, Homo sapiens
  misc_feature (408)..(408): n is a, c, g, or t
  misc_feature (551)..(551): n is a, c, g, or t
accaaaaccaggcaaaggcattacaagaaaagaaaactacagagatatcttacataaacataaatgcaaatgtcctcaacaaaatattatcaaatcaaatccaacaatgttaaaaactattatacaccacaagtaagtgagatttattgtaagtctggttcagcattcaaaaaaagcagtgaatataatctgtcacatcaaaagactattgagataatcatgtggtttttgtgtttggttctgtttacatgctggactacatttattgattttcgtatgttgaaccagccttgcatcccagggatgaagcccccttgatcatggtggataagctttttgatgtgctgctggatttggtttgccagtattttattgaggatttttgcatcgatgttcatcagggatatnggtttaaaattctctttttttgttgtgtctctgccaggctttggtatcaggatgatgccggcctcataaaatgagttaggaaggattccctctttttgtattgattggaatagtttcagaaggaatggtaccagctcctcgtngacctctgtaccgat

SEQ ID NO: 24737 - DNA, 369 bp, Homo sapiens
accaaaaccaggcaaaggcattacaagaaaagaaaactacagagatatcttacataaacataaatgcaaatgtcctcaacaaaatattatcaaatcaaatccaacaatgttaaaaactattatacaccacaagtaagtgagatttattgtaagtctggttcagcattcaaaaaaagcagtgaatataatctgtcacatcaaaagactaaagaggaaaaatcacatgatcatatcaatagatgcagaaaaagcattcgacaaatcctgcatccattaatggataaaataacaataaaggctcagtaaactgacatagtgcacttcctcaacttgatttttaaaaacctattaacaaaatcctgtgaaaat

SEQ ID NO: 24738 - DNA, 510 bp, Homo sapiens
ctaagtgcatcctcagatcacccccacaactggcatcaccctgggagctctttattcactctcccctatggataataaaactcaggcccctgtaaggatgtgagatgcccatgctcaaacatcaagttaacagcagggagcacccacaccagggccactggcgcaactccagactccattccactgcccagctgctggaaaacatggccaaggcccaaagcagccaccatatgaagctgtaacaagaaacggggttgtaaacaaggaccactgggtaaagccctgagaatgctaggaatgcgagggggttaaattgctttttattctttttctttcagttggcctcattgttctaaaggaaatgtttattatagaacattaagagaaataaaaaccgccaagtgcaatggctcacacctgtaatcccagcactttgggaggctgaggcaggtggattacctgaggtcaggagttccaggccagcctggccaacatggtgaaaccccgttt

SEQ ID NO: 24739 - DNA, 1049 bp, Homo sapiens
atcacgtgcataatgtcacggtgtccaccggatttaccaggggtcatcgatgcccataacaagaacattttccgaggaactgtgagagtgaaagtctgactgtgggttaaagactgactggtaaatgaggaagtggagactgttttttcaaagcagcatgactggacaatgggagagggcgtgatcatttataaatagtgaggagaacagggtaaagctgcatcacggaccaaacagcaaggaaacagaacatggggaacatcaggatcagtaactcaccacaggaattcctactcctgggaaatagaattcttcactagtggctgactgtgacatatctttccaagagttaaccccagactccaaatcttaagaatatgggcttttcttccactatcattcacattctgcagttactggtagtattttacagtattttcagatgtaattttactaatttctaaaaatagttcatatctttaaaaatcatgggaaaatcatgactaataaattcaccaactttaaaatatattgttcaaaagtgtttttccaatgactctgtaaattggtaagatctggccacatttcatgttattgtctaaaaataagctaactatgagacaatgggtctaaatcattctccaaaatattgatgatgttcttcactttcaaactggctaaactgataattttactatcttatgcctcaggctgaggaggttatattgtaatgtccgggaatatttactataatttaaaattcaataaaaggacaatatggaataacatattaataatagtgactgttgatcaaaaaagctgatttctctgatatatgatcaaggtatgggatttaggttatatccataaccttagttttggccaggtggccttagctgggtgataactggatgtttaacctaagtttttcatacctgggtcataatacaaacttgaagaaactgcactggcatccttttaggctctctgatgcagaaggttgtctttggataactagcgcaattactactattaaaatattatggtac

SEQ ID NO: 24740 - DNA, 418 bp, Homo sapiens
ccaaaggtgatccgcccgcctggcctcccgaagtgctgggattacaggcgttagccactgcacccagccggaacaagtcttttatccattgtacatcttcagggcttttccattgttctgctgagctgtggttcaggctcagttgtgcgagtgattgattacctggctactgtaatgcttgtactttttttttttaaaaattattccatttcagctcacattggagaaccatggttttcgtatcctagctgattatattcttagcatttcagtcctttgcaacttggtttgttggggaaggcggttatagtcatctaatttttcttggggacagtactactgtggctacagtcatgagagagtttactttttcaatgtcttgtttccaaccaagtccacgctttcatgcttgcttttt

SEQ ID NO: 24741 - DNA, 2526 bp, Homo sapiens
ttcgctcctagggaagtcgctcgcgtcctcaagagcacctgagaggatctcggcgaagcggaaggctttggtgccagctgggagagtctgcgccggatttcctcagctccttggcgcgtttcctcggagccgggggaggcaaagcacggaccccggagtcggcgcccatagcgggacgccctcgcgaggggcgggagtgcgggagcgggggtgtgcgggcggcgcgctcgccctccagctgcagcccgcgccgagcgcgcagggccagcgagcgccggcgcctccagcatggagtgggaactcaacttgctgctctacctggcgctcttcttcttcctgctcttcttacttttcctcctgctcttcgtggtcatcaagcagctgaagaactccgtggccaacacggccggggcgctccagcccgggcgcctctcggtgcaccgcgagccttggggcttctcccgagagcaagcggtgtgacccgagtgcgggcactggcgggagggcaccgagctgcgcgggcgctgggctgggtctccgcctcgattctccgtcctcgcggcctcccagcttccagagccgagctgctgcccttgactggtgctcaggggaccacagctgcaatgacagtttgggcctgcaaaaagaaggctggaacaacgggagatggaagctttctgcaaatgcagcaccactggtatccatgaatttaacctgcccatcattcttcctagacaagagactattgaaaagtcagggtgttcaaaatggcttcagatcttatcaggacaatcttggttgttgcactaatttccaaacttggcacagctgtagatgcagaactgatgccatctggtgcgattctacagaataagagagaaaatttacccagagtgtgccatgcactggcttttctgggaatggcaaggtgccaggatttgtttttggttcgcttgcaggggtggaaacttggaactaggttccaagatggtccccgcagcaccccacaagaagaaggaggaagcccacagagaaaacggggcatgccagttcaaatccacttccttttaaagagcttcctcagcagcccaataacttttgccttcatctcattggccagaactgtgtcattggctactgctatctgcaagattgtctgagaaatgtagtttttgtagctggatatataactgcctttgacaaaaatccagtttctcttgatgaagaagaagatggtggtggatcttgggaggacaactaacattttatgccctggctacagaatacagttgcagaggagcataaagttcaaaaagatccaaaactctagttccttcacaactgtcaaagctccaagcagcactgctcccctctgacagagtgagcagagtgaaggcatgtcaggtgttctcacaaaactcttgacagggctgacctctctcagtcaatatccttgtcccacatcaggattttctagagggccctgggtacctgtgcacttccttggtggccgtaacctctttgtggagggttggtgtaggataaagaatgttctattacgctgctccctcatctgtatcatttctctcctctctaattttcctgtcagttatattttggtggagtctgggtttgtgtatttgattcctatagaaagaccatcgctttcatgcatggaggaggggaatctacgcaaagaaaggctaccttactcctttctgtgactccaccaccagtctaggaatatcctgggagaagaattgcctctcaaagctgcttctataagcagcctacatcctagctaagcaaagaagaaacacttcccacatctagggctgtctaaaagaactttctgtgatgacagaaatgttctatatctgcagtgtccaatatggtaaccatataggcacatgtggctagtgaacacttgaaatgtggctagtgtgactgaggaaggaaaatttaaattttgtttaattgtaattaatttaaattcagatagccaaatggggctactagctattgtgttagatagcacggtatactttattctctttcttgtgttgtagaaccagctgggagaggtgtgggtcagtcatgggcttggtatcccctggtcttcactattctagcttgccattgaatttgtctcccagaggaaaagaaagaatggtatttggaattaaattcaagatgttaacttgacatctatatattgcacatattcctgtatagtgaatggatgacctcctgggaatagttcctgtgactgattttagtgataattgatcatgaagaaatggcagtactgctccacttcaccttcctagtgactattatgtgttcctagtcagagtgactcagcagagattattttgttctcttgtgcaatttattctgtgtcattttatttttgtaatattgtggcagctaaatgattattctgtgtatgtttttcaaaatattaggtggcttatattttttaaaaggctatgaaataaaaataaactatacgtaacacagtta

SEQ ID NO: 24742 - DNA, 2154 bp, Homo sapiens
ttcgctcctagggaagtcgctcgcgtcctcaagagcacctgagaggatctcggcgaagcggaaggctttggtgccagctgggagagtctgcgccggatttcctcagctccttggcgcgtttcctcggagccgggggaggcaaagcacggaccccggagtcggcgcccatagcgggacgccctcgcgaggggcgggagtgcgggagagccgagctgctgcccttgactggtgctcaggggaccacagctgcaatgacagtttgggcctgcaaaaagaaggctggaacaacgggagatggaagctttctgcaaatgcagcaccactggtatccatgaatttaacctgcccatcattcttcctagacaagagactattgaaaagtcagggtgttcaaaatggcttcagatcttatcaggacaatcttggttgttgcactaatttccaaacttggcacagctgtagatgcagaactgatgccatctggtgcgattctacagaataagagagaaaatttacccagagtgtgccatgcactggcttttctgggaatggcaaggtgccaggatttgtttttggttcgcttgcaggggtggaaacttggaactaggttccaagatggtccccgcagcaccccacaagaagaaggaggaagcccacagagaaaacggggcatgccagttcaaatccacttccttttaaagagcttcctcagcagcccaataacttttgccttcatctcattggccagaactgtgtcattggctactgctatctgcaagattgtctgagaaatgtagtttttgtagctggatatataactgcctttgacaaaaatccagtttctcttgatgaagaagaagatggtggtggatcttgggaggacaactaacattttatgccctggctacagaatacagttgcagaggagcataaagttcaaaaagatccaaaactctagttccttcacaactgtcaaagctccaagcagcactgctcccctctgacagagtgagcagagtgaaggcatgtcaggtgttctcacaaaactcttgacagggctgacctctctcagtcaatatccttgtcccacatcaggattttctagagggccctgggtacctgtgcacttccttggtggccgtaacctctttgtggagggttggtgtaggataaagaatgttctattacgctgctccctcatctgtatcatttctctcctctctaattttcctgtcagttatattttggtggagtctgggtttgtgtatttgattcctatagaaagaccatcgctttcatgcatggaggaggggaatctacgcaaagaaaggctaccttactcctttctgtgactccaccaccagtctaggaatatcctgggagaagaattgcctctcaaagctgcttctataagcagcctacatcctagctaagcaaagaagaaacacttcccacatctagggctgtctaaaagaactttctgtgatgacagaaatgttctatatctgcagtgtccaatatggtaaccatataggcacatgtggctagtgaacacttgaaatgtggctagtgtgactgaggaaggaaaatttaaattttgtttaattgtaattaatttaaattcagatagccaaatggggctactagctattgtgttagatagcacggtatactttattctctttcttgtgttgtagaaccagctgggagaggtgtgggtcagtcatgggcttggtatcccctggtcttcactattctagcttgccattgaatttgtctcccagaggaaaagaaagaatggtatttggaattaaattcaagatgttaacttgacatctatatattgcacatattcctgtatagtgaatggatgacctcctgggaatagttcctgtgactgattttagtgataattgatcatgaagaaatggcagtactgctccacttcaccttcctagtgactattatgtgttcctagtcagagtgactcagcagagattattttgttctcttgtgcaatttattctgtgtcattttatttttgtaatattgtggcagctaaatgattattctgtgtatgtttttcaaaatattaggtggcttatattttttaaaaggctatgaaataaaaataaactatacgtaacacagtta

SEQ ID NO: 24743 - DNA, 2841 bp, Homo sapiens
ttcgctcctagggaagtcgctcgcgtcctcaagagcacctgagaggatctcggcgaagcggaaggctttggtgccagctgggagagtctgcgccggatttcctcagctccttggcgcgtttcctcggagccgggggaggcaaagcacggaccccggagtcggcgcccatagcgggacgccctcgcgaggggcgggagtgcgggagcgggggtgtgcgggcggcgcgctcgccctccagctgcagcccgcgccgagcgcgcagggccagcgagcgccggcgcctccagcatggagtgggaactcaacttgctgctctacctggcgctcttcttcttcctgctcttcttacttttcctcctgctcttcgtggtcatcaagcagctgaagaactccgtggccaacacggccggggcgctccagcccgggcgcctctcggtgcaccgcgagccttggggcttctcccgagagcaagcggtgtgacccgagtgcgggcactggcgggagggcaccgagctgcgcgggcgctgggctgggtctccgcctcgattctccgtcctcgcggcctcccagcttccagagccgagctgctgcccttgactggtgctcaggggaccacagctgcaatgacagtttgggcctgcaaaaagaaggctggaacaacgggagatggaagctttctgcaaatgcagcaccactggtatccatgaatttaacctgcccatcattcttcctagacaagagactattgaaaagtcagggtgttcaaaatggcttcagatcttatcaggacaatcttggttgttgcactaatttccaaacttgtaagtgcaatggatctgcagttctacttggcaagataaccattttaagttgaatgagaatgacatcacactcacacctgcaaaatctaaaatgtctaataaagtagattcctatgtctgaacttcaattttagggcacagctgtagatgcagaactgatgccatctggtgcgattctacagaataagagagaaaatttacccagagtgtgccatgcactggcttttctgggaatggcaaggtgccaggatttgtttttggttcgcttgcaggggtggaaacttggaactaggttccaagatggtccccgcagcaccccacaagaagaaggaggaagcccacagagaaaacggggcatgccagttcaaatccacttccttttaaagagcttcctcagcagcccaataacttttgccttcatctcattggccagaactgtgtcattggctactgctatctgcaagattgtctgagaaatgtagtttttgtagctggatatataactgcctttgacaaaaatccagtttctcttgatgaagaagaagatggtggtggatcttgggaggacaactaacattttatgccctggctacagaatacagttgcagaggagcataaagttcaaaaagatccaaaactctagttccttcacaactgtcaaagctccaagcagcactgctcccctctgacagagtgagcagagtgaaggcatgtcaggtgttctcacaaaactcttgacagggctgacctctctcagtcaatatccttgtcccacatcaggattttctagagggccctgggtacctgtgcacttccttggtggccgtaacctctttgtggagggttggtgtaggataaagaatgttctattacgctgctccctcatctgtatcatttctctcctctctaattttcctgtcagttatattttggtggagtctgggtttgtgtatttgattcctatagaaagaccatcgctttcatgcatggaggaggggaatctacgcaaagaaaggctaccttactcctttctgtgactccaccaccagtctaggaatatcctgggagaagaattgcctctcaaagctgcttctataagcagcctacatcctagctaagcaaagaagaaacacttcccacatctagggctgtctaaaagaactttctgtgatgacagaaatgttctatatctgcagtgtccaatatggtaaccatataggcacatgtggctagtgaacacttgaaatgtggctagtgtgactgaggaaggaaaatttaaattttgtttaattgtaattaatttaaattcagatagccaaatggggctactagctattgtgttagatagcacggtatactttattctctttcttgtgttgtagaaccagctgggagaggtgtgggtcagtcatgggcttggtatcccctggtcttcactattctagcttgccattgaatttgtctcccagaggaaaagaaagaatggtatttggaattaaattcaagatgttaacttgacatctatatattgcacatattcctgtatagtgaatggatgacctcctgggaatagttcctgtgactgattttagtgataattgatcatgaagaaatggcagtactgctccacttcaccttcctagtgactattatgtgttcctagtcagagtgactcagcagagattattttgttctcttgtgcaatttattctgtgtcattttatttttgtaatattgtggcagctaaatgattattctgtgtatgtttttcaaaatattaggtggcttatattttttaaaaggctatgaaataaaatactatcgtacccagtacaaaaaaaaaacaaaaaaaaaattgtggggggtggccaaaaagttttaacatttgtggggcggccaaaggatggaaaagggaaggtccaggacgggcggcagggtggttccaaaaaacgggacgggtgaaacagggctggttgggtttagaacgtccagcgggcgggggcaagaaaaaaaaggataa

SEQ ID NO: 24744 - DNA, 2660 bp, Homo sapiens
ttcgctcctagggaagtcgctcgcgtcctcaagagcacctgagaggatctcggcgaagcggaaggctttggtgccagctgggagagtctgcgccggatttcctcagctccttggcgcgtttcctcggagccgggggaggcaaagcacggaccccggagtcggcgcccatagcgggacgccctcgcgaggggcgggagtgcgggagcgggggtgtgcgggcggcgcgctcgccctccagctgcagcccgcgccgagcgcgcagggccagcgagcgccggcgcctccagcatggagtgggaactcaacttgctgctctacctggcgctcttcttcttcctgctcttcttacttttcctcctgctcttcgtggtcatcaagcagctgaagaactccgtggccaacacggccggggcgctccagcccgggcgcctctcggtgcaccgcgagccttggggcttctcccgagagcaagcggtgtgacccgagtgcgggcactggcgggagggcaccgagctgcgcgggcgctgggctgggtctccgcctcgattctccgtcctcgcggcctcccagcttccagagccgagctgctgcccttgactggtgctcaggggaccacagctgcaatgacagtttgggcctgcaaaaagaaggctggaacaacgggagatggaagctttctgcaaatgcagcaccactggtatccatgaatttaacctgcccatcattcttcctagacaagagactattgaaaagtcagggtgttcaaaatggcttcagatcttatcaggacaatcttggttgttgcactaatttccaaacttgtaagtgcaatggatctgcagttctacttggcaagataaccattttaagttgaatgagaatgacatcacactcacacctgcaaaatctaaaatgtctaataaagtagattcctatgtctgaacttcaattttagggcacagctgtagatgcagaactgatgccatctggtgcgattctacagaataagagagaaaatttacccagagtgtgccatgcactggcttttctgggaatggcaaggtgccaggatttgtttttggttcgcttgcaggggtggaaacttggaactaggttccaagatggtccccgcagcaccccacaagaagaaggaggaagcccacagagaaaacggggcatgccagttcaaatccacttccttttaaagagcttcctcagcagcccaataacttttgccttcatctcattggccagaactgtgtcattggctactgctatctgcaagattgtctgagaaatgtagtttttgtagctggatatataactgcctttgacaaaaatccagtttctcttgatgaagaagaagatggtggtggatcttgggaggacaactaacattttatgccctggctacagaatacagttgcagaggagcataaagttcaaaaagatccaaaactctagttccttcacaactgtcaaagctccaagcagcactgctcccctctgacagagtgagcagagtgaaggcatgtcaggtgttctcacaaaactcttgacagggctgacctctctcagtcaatatccttgtcccacatcaggattttctagagggccctgggtacctgtgcacttccttggtggccgtaacctctttgtggagggttggtgtaggataaagaatgttctattacgctgctccctcatctgtatcatttctctcctctctaattttcctgtcagttatattttggtggagtctgggtttgtgtatttgattcctatagaaagaccatcgctttcatgcatggaggaggggaatctacgcaaagaaaggctaccttactcctttctgtgactccaccaccagtctaggaatatcctgggagaagaattgcctctcaaagctgcttctataagcagcctacatcctagctaagcaaagaagaaacacttcccacatctagggctgtctaaaagaactttctgtgatgacagaaatgttctatatctgcagtgtccaatatggtaaccatataggcacatgtggctagtgaacacttgaaatgtggctagtgtgactgaggaaggaaaatttaaattttgtttaattgtaattaatttaaattcagatagccaaatggggctactagctattgtgttagatagcacggtatactttattctctttcttgtgttgtagaaccagctgggagaggtgtgggtcagtcatgggcttggtatcccctggtcttcactattctagcttgccattgaatttgtctcccagaggaaaagaaagaatggtatttggaattaaattcaagatgttaacttgacatctatatattgcacatattcctgtatagtgaatggatgacctcctgggaatagttcctgtgactgattttagtgataattgatcatgaagaaatggcagtactgctccacttcaccttcctagtgactattatgtgttcctagtcagagtgactcagcagagattattttgttctcttgtgcaatttattctgtgtcattttatttttgtaatattgtggcagctaaatgattattctgtgtatgtttttcaaaatattaggtggcttatattttttaaaaggctatgaaataaaaataaactatacgtaacacagtta

SEQ ID NO: 24745 - DNA, 102 bp, Homo sapiens
caccgagctgcgcgggcgctgggctgggtctccgcctcgattctccgtcctcgcggcctcccagcttccaggtgcggggctcggcggctctgacgggtccgt

SEQ ID NO: 24746 - DNA, 971 bp, Homo sapiens
  misc_feature (38)..(38): n is a, c, g, or t
  misc_feature (47)..(47): n is a, c, g, or t
  misc_feature (51)..(51): n is a, c, g, or t
aaccccccgagacctaagtaggaaatcccaccaccagntgcggtggncgancgacacccttgctggtcggtccccctgagtccatgcgggaacatgtggtcgctgcctccaaggccatgaagatgggtgactggaagacctgtcacagttttatcatcaatgagaagatgaatgggaaagtgtgggaccttttccccgaggctgacaaagtccgcaccatgctggttaggaagatccaggaagagtcactgaggacctacctcttcacctacagcagtgtctatgactccatcagcatggagacgctgtcagacatgtttgagctggatctgcccactgtgcactccatcatcagcaaaatgatcattaatgaggagctgatggcctccctggaccagccaacacagacagtggtgatgcaccgcactgagcccactgcccagcagaacctggctctgcagctggccgagaagctgggcagcctggtggagaacaacgaacgggtgtttgaccacaagcagggcacctacgggggctacttccgagaccagaaggacggctaccgcaaaaacgagggctacatgcgccgcggtggctaccgccagcagcagtctcagacggcctactgagctctccactctgtttcccgcctgggccatccaaccttgaagtcctaaaccacacctcagtcactaaaggtcgagactcactctgtagcccaggctggagtgcagtggcgcaatcttggctcactgcaagctccgcctcctggattctcaccattctcctgcctcagcctcctgagtagctgggactacaggcgcccgccacaacgcctggctaatttttgtgttttcagtagagacggggtttcactgtgttagccaggatgatcttgatctcctgaccttgtgatccgcccgcctcggcctcccaaagtgctgggattacaggcgtgagccaccacgccc

SEQ ID NO: 24747 - DNA, 647 bp, Homo sapiens
atcatcagcaaaatgatggagtgcacagtgggcagatccagctcaaacatgtctgacagcgtctccatgctgatggagtcatagacactgctgtaggtgaagaggtaggtcctcagtgactcttcctggatctgcccactgtgcactccatcatcagcaaaatgatcattaatgaggagctgatggcctccctggaccagccaacacagacagtggtgatgcaccgcactgagcccactgcccagcagaacctggctctgcagctggccgagaagctgggcagcctggtggagaacaacgaacgggtgtttgaccacaagcagggcacctacgggggctacttccgagaccagaaggacggctaccgcaaaaacgagggctacatgcgccgcggtggctaccgccagcagcagtctcagacggcctactgagctctccactctgtttcccgcctgggccatccaaccttgaagtcctaaaccacacctcagtcactaaaggtctgtttaaagttgttctggttgattgcttgttgccacaaaggtgtgttgagcccattcatttgctgattatatttctgagctgctaccacatgacagacacaaggctcagatgaagaggtgaattgaacacgttcctgacctcaa

SEQ ID NO: 24748 - DNA, 845 bp, Homo sapiens
  misc_feature (38)..(38): n is a, c, g, or t
  misc_feature (47)..(47): n is a, c, g, or t
  misc_feature (51)..(51): n is a, c, g, or t
aaccccccgagacctaagtaggaaatcccaccaccagntgcggtggncgancgacacccttgctggtcggtccccctgagtccatgcgggaacatgtggtcgctgcctccaaggccatgaagatgggtgactggaagacctgtcacagttttatcatcaatgagaagatgaatgggaaagtgtgggaccttttccccgaggctgacaaagtccgcaccatgctggttaggaagatccaggaagagtcactgaggacctacctcttcacctacagcagtgtctatgactccatcagcatggagacgctgtcagacatgtttgagctggatctgcccactgtgcactccatcatcagcaaaatgatcattaatgaggagctgatggcctccctggaccagccaacacagacagtggtgatgcaccgcactgagcccactgcccagcagaacctggctctgcagctggccgagaagctgggcagcctggtggagaacaacgaacgggtgtttgaccacaagcagggcacctacgggggctacttccgagaccagaaggacggctaccgcaaaaacgagggctacatgcgccgcggtggctaccgccagcagcagtctcagacggcctactgagctctccactctgtttcccgcctgggccatccaaccttgaagtcctaaaccacacctcagtcactaaaggtctgtttaaagttgttctggttgattgcttgttgccacaaaggtgtgttgagcccattcatttgctgattatatttctgagctgctaccacatgacagacacaaggctcagatgaagaggtgaattgaacacgttcctgacctcaa

SEQ ID NO: 24749 - DNA, 711 bp, Homo sapiens
aggaagagtcactgaggacctacctggatcttcctaaccaggcatggtgcggactttgtcagcctcggggaaaaggtccgcaccatgctggttaggaagatccaggaagagtcactgaggacctacctcttcacctacagcagtgtctatgactccatcagcatggagacgctgtcagacatgtttgagctggatctgcccactgtgcactccatcatcagcaaaatgatcattaatgaggagctgatggcctccctggaccagccaacacagacagtggtgatgcaccgcactgagcccactgcccagcagaacctggctctgcagctggccgagaagctgggcagcctggtggagaacaacgaacgggtgtttgaccacaagcagggcacctacgggggctacttccgagaccagaaggacggctaccgcaaaaacgagggctacatgcgccgcggtggctaccgccagcagcagtctcagacggcctactgagctctccactctgtttcccgcctgggccatccaaccttgaagtcctaaaccacacctcagtcactaaaggtctgtttaaagttgttctggttgattgcttgttgccacaaaggtgtgttgagcccattcatttgctgattatatttctgagctgctaccacatgacagacacaaggctcagatgaagaggtgaattgaacacgttcctgacctcaa

SEQ ID NO: 24750 - DNA, 828 bp, Homo sapiens
  misc_feature (38)..(38): n is a, c, g, or t
  misc_feature (47)..(47): n is a, c, g, or t
  misc_feature (51)..(51): n is a, c, g, or t
aaccccccgagacctaagtaggaaatcccaccaccagntgcggtggncgancgacacccttgctggtcggtccccctgagtccatgcgggaacatgtggtcgctgcctccaaggccatgaagatgggtgactggaagacctgtcacagttttatcatcaatgagaagatgaatgggaaagtgtgggaccttttccccgaggctgacaaagtccgcaccatgctggttaggaagatccaggaagagtcactgaggacctacctcttcacctacagcagtgtctatgactccatcagcatggagacgctgtcagacatgtttgagctggatctgcccactgtgcactccatcatcagcaaaatgatcattaatgaggagctgatggcctccctggaccagccaacacagacagtggtgatgcaccgcactgagcccactgcccagcagaacctggctctgcagctggccgagaagctgggcagcctggtggagaacaacgaacgggtgtttgaccacaagcagggcacctacgggggctacttccgagaccagaaggacggctaccgcaaaaacgagggctacatgcgccgcggtggctaccgccagcagcagtctcagacggcctactgagctctccactctgtttcccgcctgggccatccaaccttgaagtcctaaaccacactgtttaaagttgttctggttgattgcttgttgccacaaaggtgtgttgagcccattcatttgctgattatatttctgagctgctaccacatgacagacacaaggctcagatgaagaggtgaattgaacacgttcctgacctcaa

SEQ ID NO: 24751 - DNA, 568 bp, Homo sapiens
ggaataccgatggagaatagtggtgccggctctctctctcttctcttcctcgttctgtgcctctttccctcccccatgcttctgctctttctcccttttcattcaccctttatttttctttcttcttggctccctcctcttcccagctgcctactctgctcggatgttttgcctttttggatgttggtggctggctacaccctgcccactgtcccgaggtctgtggggaggcagcacctggaggcagcgacagcaaccacagggagcgccctggctcctccctgcccagcgcaaggccaaggcccttcccctcctgaaactggctctttacctctggagcctcagagagggaaaaaaaaaaaaacagaagtcattgccgccatatagattgatctccttgacacattccacttttaaagcatcaattcatttttgttaagctccaaatcattttaacagaaaagtctctttgttttgctctagttcaaaagattataattatttctgagtttatctgcttatatttttaaaagagtagaattttccctttaaggtcaataataagaaa

SEQ ID NO: 24752 - DNA, 414 bp, Homo sapiens
tcgacgtaacctggcagattgtataatctctgtggtcctcgttttgctcatctgtaggatggagtgataaaagtacccacttcatatggttgttggggagattaaatgaattaatacatgtaaagtgcttacaacaggagctggttcagagccagcgcttaatacattgaaataattatttttacattgtggtgcttttatgatggtttctgcagcatttaccaaatgccagggaaattattggcttgctttctgtgtgggttttgtcaaaatgattatggatttcaacaggatatttcagagaagaaataaactgctgaacagaaaccattgtgagcttgatagtttgcaggacattgtagaaaagagaatccagcacagtaattaagggcctttttaagtagggaagttgta

SEQ ID NO: 24753 - DNA, 722 bp, Homo sapiens
gggacctcttggggtccaatcgatcctcccacctgtaatcccagctactcaggaggctgaggcaggagaatcactggaacccaggaggcagagtttgcagtgagccgagatcgtgccactgcactctagcctctgtctcaaaaaaaaagaaaaaacaaggcgtgcatgctgtagtctgtgtgtatgtctgtttttgttctcctccttaacactagtcagtcttgtgtaaccaggctggccctgcttcctgcttagaagctattggtgtatcatctggagctgcaaatagggtgatagggcgtcagtagccttcccacactcaagagcttcctgacacccagcccctcatctccagccagcctctggctaccccaggaatcttggggctcaggcctaacactccagcatagagggctttgcccttctggtgtactctcgcttggaggcatcttggaacaggggtacaacagagctctggaagtgctgtctgttgcatcgataccccactgccactttcgtccaccttcctggggcagaatcctgggatgggtctttatttaagacaaaagggagagagaaggcatagaggctaggcatggtggctcactcctgtaatcccaggactttgggaggccgaggctggtggatcacttgaggtcacgggtttgagaccagcctggccaacacggtgaaaccgtctctactaaaaatacaaaaaaaat

SEQ ID NO: 24754 - DNA, 1311 bp, Homo sapiens
agtaatcgcaaaaagtcagttttatggatacagttttctctgaacagttttggtatagacaaaaagaggtgttaccatccacccggcgtgcattataattctgtccttgcctaatccccacccaaatgcccatttccatctacacgaactcattctttctgaatcataaatgccacaccctcagttgcacataaaactttgccatattatgtatacatcagtgtgtacgaagacaagttgtggcttagaagcagtccatttacagtttctggaactgtttatcatctcacttctccataactgattctaggtctgaaaggttttcttctaaaatttgatagcctgattttgaggatatgttttcaatgccttttctggttacaaatcctgatgttggcaggtctttttcctgtaagcatgaagaccaaccaagacaaggtacactgtgctgttaatcaaagtggcacagaacaactatgtgacaggtcatagccaggagtgtaatgtaacatggatatggagggccacaaagagtcccatagccctcctgctacacatctgaaaatctcctgaaattcagaataaacccattactgaaaaacaaaagtgtttattggcataccagactgtttcaggaattcatgaaagatagaaaacagatgggtcttgtgtgatggagaaataagaccaaagaaaagaccaaaggctaaaagatctacaggaggggccgggtgcagtggctcacgcctgtaatcccagcactttgaaggccgaggcgagtggatcacttgaggccaggagtttgagaccagcctagccaacatggtgaaaccccatctctattaaaaatacaaaaattagccagacatggtggctcacacctgtagttccagctactcgggaggctgaggcaggaaaattgctgaacccaggaggcggaggtttcagtgagccgaaatcttgccactgcactccagcctgggggacagagtgagactccgtctcaaaaaacaaacaaacaaaaaaatctataggagatgacttctgtgaaggtggctgtgagttctgagaaagctctgccctttatggaaatagggaacaggaaggagccctggggcaggagtcagggtgattatctgggggcttttggaggatcagccagctgccttcgcccccttccccacctctctcatgctaaactgtgtcacagtgagtatgtgcacacaggccagagcactggtgacaagaggcacagcaagaccctgggtagcaagaaatctgcactatttctaggtgggctagaaaggccct

SEQ ID NO: 24755 - DNA, 249 bp, Homo sapiens
attttaaagtcttttaggctaaggagtcaaaacttgattttgtaagaggtggaaagtcgtgaaggttttgaattcagtgtaaagaaatgtaaattttaatctaccactattgtgcagaatagattggaggactaagagtaaaaataggtctgttaggagttcaattaaggaattttggaaaatgtctgaggacccttgctaaaatgcagcaatgtgaatgaaaagtaaagttagaacatgctgtattgt

SEQ ID NO: 24756 - DNA, 125 bp, Homo sapiens
actgacctgtctccttcacatagtccatatcaccacaaatcacacaacaaaaaggagaagagatattttgggttcaaaaaaagtaaaaagataatgtagctgcatttctttagttattttgaacc

SEQ ID NO: 24757 - DNA, 238 bp, Homo sapiens
acaagggatggattgtgcagtcagaaagaaattctcattttaccaaaactgaagaaaaagtctctcctctacagaggaaaaaaaatactgaataaatgcaatgtataaaaatcaaaagaggccgggcgtggtggctcatacctgtaattccagcactttgggaggccgaggcaggtagatcacctgaggtcaggagttcaagaccagcctggccaacatggtgaaaccccgtctctac

SEQ ID NO: 24758 - DNA, 762 bp, Homo sapiens
catcctcatgacatcaaggcttcccatcatgaatgtggtgatttctctatttatttgttccctttaatgctattcaataagttttcaataatattctcttcaatgttcttgtgcatctttgtaagatatatttctagatatcctaagtacctaatagatttattgtcactttagatggtatcactatttttaaaagattttaactttttaatatgaaatttttaaacatacacataagtagacagactgcaatcaatacctgtgtttctatcactcagtttcaacaagtgccagttcatggctgttcttgttttatctgtggagtcatttccttattgaaagttgtaattgatgttttcttttcagtgtatatgaatgttacttatttttgtaggttgactttgaattcagaaatcttgctcaatttttttttaatcctgatgattcaaatcataggtaggtgtttgctcaatttttattctaatagtttgtctgtaggattgacgtcatagaaattctaagagaataatcacctgaaagggtaagttttgttttttcctatacattccttattcattctacttcctttatttttcttgtttcattgggtagcatatccattacaatgataaacaaaaggattagccaggcccagtgactcatacctgtaatctcagcactttgagaggctggggggtggggaggggggattacttgagcccagaaatttgagaccagcctgagcaacataaggacacccca

SEQ ID NO: 24759 - DNA, 517 bp, Homo sapiens
ataactgtatgcatactatgattccatttttgtactaaaagaaaagagaaagatgtatatatatattagtatatgcatagaaaagttgaaggattgagcactgatcatctctaggagggttgaatatgaagggacatttcttttttcctttacacatttctgattgatcaacttattcattacaggtattactttagacatgagaaaaaatagagaaaaattaagtgtgtgtcctcatatgtgcttataagtggactagagataaaagaaaaaaggtctcctgaaatcagaggttgggccaactgtcagattagtggaaggagcaaattatttccttctctagtttgtgaaatgactgtggggccttcagttgttgtagtagctatttaaaccatcaccatgttttgtaaccttttaaaattctcctgagctttttgcatgtttcttaatgaataaaggataaatacagtaaagtctgggttgatttttttctgtattttcattgatgatgtctgaa

SEQ ID NO: 24760 - DNA, 270 bp, Homo sapiens
ggcaactgaaatgcatttcagaaataggaggttttgtccaataccctctgcagccttggtgcctgtagctctggacttgcctggacccttccctgcgggagggccccatagaccccattggggtggggtgggatggggtggggatcacttggctaaaagggccgaggtctggtgatgaggttccagggatctagaacctctcctaccactcctgcagttggactgaattctttcctttcatttgaagaaacccactcgctgttttcagct

SEQ ID NO: 24761 - DNA, 476 bp, Homo sapiens
cactgtgaagttaggtagggggtctattgagaagttcaggaagatcttggtcagggaaatcatcttctccaactaacttgccaagcctgattcctgattttacctttcactatataacttacctacccactctttatacccaagtgtcttacccaggggtgaagaactgaaacatcttcctgaaccagcctctgtcaccactgtcctcctggcagcatcctgaattgcgaagagccaccccgccccccagacattcagtgacctagactcagacctctggggaaggacacagtctccaggctcagccagtaggcaggggactgtgacagaaagggacatatggccaagtccctctggtgagatacaaacctggactttggcaaacctggtgagaaagaggtttatctcaaatcaatctcgctcttcctttccacccccagctccctttccccactccctgccttctgctgtggttg

SEQ ID NO: 24762 - DNA, 680 bp, Homo sapiens
cagcatagtgagttcctgtctctacaaaaaataaaaaaaattagccaggcatggtggcgcatgcctgtaagctgagctacttgggaggctgcggcaggaggattgcttgagcccaggaattcaggcggaagtgggctgattgtgccattgcactctagctcaggcaacagagtgaaactctttctcaaaaaaaaattaggcatggtgcacagctgtcctagtacttgggcggctgaagtgggaggactgcttgagcccaggagattgaggctgcagtgagccatgatcgtgccactgcactccagtgtgggagacagagccaacaccctgtctcaaagagagaaaaaaagaagggctatttgatatatcccagcacctaatagagtgcctggcatagttgagcactcagtaaatgtgtcgaaggaaagaaagatgtcctgatcgccagtaattttccccaaatgttgtaaaggtaagtttccctattatgaagctgttgtagtccataacaacttctagtatgttaaaagtctgatcacacttgaggccgattttttttttctttttaaaagatgtagctaacatatattttctaatattatcctcacatgtcgctaagaggttgatgttattattttatccatttttaaagatgtcaaaattaaggcacaaaaatgata

SEQ ID NO: 24763 - DNA, 736 bp, Homo sapiens
cagcatagtgagttcctgtctctacaaaaaataaaaaaaattagccaggcatggtggcgcatgcctgtaagctgagctacttgggaggctgcggcaggaggattgcttgagcccaggaattcaggcggaagtgggctgattgtgccattgcactctagctcaggcaacagagtgaaactctttctcaaaaaaaaaaaaaaaagcaaccccgggcagcatggcaaaaccctatttctaccaaaatacaaaagttaggcatggtgcacagctgtcctagtacttgggcggctgaagtgggaggactgcttgagcccaggagattgaggctgcagtgagccatgatcgtgccactgcactccagtgtgggagacagagccaacaccctgtctcaaagagagaaaaaaagaagggctatttgatatatcccagcacctaatagagtgcctggcatagttgagcactcagtaaatgtgtcgaaggaaagaaagatgtcctgatcgccagtaattttccccaaatgttgtaaaggtaagtttccctattatgaagctgttgtagtccataacaacttctagtatgttaaaagtctgatcacacttgaggccgattttttttttctttttaaaagatgtagctaacatatattttctaatattatcctcacatgtcgctaagaggttgatgttattattttatccatttttaaagatgtcaaaattaaggcacaaaaatgata

SEQ ID NO: 24764 - DNA, 678 bp, Homo sapiens
ctcataggttaccactgtcaaaatttggtgcctatttttccagagttttaatcttaatagttgatatttaaatttattagattattttgtgtaaggtgaagattttaaaaataaaatctttaggtgtcaatttgagtgagagaatgtattttaatacattagaagacaaaaaacctattgggtgggatattgattccagtataatcttttatagtgtttgttatgctttaaatatttttcaacaaataaaaccattcaaaactaattgcatataaagaacaccagtttcactctcatagaatacttttgtgattactatgctgagctttagaaaaaaaggaactaagagatttcacataatgaaagttagtttaggggtggacgtggtagctcacatctgtaaccccaacactctgggaggctaaggcaggaggactgcttgaggcagtagttcaacaccagcctgggcaacacagcaaaacatggcaacccatccctagaagaaaaaaaaaaaatagttgggcatgatggtacacgcttgtagtcctagctccacaggaggctgaggattgagcccaggaattcgaggttacaatcacctatgaccccaccacagctccccagcttgggcgacatgagcaagaccccacatgagtaagaccccaagtcaaaaaaaaa

SEQ ID NO: 24765 - DNA, 453 bp, Homo sapiens
gcggccgtatactactacattaacggcccgtcgacactaattgcatataaagaacaccagtttcactctcatagaatacttttgtgattactatgctgagctttagaaaaaaaggaactaagagatttcacataatgaaagttagtttaggggtggacgtggtagctcacatctgtaaccccaacactctgggaggctaaggcaggaggactgcttgaggcagtagttcaacaccagcctgggcaacacagcaaaacatggcaacccatccctagaagaaaaaaaaaaaatagttgggcatgatggtacacgcttgtagtcctagctccacaggaggctgaggattgagcccaggaattcgaggttacaatcacctatgaccccaccacagctccccagcttgggcgacatgagcaagaccccacatgagtaagaccccaagtcaaaaaaaaa

SEQ ID NO: 24766 - DNA, 439 bp, Homo sapiens
tatatttaatcattctctttggctcacaacagcagtccagtccaaagatttactttttctattttcaaccccatcattatttttgtgtaaaaagtatgttttgagttacagcaattcatggagatcaagcttctactctgtagggagaagagagatgtcatttactacagagtttatacacacaaatgttctgctgcatgctgtgttcccactgaaatccagggggtttatttgcatttatacttaaagaagaatgaccgtatttggctgactctaagccaagatgatacaggcccaaagtttttcatggaggaatgggggagtaagggaaataggaacatttggaagaaatagttgttgtttttccctgttttattcagtgggcattttattcacagatcatttgatgcattgcatttactcgtgttattctggttcc

SEQ ID NO: 24767 - DNA, 4054 bp, Homo sapiens
ttccgggccgagtgtttccgggtcgctgctggcccccgggtactggtctcagtacccctgcagccggccggagaggctagagcccgacggggcccggctccggcggcagccgcgcctctcgcttgcttccctcggccgggccgtcctcggcggcagtgtcaggagcactccgctggtccaggcggcaacatgtccatgcttttagtgatgtccctgcctctaatccagaagccatggaggagataaggtagcccccctcgatcggatggggaagcccagttcaatggatactaaattcaaggatgacttatttcggaagtacgtgcagttccatgagagcaaagtggataccaccaccagcaggcagcggcctggcagcgatgagtgcctgcgggtggcagcctcaaccctgctcagcctgcacaaggtggatcccttttatcgattccggctgatccagttctatgaggtggtggagagctccttgcgctcgctcagctcctctagcctgcgggctctgcacggcgccttcagcatgctggagacggtgggcatcaacctcttcctctacccgtggaagaaggaattcagaagcatcaagacctacacgggcccttttgtttattatgtcaagtcgacattactggaagaggacatccgagccatcctgagctgcatgggctacacacctgagctgggcactgcatacaagctcagagagctcgtggagaccctccaggtgaagatggtctcctttgagctctttctggccaaagtcgagtgtgagcagatgctagaaatccactcacaagtgaaggacaagggctactccgagctggacattgtgagcgagcgcaagagcagtgcagaggatgtgcgcggctgctcggacgccctgcggcggcgggcagagggccgggagcacctgacggcctccatgtcacgagtggcactccagaagtcggccagcgagcgggcggccaaggactactacaagccccgcgtgaccaagccctcgaggtcagtggatgcctatgacagctactgggagagccggaagccacccctgaaggcctcattgagtcttcggaaggagcctgtggcaacggatgtgggggacgacctcaaggatgagatcatccgcccatccccttcgctgctgaccatggccagctccccccacggcagcccggatgtgcttccacccgcctcccccagcaacggcccggccctgctgcgcggtacctacttctccactcaggatgacgtggatctgtacacagactctgaacccagggccacctaccgtcggcaggatgctctgcggccggatgtgtggctgctcagaaacgatgcccactccctctaccacaagcgctcgccccctgccaaagagtccgccctctccaagtgccaaagctgcgggctgtcctgcagctcctccctctgccagcgctgtgacagcctgctcacctgtcctccagcttccaagcccagcgccttccccagcaaggcctcgactcatgacagcctggcccacggggcatctctgcgggagaagtacccaggccagactcagggcctcgaccgcctcccgcaccttcactccaaatccaagccctccaccacgcccacttcccgctgtggcttctgcaaccgcccaggcgccaccaacacctgcacccagtgttcaaaagtctcatgtgacgcctgcctcagcgcttaccattatgacccctgctacaaaaagagtgagctgcacaagttcatgcccaacaaccagctgaactacaagtccacccagctctcccatctcgtgtacagatagaccggcctcgccccttccagctccaagggctacatcaaccgacctttcgggtttcacggtgaagaagtactaacgcattgatctcagaggcggaggcctgcacttgaccatgtaggtggcagagatcgtgggctggctgtgtccacgtgggagttcacttagcgactcagatatctcaaccaatggctgctttgttgtctgacaagggagaaggtggcacttccgttcagattcattttgctaatctctccactccctgttcagttggttctttttttggggttttgttttgttttgttttgttgttttgttttttcctttaaagaggatttctgtctctgggaccctcgctgcacctacccctcccattgcaaagccaacttggactgggaagggcccttcaggtcaccaaacatccacctggagcggcgagctagaggcctgttggcttgtgaaatgagccctcctgccacacggggcctctcccaaaggctcatcccttggccgcccccttcctaaacacaaggatccccagctggactccccaccccctggcttccccacctctccaggtgtcaaaggtgaaccgagtccagtattagctgaatgtcatttcgtacaccacagctcagtcagcccatggccttcgtgaactttgctccaacacactgatgtgtgggcttcccacagcaggactgacttccccctttctgttgtttgcacatgcccctcttactgtactgtcaatagatatttttgagatttatttttaaataaatattcaacttgctgtgtgtttcaacgtggttaaaaaaatgaattatgtagctatttattaaatgccctgggttctttagtcttccaagggagggcctcgcgcccattcgtgttgtatcctccactcactatggcccgaggggagaggagagtttggggcagggaggaacagacatgaagcctccttttcttgagctggtggagagccactgtcttccctgcagtaactatctatacacctacctccagtgtgcacttagggggtgagcgcgggtgtcgaggtctgtgtgtctgcagactgctaacctatgacaattcagggacctcacctgtcggacctatagcttgctgagcaggaaccttgcacttcacacttcttgagtctcgtttcagaaggaaaatcatttgggattcctactgcccctccatctcaatcctcttctcttcaccagtttccaggactcatctgcaacatttgcaatctttttgcactaaaagtgggcaggagtcggcatgtgcccatcagagagacggctcctcagatgctcagctaagcctaagcgcttccaagcctgaaggccccttcagcttctcatgtgaattaccaacccctggattttccttgtgggggtacaagagcaggagtggggcaagagtttgaaaataaagccgcttccttgtgaactaactatattttagccataactgtttgtgatgtacacaatgttaagggatttatatgcagtgggcttttctgggagaaagttattcagctcttgagcaagtttaagtctggctgaatcctgaggccactgtgaatttgctgatgttcttccaactcagttgagtgattttaaggttttccaaatcttctatggctctctttttaatatatatatatatatatatatatatatatatatatatatatatatatctatctggtagatcacatgtagatgtacagtgtgtatattaagctgaatttcaaccaactttattactaagaccagcctagcagggcattcatctttgatgttcttccttttcacatttcagaatcggcaatgcctggcccactcctgagagctctagttttctagttttccatttccagattgcgccagcattacagtaactaactctttctaaccaaccgtgatgccacgtaacttaccctatggacaaaagcaggaatgactaacacatcctaggagggaaagtccagtgtacctgtcatcacggacgcactgtggtcacagactggaatacgaaatactacagccctgctcccaggtgtgcatcttactggatgaggttgctgtgattgagatagttaaatacatgctaatttaaaaatgcagatgttttacatttgatttctaccaagagttgaaatgttgagagatgattaaaaataataataataaagtgtcttccattgttaaa

SEQ ID NO: 24768 - DNA, 3837 bp, Homo sapiens
ttccgggccgagtgtttccgggtcgctgctggcccccgggtactggtctcagtacccctgcagccggccggagaggctagagcccgacggggcccggctccggcggcagccgcgcctctcgcttgcttccctcggccgggccgtcctcggcggcagtgtcaggagcactccgctggtccaggcggcaacatgtccatgcttttagtgatgtccctgcctctaatccagaagccatggaggagataaggtagcccccctcgatcggatggggaagcccagttcaatggatactaaattcaaggatgacttatttcggaagtacgtgcagttccatgagagcaaagtggataccaccaccagcaggcagcggcctggcagcgatgagtgcctgcgggtggcagcctcaaccctgctcagcctgcacaaggtggatcccttttatcgattccggctgatccagttctatgaggtggtggagagctccttgcgctcgctcagctcctctagcctgcgggctctgcacggcgccttcagcatgctggagacggtgggcatcaacctcttcctctacccgtggaagaaggaattcagaagcatcaagacctacacgggcccttttgtttattatgtcaagtcgacattactggaagaggacatccgagccatcctgagctgcatgggctacacacctgagctgggcactgcatacaagctcagagagctcgtggagaccctccaggtgaagatggtctcctttgagctctttctggccaaagtcgagtgtgagcagatgctagaaatccactcacaagtgaaggacaagggctactccgagctggacattgtgagcgagcgcaagagcagtgcagaggatgtgcgcggctgctcggacgccctgcggcggcgggcagagggccgggagcacctgacggcctccatgtcacgagtggcactccagaagtcggccagcgagcgggcggccaaggactactacaagccccgcgtgaccaagccctcgaggtcagtggatgcctatgacagctactgggagagccggaagccacccctgaaggcctcattgagtcttcggaaggagcctgtggcaacggatgtgggggacgacctcaaggatgagatcatccgcccatccccttcgctgctgaccatggccagctccccccacggcagcccggatgtgcttccacccgcctcccccagcaacggcccggccctgctgcgcggtacctacttctccactcaggatgacgtggatctgtacacagactctgaacccagggccacctaccgtcggcaggatgctctgcggccggatgtgtggctgctcagaaacgatgcccactccctctaccacaagcgctcgccccctgccaaagagtccgccctctccaagtgccaaagctgcgggctgtcctgcagctcctccctctgccagcgctgtgacagcctgctcacctgtcctccagcttccaagcccagcgccttccccagcaaggcctcgactcatgacagcctggcccacggggcatctctgcgggagaagtacccaggccagactcagggcctcgaccgcctcccgcaccttcactccaaatccaagccctccaccacgcccacttcccgctgtggcttctgcaaccgcccaggcgccaccaacacctgcacccagtgttcaaaagtctcatgtgacgcctgcctcagcgcttaccattatgacccctgctacaaaaagagtgagctgcacaagttcatgcccaacaaccagctgaactacaagtccacccagctctcccatctcgtgtacagatagaccggcctcgccccttccagctccaagggctacatcaaccgacctttcgggtttcacggtgaagaagtactaacgcattgatctcagaggcggaggcctgcacttgaccatgtaggtggcagagatcgtgggctggctgtgtccacgtgggagttcacttagcgactcagatatctcaaccaatggctgctttgttgtctgacaagggagaaggtggcacttccgttcagattcattttgctaatctctccactccctgttcagttggttctttttttggggttttgttttgttttgttttgttgttttgttttttcctttaaagaggatttctgtctctgggaccctcgctgcacctacccctcccattgcaaagccaacttggactgggaagggcccttcaggtcaccaaacatccacctggagcggcgagctagaggcctgttggcttgtgaaatgagccctcctgccacacggggcctctcccaaaggctcatcccttggccgcccccttcctaaacacaaggatccccagctggactccccaccccctggcttccccacctctccaggtgtcaaaggtgaaccgagtccagtattagctgaatgtcatttcgtacaccacagctcagtcagcccatggccttcgtgaactttgctccaacacactgatgtgtgggcttcccacagcaggactgacttccccctttctgttgtttgcacatgcccctcttactgtactgtcaatagatatttttgagatttatttttaaataaatattcaacttgctgtgtgtttcaacgtggttaaaaaaatgaattatgtagctatttattaaatgccctgggttctttagtcttccaagggagggcctcgcgcccattcgtgttgtatcctccactcactatggcccgaggggagaggagagtttggggcagggaggaacagacatgaagcctccttttcttgagctggtggagagccactgtcttccctgcagtaactatctatacacctacctccagtgtgcacttagggggtgagcgcgggtgtcgaggtctgtgtgtctgcagactgctaacctatgacaattcagggacctcacctgtcggacctatagcttgctgagcaggaaccttgcacttcacacttcttgagtctcgtttcagaaggaaaatcatttgggattcctactgcccctccatctcaatcctcttctcttcaccagtttccaggactcatctgcaacatttgcaatctttttgcactaaaagtgggcaggagtcggcatgtgcccatcagagagacggctcctcagatgctcagctaagcctaagcgcttccaagcctgaaggccccttcagcttctcatgtgaattaccaacccctggattttccttgtgggggtacaagagcaggagtggggcaagagtttgaaaataaagccgcttccttgtgaactaactatattttagccataactgtttgtgatgtacacaatgttaagggatttatatgcagtgggcttttctgggagaaagttattcagctcttgagcaagtttaagtctggctgaatcctgaggccactgtgaatttgctgatgttcttccaactcaaatcggcaatgcctggcccactcctgagagctctagttttctagttttccatttccagattgcgccagcattacagtaactaactctttctaaccaaccgtgatgccacgtaacttaccctatggacaaaagcaggaatgactaacacatcctaggagggaaagtccagtgtacctgtcatcacggacgcactgtggtcacagactggaatacgaaatactacagccctgctcccaggtgtgcatcttactggatgaggttgctgtgattgagatagttaaatacatgctaatttaaaaatgcagatgttttacatttgatttctaccaagagttgaaatgttgagagatgattaaaaataataataataaagtgtcttccattgttaaa

SEQ ID NO: 24769 - DNA, 3606 bp, Homo sapiens
ttccgggccgagtgtttccgggtcgctgctggcccccgggtactggtctcagtacccctgcagccggccggagaggctagagcccgacggggcccggctccggcggcagccgcgcctctcgcttgcttccctcggccgggccgtcctcggcggcagtgtcaggagcactccgctggtccaggcggcaacatgtccatgcttttagtgatgtccctgcctctaatccagaagccatggaggagataaggtagcccccctcgatcggatggggaagcccagttcaatggatactaaattcaaggatgacttatttcggaagtacgtgcagttccatgagagcaaagtggataccaccaccagcaggcagcggcctggcagcgatgagtgcctgcgggtggcagcctcaaccctgctcagcctgcacaaggtggatcccttttatcgattccggctgatccagttctatgaggtggtggagagctccttgcgctcgctcagctcctctagcctgcgggctctgcacggcgccttcagcatgctggagacggtgggcatcaacctcttcctctacccgtggaagaaggaattcagaagcatcaagacctacacgggcccttttgtttattatgtcaagtcgacattactggaagaggacatccgagccatcctgagctgcatgggctacacacctgagctgggcactgcatacaagctcagagagctcgtggagaccctccaggtgaagatggtctcctttgagctctttctggccaaagtcgagtgtgagcagatgctagaaatccactcacaagtgaaggacaagggctactccgagctggacattgtgagcgagcgcaagagcagtgcagaggatgtgcgcggctgctcggacgccctgcggcggcgggcagagggccgggagcacctgacggcctccatgtcacgagtggcactccagaagtcggccagcgagcgggcggccaaggactactacaagccccgcgtgaccaagccctcgaggtcagtggatgcctatgacagctactgggagagccggaagccacccctgaaggcctcattgagtcttcggaaggagcctgtggcaacggatgtgggggacgacctcaaggatgagatcatccgcccatccccttcgctgctgaccatggccagctccccccacggcagcccggatgtgcttccacccgcctcccccagcaacggcccggccctgctgcgcggtacctacttctccactcaggatgacgtggatctgtacacagactctgaacccagggccacctaccgtcggcaggatgctctgcggccggatgtgtggctgctcagaaacgatgcccactccctctaccacaagcgctcgccccctgccaaagagtccgccctctccaagtgccaaagctgcgggctgtcctgcagctcctccctctgccagcgctgtgacagcctgctcacctgtcctccagcttccaagcccagcgccttccccagcaaggcctcgactcatgacagcctggcccacggggcatctctgcgggagaagtacccaggccagactcagggcctcgaccgcctcccgcaccttcactccaaatccaagccctccaccacgcccacttcccgctgtggcttctgcaaccgcccaggcgccaccaacacctgcacccagtgttcaaaagtctcatgtgacgcctgcctcagcgcttaccattatgacccctgctacaaaaagagtgagctgcacaagttcatgcccaacaaccagctgaactacaagtccacccagctctcccatctcgtgtacagatagaccggcctcgccccttccagctccaagggctacatcaaccgacctttcgggtttcacggtgaagaagtactaacgcattgatctcagaggcggaggcctgcacttgaccatgtagcctctccaggtgtcaaaggtgaaccgagtccagtattagctgaatgtcatttcgtacaccacagctcagtcagcccatggccttcgtgaactttgctccaacacactgatgtgtgggcttcccacagcaggactgacttccccctttctgttgtttgcacatgcccctcttactgtactgtcaatagatatttttgagatttatttttaaataaatattcaacttgctgtgtgtttcaacgtggttaaaaaaatgaattatgtagctatttattaaatgccctgggttctttagtcttccaagggagggcctcgcgcccattcgtgttgtatcctccactcactatggcccgaggggagaggagagtttggggcagggaggaacagacatgaagcctccttttcttgagctggtggagagccactgtcttccctgcagtaactatctatacacctacctccagtgtgcacttagggggtgagcgcgggtgtcgaggtctgtgtgtctgcagactgctaacctatgacaattcagggacctcacctgtcggacctatagcttgctgagcaggaaccttgcacttcacacttcttgagtctcgtttcagaaggaaaatcatttgggattcctactgcccctccatctcaatcctcttctcttcaccagtttccaggactcatctgcaacatttgcaatctttttgcactaaaagtgggcaggagtcggcatgtgcccatcagagagacggctcctcagatgctcagctaagcctaagcgcttccaagcctgaaggccccttcagcttctcatgtgaattaccaacccctggattttccttgtgggggtacaagagcaggagtggggcaagagtttgaaaataaagccgcttccttgtgaactaactatattttagccataactgtttgtgatgtacacaatgttaagggatttatatgcagtgggcttttctgggagaaagttattcagctcttgagcaagtttaagtctggctgaatcctgaggccactgtgaatttgctgatgttcttccaactcagttgagtgattttaaggttttccaaatcttctatggctctctttttaatatatatatatatatatatatatatatatatatatatatatatatatctatctggtagatcacatgtagatgtacagtgtgtatattaagctgaatttcaaccaactttattactaagaccagcctagcagggcattcatctttgatgttcttccttttcacatttcagaatcggcaatgcctggcccactcctgagagctctagttttctagttttccatttccagattgcgccagcattacagtaactaactctttctaaccaaccgtgatgccacgtaacttaccctatggacaaaagcaggaatgactaacacatcctaggagggaaagtccagtgtacctgtcatcacggacgcactgtggtcacagactggaatacgaaatactacagccctgctcccaggtgtgcatcttactggatgaggttgctgtgattgagatagttaaatacatgctaatttaaaaatgcagatgttttacatttgatttctaccaagagttgaaatgttgagagatgattaaaaataataataataaagtgtcttccattgttaaa

SEQ ID NO: 24770 - DNA, 1730 bp, Homo sapiens
ttccgggccgagtgtttccgggtcgctgctggcccccgggtactggtctcagtacccctgcagccggccggagaggctagagcccgacggggcccggctccggcggcagccgcgcctctcgcttgcttccctcggccgggccgtcctcggcggcagtgtcaggagcactccgctggtccaggcggcaacatgtccatgcttttagtgatgtccctgcctctaatccagaagccatggaggagataaggtagcccccctcgatcggatggggaagcccagttcaatggatactaaattcaaggatgacttatttcggaagtacgtgcagttccatgagagcaaagtggataccaccaccagcaggcagcggcctggcagcgatgagtgcctgcgggtggcagcctcaaccctgctcagcctgcacaaggtggatcccttttatcgattccggctgatccagttctatgaggtggtggagagctccttgcgctcgctcagctcctctagcctgcgggctctgcacggcgccttcagcatgctggagacggtgggcatcaacctcttcctctacccgtggaagaaggaattcagaagcatcaagacctacacgggcccttttgtttattatgtcaagtcgacattactggaagaggacatccgagccatcctgagctgcatgggctacacacctgagctgggcactgcatacaagctcagagagctcgtggagaccctccaggtgaagatggtctcctttgagctctttctggccaaagtcgagtgtgagcagatgctagaaatccactcacaagtgaaggacaagggctactccgagctggacattgtgagcgagcgcaagagcagtgcagaggatgtgcgcggctgctcggacgccctgcggcggcgggcagagggccgggagcacctgacggcctccatgtcacgagtggcactccagaagtcggccagcgagcgggcggccaaggactactacaagccccgcgtgaccaagccctcgaggtcagtggatgcctatgacagctactgggagagccggaagccacccctgaaggcctcattgagtcttcggaaggagcctgtggcaacggatgtgggggacgacctcaaggatgagatcatccgcccatccccttcgctgctgaccatggccagctccccccacggcagcccggatgtgcttccacccgcctcccccagcaacggcccggccctgctgcgcggtacctacttctccactcaggatgacgtggatctgtacacagactctgaacccagggccacctaccgtcggcaggatgctctgcggccggatgtgtggctgctcagaaacgatgcccactccctctaccacaagcgctcgccccctgccaaagagtccgccctctccaagtgccaaagctgcgggctgtcctgcagctcctccctctgccagcgctgtgacagcctgctcacctgtcctccagcttccaagcccagcgccttccccagcaaggcctcgactcatgacagcctggcccacggggcatctctgcgggagaagtacccaggccagactcaggctcgacgctccgaacttgatcaatcaagcctccacagccattccgtgtgtttgaaacgcaggcacaaactgacatggtaagttatgtacctgctagtaacaatactgtaaaagggttgattccaactaaagcacaccatgagaaagccta

SEQ ID NO: 24771 - DNA, 2618 bp, Homo sapiens
ttccgggccgagtgtttccgggtcgctgctggcccccgggtactggtctcagtacccctgcagccggccggagaggctagagcccgacggggcccggctccggcggcagccgcgcctctcgcttgcttccctcggccgggccgtcctcggcggcagtgtcaggagcactccgctggtccaggcggcaacatgtccatgcttttagtgatgtccctgcctctaatccagaagccatggaggagataaggtagcccccctcgatcggatggggaagcccagttcaatggatactaaattcaaggatgacttatttcggaagtacgtgcagttccatgagagcaaagtggataccaccaccagcaggcagcggcctggcagcgatgagtgcctgcgggtggcagcctcaaccctgctcagcctgcacaaggtggatcccttttatcgattccggctgatccagttctatgaggtggtggagagctccttgcgctcgctcagctcctctagcctgcgggctctgcacggcgccttcagcatgctggagacggtgggcatcaacctcttcctctacccgtggaagaaggaattcagaagcatcaagacctacacgggcccttttgtttattatgtcaagtcgacattactggaagaggacatccgagccatcctgagctgcatgggctacacacctgagctgggcactgcatacaagctcagagagctcgtggagaccctccaggtgaagatggtctcctttgagctctttctggccaaagtcgagtgtgagcagatgctagaaatccactcacaagtgaaggacaagggctactccgagctggacattgtgagcgagcgcaagagcagtgcagaggatgtgcgcggctgctcggacgccctgcggcggcgggcagagggccgggagcacctgacggcctccatgtcacgagtggcactccagaagtcggccagcgagcgggcggccaaggactactacaagccccgcgtgaccaagccctcgaggtcagtggatgcctatgacagctactgggagagccggaagccacccctgaaggcctcattgagtcttcggaaggagcctgtggcaacggatgtgggggacgacctcaaggatgagatcatccgcccatccccttcgctgctgaccatggccagctccccccacggcagcccggatgtgcttccacccgcctcccccagcaacggcccggccctgctgcgcggtacctacttctccactcaggatgacgtggatctgtacacagactctgaacccagggccacctaccgtcggcaggatgctctgcggccggatgtgtggctgctcagaaacgatgcccactccctctaccacaagcgctcgccccctgccaaagagtccgccctctccaagtgccaaagctgcgggctgtcctgcagctcctccctctgccagcgctgtgacagcctgctcacctgtcctccagcttccaagcccagcgccttccccagcaaggcctcgactcatgacagcctggcccacggggcatctctgcgggagaagtacccaggccagactcagggcctcgaccgcctcccgcaccttcactccaaatccaagccctccaccacgcccacttcccgctgtggcttctgcaaccgcccaggcgccaccaacacctgcacccagtgttcaaaagtctcatgtgacgcctgcctcagcgcttaccattatgacccctgctacaaaaagagtgagctgcacaagttcatgcccaacaaccagctgaactacaagtccacccagctctcccatctcgtgtacagatagaccggcctcgccccttccagctccaagggctacatcaaccgacctttcgggtttcacggtgaagaagtactaacgcattgatctcagaggcggaggcctgcacttgaccatgtaggtggcagagatcgtgggctggctgtgtccacgtgggagttcacttagcgactcagatatctcaaccaatggctgctttgttgtctgacaagggagaaggtggcacttccgttcagattcattttgctaatctctccactccctgttcagttggttctttttttggggttttgttttgttttgttttgttgttttgttttttcctttaaagaggatttctgtctctgggaccctcgctgcacctacccctcccattgcaaagccaacttggactgggaagggcccttcaggtcaccaaacatccacctggagcggcgagctagaggcctgttggcttgtgaaatgagccctcctgccacacggggcctctcccaaaggctcatcccttggccgcccccttcctaaacacaaggatccccagctggactccccaccccctggcttccccacctctccaggtgtcaaaggtgaaccgagtccagtattagctgaatgtcatttcgtacaccacagctcagtcagcccatggccttcgtgaactttgctccaacacactgatgtgtgggcttcccacagcaggactgacttccccctttctgttgtttgcacatgcccctcttactgtactgtcaatagatatttttgagatttatttttaaataaatattcaacttgc

SEQ ID NO: 24772 - DNA, 4436 bp, Homo sapiens
  misc_feature (4260)..(4260): n is a, c, g, or t
ttccgggccgagtgtttccgggtcgctgctggcccccgggtactggtctcagtacccctgcagccggccggagaggctagagcccgacggggcccggctccggcggcagccgcgcctctcgcttgcttccctcggccgggccgtcctcggcggcagtgtcaggagcactccgctggtccaggcggcaacatgtccatgcttttagtgatgtccctgcctctaatccagaagccatggaggagataaggtagcccccctcgatcggatggggaagcccagttcaatggatactaaattcaaggatgacttatttcggaagtacgtgcagttccatgagagcaaagtggataccaccaccagcaggcagcggcctggcagcgatgagtgcctgcgggtggcagcctcaaccctgctcagcctgcacaaggtggatcccttttatcgattccggctgatccagttctatgaggtggtggagagctccttgcgctcgctcagctcctctagcctgcgggctctgcacggcgccttcagcatgctggagacggtgggcatcaacctcttcctctacccgtggaagaaggaattcagaagcatcaagacctacacgggcccttttgtttattatgtcaagtcgacattactggaagaggacatccgagccatcctgagctgcatgggctacacacctgagctgggcactgcatacaagctcagagagctcgtggagaccctccaggtgaagatggtctcctttgagctctttctggccaaagtcgagtgtgagcagatgctagaaatccactcacaagtgaaggacaagggctactccgagctggacattgtgagcgagcgcaagagcagtgcagaggatgtgcgcggctgctcggacgccctgcggcggcgggcagagggccgggagcacctgacggcctccatgtcacgagtggcactccagaagtcggccagcgagcgggcggccaaggactactacaagccccgcgtgaccaagccctcgaggtcagtggatgcctatgacagctactgggagagccggaagccacccctgaaggcctcattgagtcttcggaaggagcctgtggcaacggatgtgggggacgacctcaaggatgagatcatccgcccatccccttcgctgctgaccatggccagctccccccacggcagcccggatgtgcttccacccgcctcccccagcaacggcccggccctgctgcgcggtacctacttctccactcaggatgacgtggatctgtacacagactctgaacccagggccacctaccgtcggcaggatgctctgcggccggatgtgtggctgctcagaaacgatgcccactccctctaccacaagcgctcgccccctgccaaagagtccgccctctccaagtgccaaagctgcgggctgtcctgcagctcctccctctgccagcgctgtgacagcctgctcacctgtcctccagcttccaagcccagcgccttccccagcaaggcctcgactcatgacagcctggcccacggggcatctctgcgggagaagtacccaggccagactcagggcctcgaccgcctcccgcaccttcactccaaatccaagccctccaccacgcccacttcccgctgtggcttctgcaaccgcccaggcgccaccaacacctgcacccagtgttcaaaagtctcatgtgacgcctgcctcagcgcttaccattatgacccctgctacaaaaagagtgagctgcacaagttcatgcccaacaaccagctgaactacaagtccacccagctctcccatctcgtgtacagatagaccggcctcgccccttccagctccaagggctacatcaaccgacctttcgggtttcacggtgaagaagtactaacgcattgatctcagaggcggaggcctgcacttgaccatgtaggtggcagagatcgtgggctggctgtgtccacgtgggagttcacttagcgactcagatatctcaaccaatggctgctttgttgtctgacaagggagaaggtggcacttccgttcagattcattttgctaatctctccactccctgttcagttggttctttttttggggttttgttttgttttgttttgttgttttgttttttcctttaaagaggatttctgtctctgggaccctcgctgcacctacccctcccattgcaaagccaacttggactgggaagggcccttcaggtcaccaaacatccacctggagcggcgagctagaggcctgttggcttgtgaaatgagccctcctgccacacggggcctctcccaaaggctcatcccttggccgcccccttcctaaacacaaggatccccagctggactccccaccccctggcttccccacctctccaggtgtcaaaggtgaaccgagtccagtattagctgaatgtcatttcgtacaccacagctcagtcagcccatggccttcgtgaactttgctccaacacactgatgtgtgggcttcccacagcaggactgacttccccctttctgttgtttgcacatgcccctcttactgtactgtcaatagatatttttgagatttatttttaaataaatattcaacttgctgtgtgtttcaacgtggttaaaaaaatgaattatgtagctatttattaaatgccctgggttctttagtcttccaagggagggcctcgcgcccattcgtgttgtatcctccactcactatggcccgaggggagaggagagtttggggcagggaggaacagacatgaagcctccttttcttgagctggtggagagccactgtcttccctgcagtaactatctatacacctacctccagtgtgcacttagggggtgagcgcgggtgtcgaggtctgtgtgtctgcagactgctaacctatgacaattcagggacctcacctgtcggacctatagcttgctgagcaggaaccttgcacttcacacttcttgagtctcgtttcagaaggaaaatcatttgggattcctactgcccctccatctcaatcctcttctcttcaccagtttccaggactcatctgcaacatttgcaatctttttgcactaaaagtgggcaggagtcggcatgtgcccatcagagagacggctcctcagatgctcagctaagcctaagcgcttccaagcctgaaggccccttcagcttctcatgtgaattaccaacccctggattttccttgtgggggtacaagagcaggagtggggcaagagtttgaaaataaagccgcttccttgtgaactaactatattttagccataactgtttgtgatgtacacaatgttaagggatttatatgcagtgggcttttctgggagaaagttattcagctcttgagcaagtttaagtctggctgaatcctgaggccactgtgaatttgctgatgttcttccaactcagttgagtgattttaaggttttccaaatcttctatggctctctttttaatatatatatatatatatatatatatatatatatatatatatatatatctatctggtagatcacatgtagatgtacagtgtgtatattaagctgaatttcaaccaactttattactaagaccagcctagcagggcattcatctttgatgttcttccttttcacatttcagaatcggcaatgcctggcccactcctgagagctctagttttctagttttccatttccagattgcgccagcattacagtaactaactctttctaaccaaccgtgatgccacgtaacttaccctatggacaaaagcaggaatgactaacacatcctaggagggaaagtccagtgtacctgtcatcacggacgcactgtggtcacagactggaatacgaaatactacagccctgctcccaggtgtgcatcttactggatgaggttgctgtgattgagatagttaaatacatgctaatttaaaaatgcagatgttttacatttgatttctaccaagagttgaaatgttgagagatgattaaaaataataataataaagtgtcttccattgttaaacggcacgagctcgtgccgaattcggcacgagccagcctggccaacatggtgaaaccccgtctctgctaaaatatgcaaaaattagccgggcatgttggcaggcgacttaatcccagctacttgggaggcagaggcaagagaatcgtttgaacccggaaggcggaggttgctgtgagctgagatcgagccattgcactgaaacctgnggaataagagctagacttctctcaaaaaaaaaaaaaaaaaaaacttcagggggggcccggaccccaatttgcccttattgggaattcgaattacaaatcaactgggccgggctgttttaaaacaactctgagctggggaaaaaaccctggggggttcccccaaataataaatggct

SEQ ID NO: 24773 - DNA, 1847 bp, Homo sapiens
ttccgggccgagtgtttccgggtcgctgctggcccccgggtactggtctcagtacccctgcagccggccggagaggctagagcccgacggggcccggctccggcggcagccgcgcctctcgcttgcttccctcggccgggccgtcctcggcggcagtgtcaggagcactccgctggtccaggcggcaacatgtccatgcttttagtgatgtccctgcctctaatccagaagccatggaggagataaggtagcccccctcgatcggatggggaagcccagttcaatggatactaaattcaaggatgacttatttcggaagtacgtgcagttccatgagagcaaagtggataccaccaccagcaggcagcggcctggcagcgatgagtgcctgcgggtggcagcctcaaccctgctcagcctgcacaaggtggatcccttttatcgattccggctgatccagttctatgaggtggtggagagctccttgcgctcgctcagctcctctagcctgcgggctctgcacggcgccttcagcatgctggagacggtgggcatcaacctcttcctctacccgtggaagaaggaattcagaagcatcaagacctacacgggcccttttgtttattatgtcaagtcgacattactggaagaggacatccgagccatcctgagctgcatgggctacacacctgagctgggcactgcatacaagctcagagagctcgtggagaccctccaggtgaagatggtctcctttgagctctttctggccaaagtcgagtgtgagcagatgctagaaatccactcacaagtgaaggacaagggctactccgagctggacattgtgagcgagcgcaagagcagtgcagaggatgtgcgcggctgctcggacgccctgcggcggcgggcagagggccgggagcacctgacggcctccatgtcacgagtggcactccagaagtcggccagcgagcgggcggccaaggactactacaagccccgcgtgaccaagccctcgaggtcagtggatgcctatgacagctactgggagagccggaagccacccctgaaggcctcattgagtcttcggaaggagcctgtggcaacggatgtgggggacgacctcaaggatgagatcatccgcccatccccttcgctgctgaccatggccagctccccccacggcagcccggatgtgcttccacccgcctcccccagcaacggcccggccctgctgcgcggtacctacttctccactcaggatgacgtggatctgtacacagactctgaacccagggccacctaccgtcggcaggatgctctgcggccggatgtgtggctgctcagaaacgatgcccactccctctaccacaagcgctcgccccctgccaaagagtccgccctctccaagtgccaaagctgcgggctgtcctgcagctcctccctctgccagcgctgtgacagcctgctcacctgtcctccagcttccaagcccagcgccttccccagcaaggcctcgactcatgacagcctggcccacggggcatctctgcgggagaagtacccaggccagactcagggcctcgaccgcctcccgcaccttcactccaaatccaagcccctctccaggtgtcaaaggtgaaccgagtccagtattagctgaatgtcatttcgtacaccacagctcagtcagcccatggccttcgtgaactttgctccaacacactgatgtgtgggcttcccacagcaggactgacttccccctttctgttgtttgcacatgcccctcttactgtactgtcaatagatatttttgagatttatttttaaataaatattcaacttgc

SEQ ID NO: 24774 - DNA, 1174 bp, Homo sapiens
gttgcaggcacccaggtgttgactgcgtgtccattgttgttatagttggttgaatctgtcccattaattctccttccccaggcaagactcgtggctgtgacccatgggcctctgaggaggcgttgtaagtccgcccagctccccacttgctgtgctctcactcaatgcgaagggaaccaaggtaccagggccaagtgggtccagacatccacacggattctgaaagggcaggtcaagcaggcacgtggggcccaggttaccccttattccccgctgtggcatgggaagctgggaagggctgggggttggggtatcatgggatgtgcttccttaacggttcctttgtgtcactgccagactttgtccagccatcagccacggcctctcgacagcaccaagatggaagtcaaaggtcagctgatcagctctcctaccttcaatgccccagctgccctgttcggagaggctgccccccaggtgaagtcagagcgtctgcgggggctgcttgaccggcagcggaccctgcaggaggccctgagcctgaaacttcaggagctccgcaaagtgtgtctccaggaggcggtgagggcctggccctaggggtatcaggcggggaggttgggaggaggtgaggagctggggcccctaggtagacagacttgggtggcaattcctcaaccacttgtcttggctgtagattccctgtcacctactttctcctcaaagctcagcttagatgtgttagaatgaatgaaataggctgggcgctatggctcacgcctgtaatcccagcactttgggaggccgaggcaggtggatcacctgaggtcgggagttccagaccagcctgaccaacatggagaaatcccgtctctactaaaaatgcaaaattaggctgggcgcggtggctcacgcctgtaatcccagcactttgggaggccgaggtgggcggaacacgatgtcaggagatcgagaccatcctggctaacacggtgtaaccccgtctctactaaaaatacaaaaaattagtcaggcgtggtggcgggcacctatagttccagctactcgggaggctgaggcaggagaatggcatgaacccgggaggcggagcttgcagtgagccgagattgcgccactgcactccagcctgggtgacagagcaagactctgtctc

SEQ ID NO: 24775 - DNA, 381 bp, Homo sapiens
  misc_feature (30)..(30): n is a, c, g, or t
tctaatagaagatgaaactgaggcattganagttaagtaattttagccaggcacagtggcttacacctgtaatcccagcactctgggaggttaaggcggatggatcacttgaactcttgacctcgtgatctgcccgccttggcctcccaaagtgctgggattacagccgtgagccactgcacccagccccaatccaccactttttaagcaaacccacacaagttgtgttttctatgatacctgtctgtgattttcggagctgggggttcccctacccccttttcctggcgttaagcttttctttttataccagtggatctggacccaagacattacccacactggaaggggatttgtataataaatgtgtaaactgaaccc

SEQ ID NO: 24776 - DNA, 344 bp, Homo sapiens
acaggatgaggcggaaactggccagaaggtggcccaagtagaggtgcccacccagtggtgtaagggggcagcacccaggcctgggagtgagaggcccacttctccccctctcacctgtagaggacgtagttctgcactcagagagcagctccctctcagagtctggggccagccatgacaacggtgaggactcctatcccccaaacctgcccccgactcctacgtccctttagcccatccccttttcctggcgttaagcttttctttttataccagtggatctggacccaagacattacccacactggaaggggatttgtataataaatgtgtaaactgaaccc

SEQ ID NO: 24777 - DNA, 4464 bp, Homo sapiens
  misc_feature (3)..(3): n is a, c, g, or t
  misc_feature (5)..(5): n is a, c, g, or t
  misc_feature (7)..(7): n is a, c, g, or t
ggnangnggccaaggcatctgccactgctgctgactgccactaccagccggagccagggcctggtcgagacaactatttttgaggcaagactcgtggctgtgacccatgggcctctgaggaggcgttgtaagtccgcccagctccccacttgctgtgctctcactcaatgcgaagggaaccaaggtaccagggccaagtgggtccagacatccacacggattctgaaagggcaggtcaagcagactttgtccagccatcagccacggcctctcgacagcaccaagatggaagtcaaaggtcagctgatcagctctcctaccttcaatgccccagctgccctgttcggagaggctgccccccaggtgaagtcagagcgtctgcgggggctgcttgaccggcagcggaccctgcaggaggccctgagcctgaaacttcaggagctccgcaaagtgtgtctccaggaggcggagctgactggccagctgccccctgagtgcccactagagcctggtgaacggccccagttggtccgccggcggccccccacagcccgcgcctaccctccaccgcaccccaaccaagcacaccactccttgtgccctgctgaggagctggctcttgaggccctggaacgcgaggtgtcagtgcaacagcagatcgcggcggccgcccgccgcctggccttggcccctgatctgagcaccgagcagcgccggcgccggcgccaggtccaggcagatgcactgaggaggctgcatgagctagaggagcagctcagggatgtccgggcccgccttggcctcccagtgctcccgctgccccagccactgccactgtccacggggtcagtgatcaccacccagggagtctgcctgggcatgcgtcttgctcagctcagccaagaggacgtagttctgcactcagagagcagctccctctcagagtctggggccagccatgacaacgaggagccccatggctgcttctctctggccgagcgcccctcaccacccaaggcttgggaccagctgcgggcagtatctggggggagccctgagcggcgaaccccatggaaaccacctccatcagatctttatggggatctgaagagccggcggaactctgtggccagccccaccagccccacacgctcgctgcccaggagtgcctccagttttgaggggcgaagtgtgcctgccacccctgtcctcacccggggcgctggcccccagctctgcaaacctgaaggccttcattctcgtcagtggtccggcagccaggactcccagatgggcttcccccgggcggaccctgcctccgatcgcgcctccctcttcgtagctcgcacccgccgcagcaacagttctgaggccctgctggtggaccgggccgctggtgggggagctggctccccgcctgcccctctggctccctctgcctctggccccccagtctgcaagagcagtgaggtgctgtatgagcgcccccaaccaacccctgccttctcctcccgcacagcaggccccccagaccctccccgggccgcccggcctagctcagctgcccctgcctcccgaggtgccccccggctcccacctgtgtgtggagacttcctcttggactattccttggaccggggcctgccccgcagtggcggtggaacaggctggggggagctgccgcctgcagctgaggtcccaggacccctctcccgccgggatgggctcctcaccatgctccccggcccaccacctgtgtatgcagctgacagcaacagccccctcctccgcaccaaggacccccacacccgtgccacccgcactaagccctgtggcctgcccccagaggctgccgaaggccctgaggtgcatccaaaccctctgctgtggatgcccccacccacccgtatcccctcggctggtgaacgcagtggccacaagaacctggctctggaggggctgcgggactggtacatccggaactcgggactggctgcggggccccagcgccggcctgtgctcccttccgtgggcccgccacacccacccttcctccatgcccgctgctatgaggtgggccaggcgctgtacggggcccccagccaggcgccactcccacactcgaggagtttcacggcgccccctgtctctggcaggtatggggggtgcttttactgatgggtaggggtctcgtaaggcagatggcgaagatatccaggccagggagtggctagtcatgatagctaatgaattggaccatgaggaaactagctgctgtgatggcacagggtcactctactgcacatgacctgcattagtccatggggtcctggtggaggggatcttgggcactggtagcagcaattctttatcaagttataggctgaagatgagccttgaagccagggtgccgggaggaagggacatctcatgccccttgctgttttcttccttttttctccatgccccagagcctgaaagtgctgtcctgtgcctgcctccacctctttaacgagcctcttttcctttctttttctgtgtcttgtctgtcttttcttcttcttgtcttccccgccctgtcctccggattcctgctaccccttctaaagatactacgcggacttcctgtatcccccggagctgagcgctcgtttaagtgacctgacgctagagggggagcagtcctccagttctgacacccagaccccggggacactggtctgaccccttctgatatgtcccttgttggcctgggcacgattccaatctggggagcacacagctgacctcgctgggccctggggtgtggttgctctcagtcctgagcagagtgcgccaacctaatcttccaaggcccctggctccccgtaggcccaggaaggtgtctgacaccctgcttcttctctcacactgtgctggggactgggggccctcagctagcttaaaagaggggggatgatgtcatggggaccccaagccccttcctccatttatgtttacagttgtgacttaggtattcactgtcttcctccaacactaggcgttttacaaaagggaaactgtgatctcatctggttgggttcattcctgttcccatgcccaaccaggttccattcaggaaccccctccataaaatggaccatatcgggtctcagggccatttagggcagccaggagactccggtgtgaacagaaatccctgccacgcatcgccagggcagttggggcagtgggctctctgcccacacttggaaggactgcagtctgggtgggatgcctgaaagagcccaaccccctctgtgcccatggcctctgccctgaccacccccagtcaggaggccccacaggaggggcacccggtagatgccagtgaaatcctcaggggaggtctgcctgaaagagcccaaccccctctgtgcccatggcctctgccctgaccacccccagtcaggaggccccacaggaggggcacccggtagatgccagtgaaatcctcaggtgaggtctgcctacgggccacgggccactcaccactcacaccttccttggctttccttccacccttttttttttctcgagacggagtcttgctctgtcaccaggctggagtgcagcggcgcaatctcagctcactgcaacctctgcctcctgggttctcctgcctcaccctcccgagtagctgggattacaggcacacgccaccatgcccggctaatttttgtattcttagtagagacaaggtttcaccatattggccaggctggtcttgaactcttgacctcgtgatctgcccgccttggcctcccaaagtgctgggattacagccgtgagccactgcacccagccccaatccaccactttttaagcaaacccacacaagttgtgttttctatgatacctgtctgtgattttcggagctgggggttcccctacccccttttcctggcgttaagcttttctttttataccagtggatctggacccaagacattacccacactggaaggggatttgtataataaatgtgtaaactgaacccatgtgttgctgctctgtctgcctcaccttgaggacccacacctctagtcaagaccagataatatatttttgcaggaaaaaacataccttgggaatagcctgtgatagtgtcatctgttttgactttacttgctttgtgatgtggggcaacttctttgcctgtctgcactcagatttctagccaacctcaagcaataactcttggtaatataaatggtgataacaaagactctgtccttaacctccctatacattttttaaaaatttttatttttttgagacaatgtctcactctgttgcccaggctgaaatgtagtggcgcgataacggctcactgcagccttgacctcctggactcacaatcttcccacctcagccgcctgaatagctgaaactacagttgtgcaccaccatacccgctaatta

SEQ ID NO: 24778 - DNA, 2874 bp, Homo sapiens
  misc_feature (3)..(3): n is a, c, g, or t
  misc_feature (5)..(5): n is a, c, g, or t
  misc_feature (7)..(7): n is a, c, g, or t
ggnangnggccaaggcatctgccactgctgctgactgccactaccagccggagccagggcctggtcgagacaactatttttgaggcaagactcgtggctgtgacccatgggcctctgaggaggcgttgtaagtccgcccagctccccacttgctgtgctctcactcaatgcgaagggaaccaaggtaccagggccaagtgggtccagacatccacacggattctgaaagggcaggtcaagcagactttgtccagccatcagccacggcctctcgacagcaccaagatggaagtcaaaggtcagctgatcagctctcctaccttcaatgccccagctgccctgttcggagaggctgccccccaggtgaagtcagagcgtctgcgggggctgcttgaccggcagcggaccctgcaggaggccctgagcctgaaacttcaggagctccgcaaagtgtgtctccaggaggcggagctgactggccagctgccccctgagtgcccactagagcctggtgaacggccccagttggtccgccggcggccccccacagcccgcgcctaccctccaccgcaccccaaccaagcacaccactccttgtgccctgctgaggagctggctcttgaggccctggaacgcgaggtgtcagtgcaacagcagatcgcggcggccgcccgccgcctggccttggcccctgatctgagcaccgagcagcgccggcgccggcgccaggtccaggcagatgcactgaggaggctgcatgagctagaggagcagctcagggatgtccgggcccgccttggcctcccagtgctcccgctgccccagccactgccactgtccacggggtcagtgatcaccacccagggagtctgcctgggcatgcgtcttgctcagctcagccaagaggacgtagttctgcactcagagagcagctccctctcagagtctggggccagccatgacaacgaggagccccatggctgcttctctctggccgagcgcccctcaccacccaaggcttgggaccagctgcgggcagtatctggggggagccctgagcggcgaaccccatggaaaccacctccatcagatctttatggggatctgaagagccggcggaactctgtggccagccccaccagccccacacgctcgctgcccaggagtgcctccagttttgaggggcgaagtgtgcctgccacccctgtcctcacccggggcgctggcccccagctctgcaaacctgaaggccttcattctcgtcagtggtccggcagccaggactcccagatgggcttcccccgggcggaccctgcctccgatcgcgcctccctcttcgtagctcgcacccgccgcagcaacagttctgaggccctgctggtggaccgggccgctggtgggggagctggctccccgcctgcccctctggctccctctgcctctggccccccagtctgcaagagcagtgaggtgctgtatgagcgcccccaaccaacccctgccttctcctcccgcacagcaggccccccagaccctccccgggccgcccggcctagctcagctgcccctgcctcccgaggtgccccccggctcccacctgtgtgtggagacttcctcttggactattccttggaccggggcctgccccgcagtggcggtggaacaggctggggggagctgccgcctgcagctgaggtcccaggacccctctcccgccgggatgggctcctcaccatgctccccggcccaccacctgtgtatgcagctgacagcaacagccccctcctccgcaccaaggacccccacacccgtgccacccgcactaagccctgtggcctgcccccagaggctgccgaaggccctgaggtgcatccaaaccctctgctgtggatgcccccacccacccgtatcccctcggctggtgaacgcagtggccacaagaacctggctctggaggggctgcgggactggtacatccggaactcgggactggctgcggggccccagcgccggcctgtgctcccttccgtgggcccgccacacccacccttcctccatgcccgctgctatgaggtgggccaggcgctgtacggggcccccagccaggcgccactcccacactcgaggagtttcacggcgccccctgtctctggcaggtatggggggtgcttttactgatgggtaggggtctcgtaaggcagatggcgaagatatccaggccagggagtggctagtcatgatagctaatgaattggaccatgaggaaactagctgctgtgatggcacagggtcactctactgcacatgacctgcattagtccatggggtcctggtggaggggatcttgggcactggtagcagcaattctttatcaagttataggctgaagatgagccttgaagccagggtgccgggaggaagggacatctcatgccccttgctgttttcttccttttttctccatgccccagagcctgaaagtgctgtcctgtgcctgcctccacctctttaacgagcctcttttcctttctttttctgtgtcttgtctgtcttttcttcttcttgtcttccccgccctgtcctccggattcctgctaccccttctaaagatactacgcggacttcctgtatcccccggagctgagcgctcgtttaagtgacctgacgctagagggggagcagtcctccagttctgacacccagaccccggggacactggtctgaccccagttggtccgcggcggccccccacagcccgcgcctaccctccaccgcaccccaaccaagcacaccactccttgtgccctgctgaggagctggctcttgaggccctggaacgcgaggtgtcagtgcaacagcagatcgcggcggccc

SEQ ID NO: 24779 - DNA, 3980 bp, Homo sapiens
  misc_feature (3)..(3): n is a, c, g, or t
  misc_feature (5)..(5): n is a, c, g, or t
  misc_feature (7)..(7): n is a, c, g, or t
ggnangnggccaaggcatctgccactgctgctgactgccactaccagccggagccagggcctggtcgagacaactatttttgaggcaagactcgtggctgtgacccatgggcctctgaggaggcgttgtaagtccgcccagctccccacttgctgtgctctcactcaatgcgaagggaaccaagactttgtccagccatcagccacggcctctcgacagcaccaagatggaagtcaaaggtcagctgatcagctctcctaccttcaatgccccagctgccctgttcggagaggctgccccccaggtgaagtcagagcgtctgcgggggctgcttgaccggcagcggaccctgcaggaggccctgagcctgaaacttcaggagctccgcaaagtgtgtctccaggaggcggagctgactggccagctgccccctgagtgcccactagagcctggtgaacggccccagttggtccgccggcggccccccacagcccgcgcctaccctccaccgcaccccaaccaagcacaccactccttgtgccctgctgaggagctggctcttgaggccctggaacgcgaggtgtcagtgcaacagcagatcgcggcggccgcccgccgcctggccttggcccctgatctgagcaccgagcagcgccggcgccggcgccaggtccaggcagatgcactgaggaggctgcatgagctagaggagcagctcagggatgtccgggcccgccttggcctcccagtgctcccgctgccccagccactgccactgtccacggggtcagtgatcaccacccagggagtctgcctgggcatgcgtcttgctcagctcagccaagaggacgtagttctgcactcagagagcagctccctctcagagtctggggccagccatgacaacgaggagccccatggctgcttctctctggccgagcgcccctcaccacccaaggcttgggaccagctgcgggcagtatctggggggagccctgagcggcgaaccccatggaaaccacctccatcagatctttatggggatctgaagagccggcggaactctgtggccagccccaccagccccacacgctcgctgcccaggagtgcctccagttttgaggggcgaagtgtgcctgccacccctgtcctcacccggggcgctggcccccagctctgcaaacctgaaggccttcattctcgtcagtggtccggcagccaggactcccagatgggcttcccccgggcggaccctgcctccgatcgcgcctccctcttcgtagctcgcacccgccgcagcaacagttctgaggccctgctggtggaccgggccgctggtgggggagctggctccccgcctgcccctctggctccctctgcctctggccccccagtctgcaagagcagtgaggtgctgtatgagcgcccccaaccaacccctgccttctcctcccgcacagcaggccccccagaccctccccgggccgcccggcctagctcagctgcccctgcctcccgaggtgccccccggctcccacctgtgtgtggagacttcctcttggactattccttggaccggggcctgccccgcagtggcggtggaacaggctggggggagctgccgcctgcagctgaggtcccaggacccctctcccgccgggatgggctcctcaccatgctccccggcccaccacctgtgtatgcagctgacagcaacagccccctcctccgcaccaaggacccccacacccgtgccacccgcactaagccctgtggcctgcccccagaggctgccgaaggccctgaggtgcatccaaaccctctgctgtggatgcccccacccacccgtatcccctcggctggtgaacgcagtggccacaagaacctggctctggaggggctgcgggactggtacatccggaactcgggactggctgcggggccccagcgccggcctgtgctcccttccgtgggcccgccacacccacccttcctccatgcccgctgctatgaggtgggccaggcgctgtacggggcccccagccaggcgccactcccacactcgaggagtttcacggcgccccctgtctctggcaggtatggggggtgcttttactgatgggtaggggtctcgtaaggcagatggcgaagatatccaggccagggagtggctagtcatgatagctaatgaattggaccatgaggaaactagctgctgtgatggcacagggtcactctactgcacatgacctgcattagtccatggggtcctggtggaggggatcttgggcactggtagcagcaattctttatcaagttataggctgaagatgagccttgaagccagggtgccgggaggaagggacatctcatgccccttgctgttttcttccttttttctccatgccccagagcctgaaagtgctgtcctgtgcctgcctccacctctttaacgagcctcttttcctttctttttctgtgtcttgtctgtcttttcttcttcttgtcttccccgccctgtcctccggattcctgctaccccttctaaagatactacgcggacttcctgtatcccccggagctgagcgctcgtttaagtgacctgacgctagagggggagcagtcctccagttctgacacccagaccccggggacactggtctgaccccttctgatatgtcccttgttggcctgggcacgattccaatctggggagcacacagctgacctcgctgggccctggggtgtggttgctctcagtcctgagcagagtgcgccaacctaatcttccaaggcccctggctccccgtaggcccaggaaggtgtctgacaccctgcttcttctctcacactgtgctggggactgggggccctcagctagcttaaaagaggggggatgatgtcatggggaccccaagccccttcctccatttatgtttacagttgtgacttaggtattcactgtcttcctccaacactaggcgttttacaaaagggaaactgtgatctcatctggttgggttcattcctgttcccatgcccaaccaggttccattcaggaaccccctccataaaatggaccatatcgggtctcagggccatttagggcagccaggagactccggtgtgaacagaaatccctgccacgcatcgccagggcagttggggcagtgggctctctgcccacacttggaaggactgcagtctgggtgggatgcctgaaagagcccaaccccctctgtgcccatggcctctgccctgaccacccccagtcaggaggccccacaggaggggcacccggtagatgccagtgaaatcctcaggggaggtctgcctgaaagagcccaaccccctctgtgcccatggcctctgccctgaccacccccagtcaggaggccccacaggaggggcacccggtagatgccagtgaaatcctcaggtgaggtctgcctacgggccacgggccactcaccactcacaccttccttggctttccttccacccttttttttttctcgagacggagtcttgctctgtcaccaggctggagtgcagcggcgcaatctcagctcactgcaacctctgcctcctgggttctcctgcctcaccctcccgagtagctgggattacaggcacacgccaccatgcccggctaatttttgtattcttagtagagacaaggtttcaccatattggccaggctggtcttgaactcttgacctcgtgatctgcccgccttggcctcccaaagtgctgggattacagccgtgagccactgcacccagccccaatccaccactttttaagcaaacccacacaagttgtgttttctatgatacctgtctgtgattttcggagctgggggttcccctacccccttttcctggcgttaagcttttctttttataccagtggatctggacccaagacattacccacactggaaggggatttgtataataaatgtgtaaactgaaccc

SEQ ID NO: 24780 - DNA, 3580 bp, Homo sapiens
agccatgagaacggccttagcagggggaggggtcagctggattaggaacagcccctgcccggcatctactctgctagcctttcctctgagtccctacacagatttacacctcccttggagctaacagtgccaggcctcccccacgcatttctacccctgaccgcctagcctaggatagaacctcagctgccctttacatgtcactacctgccacctttatacacacagcttccaaccttgggcccatttggagatgtgaaagtgaaggcttagaaagggctggggtagggagggcactgcacgccttctgcctgatttttctgaccctattcccatgaccctcgcctctcaccccagacctgaaggccttcattctcgtcagtggtccggcagccaggactcccagatgggcttcccccgggcggaccctgcctccgatcgcgcctccctcttcgtagctcgcacccgccgcagcaacagttctgaggccctgctggtggaccgggccgctggtgggggagctggctccccgcctgcccctctggctccctctgcctctggccccccagtctgcaagagcagtgaggtgctgtatgagcgcccccaaccaacccctgccttctcctcccgcacagcaggccccccagaccctccccgggccgcccggcctagctcagctgcccctgcctcccgaggtgccccccggctcccacctgtgtgtggagacttcctcttggactattccttggaccggggcctgccccgcagtggcggtggaacaggctggggggagctgccgcctgcagctgaggtcccaggacccctctcccgccgggatgggctcctcaccatgctccccggcccaccacctgtgtatgcagctgacagcaacagccccctcctccgcaccaaggacccccacacccgtgccacccgcactaagccctgtggcctgcccccagaggctgccgaaggccctgaggtgcatccaaaccctctgctgtggatgcccccacccacccgtatcccctcggctggtgaacgcagtggccacaagaacctggctctggaggggctgcgggactggtacatccggaactcgggactggctgcggggccccagcgccggcctgtgctcccttccgtgggcccgccacacccacccttcctccatgcccgctgctatgaggtgggccaggcgctgtacggggcccccagccaggcgccactcccacactcgaggagtttcacggcgccccctgtctctggcaggtatggggggtgcttttactgatgggtaggggtctcgtaaggcagatggcgaagatatccaggccagggagtggctagtcatgatagctaatgaattggaccatgaggaaactagctgctgtgatggcacagggtcactctactgcacatgacctgcattagtccatggggtcctggtggaggggatcttgggcactggtagcagcaattctttatcaagttataggctgaagatgagccttgaagccagggtgccgggaggaagggacatctcatgccccttgctgttttcttccttttttctccatgccccagagcctgaaagtgctgtcctgtgcctgcctccacctctttaacgagcctcttttcctttctttttctgtgtcttgtctgtcttttcttcttcttgtcttccccgccctgtcctccggattcctgctaccccttctaaagatactacgcggacttcctgtatcccccggagctgagcgctcgtttaagtgacctgacgctagagggggagcagtcctccagttctgacacccagaccccggggacactggtctgaccccttctgatatgtcccttgttggcctgggcacgattccaatctggggagcacacagctgacctcgctgggccctggggtgtggttgctctcagtcctgagcagagtgcgccaacctaatcttccaaggcccctggctccccgtaggcccaggaaggtgtctgacaccctgcttcttctctcacactgtgctggggactgggggccctcagctagcttaaaagaggggggatgatgtcatggggaccccaagccccttcctccatttatgtttacagttgtgacttaggtattcactgtcttcctccaacactaggcgttttacaaaagggaaactgtgatctcatctggttgggttcattcctgttcccatgcccaaccaggttccattcaggaaccccctccataaaatggaccatatcgggtctcagggccatttagggcagccaggagactccggtgtgaacagaaatccctgccacgcatcgccagggcagttggggcagtgggctctctgcccacacttggaaggactgcagtctgggtgggatgcctgaaagagcccaaccccctctgtgcccatggcctctgccctgaccacccccagtcaggaggccccacaggaggggcacccggtagatgccagtgaaatcctcaggggaggtctgcctgaaagagcccaaccccctctgtgcccatggcctctgccctgaccacccccagtcaggaggccccacaggaggggcacccggtagatgccagtgaaatcctcaggtgaggtctgcctacgggccacgggccactcaccactcacaccttccttggctttccttccacccttttttttttctcgagacggagtcttgctctgtcaccaggctggagtgcagcggcgcaatctcagctcactgcaacctctgcctcctgggttctcctgcctcaccctcccgagtagctgggattacaggcacacgccaccatgcccggctaatttttgtattcttagtagagacaaggtttcaccatattggccaggctggtcttgaactcttgacctcgtgatctgcccgccttggcctcccaaagtgctgggattacagccgtgagccactgcacccagccccaatccaccactttttaagcaaacccacacaagttgtgttttctatgatacctgtctgtgattttcggagctgggggttcccctacccccttttcctggcgttaagcttttctttttataccagtggatctggacccaagacattacccacactggaaggggatttgtataataaatgtgtaaactgaacccatgtgttgctgctctgtctgcctcaccttgaggacccacacctctagtcaagaccagataatatatttttgcaggaaaaaacataccttgggaatagcctgtgatagtgtcatctgttttgactttacttgctttgtgatgtggggcaacttctttgcctgtctgcactcagatttctagccaacctcaagcaataactcttggtaatataaatggtgataacaaagactctgtccttaacctccctatacattttttaaaaatttttatttttttgagacaatgtctcactctgttgcccaggctgaaatgtagtggcgcgataacggctcactgcagccttgacctcctggactcacaatcttcccacctcagccgcctgaatagctgaaactacagttgtgcaccaccatacccgctaatta

SEQ ID NO: 24781 - DNA, 1380 bp, Homo sapiens
gtgcagcgcaccagcatggcacgtgtatacatatgtaactaacctgcacaatgtgcacatgtaccctaaaacttaaagtataataaaaaaaaaagaaaaaaatcaaaagctttatagtattctgttgagtaagagtattattatttgtttatacaacctctttttggtgaacatttgaattgtgtttagatagttactaatgcaaacaatacttccagtgaacttttgtaaatatatatttgtatatataagagaataaatcttatacctgcagagtaaatttctaaaagtgaatcactaattctgagattatgtgcatctccagagatgttaacaaacatacacacccagcaacagtgcaagacagtgtatttcccaactgctccctcactgagatttttaaaaaacatataaatactattataagttacctctggagttaaagaataacttttgctttttactttcatagacatctgtactatgtaaacttgatatagtgaggatgttttcttttgtaattaaaagattaaagagattcagaatacttgtttgtaattggttttggaatgaaatttcacttggaaaataaaggcctagaatatgagactattcatcaatagaaaaccattgtagggagcagttaacaggtaaagctctatttaataagggcaagctgatggcagggaaaggaacagaccttaaaaaggactcacctgtgagaattggagacggtaaccctgtggtatcaaaatgcaggagaccagagatagctataaatctcttgcagtgttactgcctccgcatgaagtcataatccctagaatgagaatttatttttcatgatacaccgataatgcaagggacaatgatcaggaagtactgcacttagtctttctttctcatacctaaaatgtttttcattttatgctttttttagaatagagtgtacttacttcctctcttcctcacatagacttgaaaactcggcgactttaggatgcaactccaggttgacacattttcattagtttagaaaacccacgtgtcccactctcagaatcattattatagtagaggagatattcagggcaaggattccttgggaaacaacatccagattcaagggaagacatctgagtcacgacaacttaaaatccatcctggcctgccacaaagtgtttctgtaacattaagtacctcatatgcaattcttgaaaaggaaaattatgtcaatataacgtgaaatttgtgaaactcaaacatgatcatctaggcaaggagagctgaaatagaagaaataaaattatagcctctaatatgaaaggaaatacttttagtgtggttgctgctaagcagtagtttttttcaactatattt

SEQ ID NO: 24782 - DNA, 484 bp, Homo sapiens
caggaggcggaggttgcagtgagctaagatgatgctactgtactccagcctgagcggcagagtgagactgtgtctctctcacacacacacacaaatgaaatccaagtgtctttaagacttaaaagcagtacatctctatgactccccacaggctggactttgctaatcaatctggtgggctagaagagaaatcctaagaaaaccttcctgcttaatccatctgtacacctaatagataagcatcggtataccaatacaatgaagcgatcttcaaatgctttatcattcagcgctggggccccaggctgaggtgattaggagttagtagtagcagctggggccacttgcagagcggctcccattgtcagcttcagtgccctcagccctttctgcagctgcacagctgagcaagaagaaaccctggtgagaaggtgagaaagccccatgactcaacccgagggcaggtcccactcttaccagccct

SEQ ID NO: 24783 - DNA, 378 bp, Homo sapiens
aggaagttcaggctgtagggaacctgataggaagtaaaaaattaaaagtttccctaaagcaaatgtgaagttaggatttcattaagccgtcattgataatagtgagattttaaactagaaaatatttgtttcctttaaatattgctttgattcacgtttaaattaattattagaaatattaacatagggaatgttttacttataagtgactggtatttataagcatgtgccccacccaaaccccttgctacaattaaatagatgatacttcaaaaaagacatcaaacctttagagaatgtgtagattcagaagtttcaaaccagcaactacataggaagttgacaaagagggttaggtgtcaagtggtgctgtaccaa

SEQ ID NO: 24784 - DNA, 465 bp, Homo sapiens
aatataaatatcagaaaacttgattataaacactattgatgggaagaaaaaaaaacttgattaaaatatcctgaattgtaaggggacccattcattaagatattgattataatagtgaaatttaaagtcaactggtttttctaatttatgttaatcataattaaccctccataacattgtaatacatgttggtaatagtctgaagcagactgttgtatgtatagaaacaatttcttcatatttttaactacctgaaaatatgagtaagttaacagtagttgagagtagtacagatttttggttttgaaataccattagaatagcagtgtcactttttaagcactgtgcagcgtcctgtgttattcccttctttgtccaactgttactttttcttatgagaggcttccacaccctatttggtatccactttctttttatcaaataaagataattgcataatgaaac

SEQ ID NO: 24785 - DNA, 369 bp, Homo sapiens
  misc_feature (169)..(169): n is a, c, g, or t
  misc_feature (182)..(182): n is a, c, g, or t
  misc_feature (270)..(271): n is a, c, g, or t
  misc_feature (306)..(306): n is a, c, g, or t
  misc_feature (335)..(335): n is a, c, g, or t
cattcgcctactccgtgaagtctagggacaggaagatggttggcgacgtgaccggggcccaggcctatgcctccaccgccaagtgcctgaacatctgggccctgattctgggcatcctcatgaccattggattcatcctgttactggtattcggctctgtgacagtctnccatattatgttncagataatacaggaaaaacggggttactagtagccgcccatagcctgcaacctttgcactccactgtgcaatgctggccctgcacgcnnggctgttgcccctgcccccttggtcctgcccctanatacagcagtttatacccacacacctgtntacagtgtcattcaataaagcgcacgtgcttgtg

SEQ ID NO: 24786 - DNA, 267 bp, Homo sapiens
cattcgcctactccgtgaagtctagggacaggaagatggttggcgacgtgaccggggcccaggcctatgcctccaccgccaagtgcctgaacatctgggccctgattctgggcatcctcatgaccattctgctcatcgtcatcccagtgctgatcttccaggcctatggatagatcaggaggcatcactgaggccaggagctctgcccatgacctgtatgccacgtactccaacttccactcctcgccctgcccccggagccaagtc

SEQ ID NO: 24787 - DNA, 157 bp, Homo sapiens
aggggcaccacagtaaagaaagaactggtaaatgcacatcaaatgtggatattatcaggaaagtttttatactttgtgataatctaagacagaactattctacctggatgaattattctctttcataaccagaacagtgctgtgggaaggcactctt

SEQ ID NO: 24788 - DNA, 444 bp, Homo sapiens
gatccatgagagtgcggtgacccttcaaggatgttcacagtcttaataactgcatgagaaaatgagaagaccgtgttaataagcaaaacaagcagcttaagaagctggacaggccaggtgcggtggctcaggcctgtaatcccagcactttgggaggccaaggcgggcggatcaagaggtcaggagattgagaccatcctggccaacatggtgaaaccccgtctgtaccaaaaatacaaaaattagctgggtatggtggcgcatatctgtagtcccagctactcaggaggctgaggtaggagaatcgcttgaacctgggaggcagaggttgcagtgagccaagatcgcgccattgcactgcagactgggcgacagagtgagacactgtctcaaaaaaaaaagaagctggacaaggctgggcatgatggctcacacctggaatcc

SEQ ID NO: 24789 - DNA, 389 bp, Homo sapiens
tcctgtcaataaataatttggtaagtaacttttgtaagacatcttattgtttacaaagtaaacatctaacattattttatttgagacatataacaatccagtgtggaaaatattattatactgattttatatatgagtaaaatgagactgagggaattaggtatcttgttcagggtcgctcagaaagttgtgaaagtagggtttgaatcttggtctctgaatactctgcttaatacaatacaaagtagttattctttaaagactttgaattctgcagtgggagcaagaaaaagatagattatgggctgttcctccctcccgcaacccacaaacaactaaaataactccacttttacccttttctatgtaaattaggcagtatggcaaac

SEQ ID NO: 24790 - DNA, 476 bp, Homo sapiens
cctggccaatatggtcgacaaccccgtctctactaaaattacaaaaaaattagccaggcgtggtggcaggctcctatagtcccagctacttgggagactgagtcaggagaatagcttgaacccgagaggcagaggttgcagtgagctgagattgcgccactgccctccaaccccaagcgacagggtgagactccctctcagaaaaaaaacaaaaacaaaaaaacatttaaccaaaccctggggcaccatggcccgccctagtgcacccataaaatcagccatcaccccacgtatccactcagaactcagctctccagcacctgtcaccagcttgtcattattggccacgggaatttattaggaaggggtgaccggcccttgctttgctcccagcggggaggcggacagagtcgtccctgctggccaggtggcacaggtggttctgatcggccggtgagtctccctccagcgcagct

SEQ ID NO: 24791 - DNA, 2252 bp, Homo sapiens
tccggagttcgggggtcggcggaagatggcggccggcgaaaggagctggtgcctgtgcaagttgttgaggagttgtggagtgtatggcagctggcacaattatccttgcacacaattcggggggcccaaagcttgacattgtggttcctcacgaaggagatataactggctttctggctgagagtgaagaagactatgctgaaactatcgctcacattctttccatgtctgcagaaaagagactccaaatcagaaaaagtgctcgtgcatctgtaagcagattctctgatcaggaatttgaagtgacattcctatcatctgtggaaaagttatttaagtaatgccatatctgtaaaattaaagatattttatataaactggttaaacaccttcatatgtaaatatttttctaaattcaatctcatttgtcaaatcattttactttagaaaacagacaaaatttccttttagaataaaaggaagtgttgaaaagaaaatggatgactagccttcggcttccattcttggtatacatgagagaggctggctgctgagatgaatgtgaaccaggttgcagagaatctggctttgagccaccaggaagaactagtggatttgccaaaaaactaccccttgagtgaaaatgaagatgagggggacagtgatggagagagaaagcatcaaaagcttctggaagcaatcatttcccttgatggaaagaataggcggaaattggctgagaggtctgaggctagtctgaaagtgtcagagttcagtgtcagttctgaaggatcaggagaaaagctgggccttgcagatctgcttgagcccgttaaaacttcatcttctttggccactgtaaaaaagcaactgaatagagtcaaatcaaagaaggtggtggagttacctcttaacaaagaaaaaattgaacagatccacagagaagtagcattcagtaaaacctcacaggtcctctccaaatgggaccctatcatcctgaagaaccagcaggcagagcagctggtttttcccctggggaaggagcagccagccattgctcccattgaacatgcgctcagtggctggaaggcaagaactcccctggagcaggaaatttttaacctcctccataagaacaagcagccagtgacagatcctttactgactcccatggaaaaggcctctctccaagccatgagcctggaagaggcaaagatgcaccgagcagagcttcagagggctcgggctctgcagtcctactatgaggccaaggctcgaaaagagaagaaaatcaaaagtaaaaagtatcacaaagtcgtgaagaaaggaaaggccaagaaagccttaaaagagtttgagcagctacagaaggttaatccaactgtggcattggaagaaatggaaaaaattgaaaatgccagaatgatggaaagaatgagccttaagcaccaaaacagtgggaaatgggccaagtcaaaggcaattatggccaaatatgacctggaggctcgccaagctatgcaggaacagttggccaagaacaaagaactgacacagaaactccaggtagcctctgagagtgaggaagaggagggaggcacagaagtggaagaactccttgtccctcatgtagcgaatgaagtgcagatgaatgtggacggaccgaatccctggatgttcaggagctgcaccagtgacaccaaagaggctgcaacacaggaggaccctgagcaagtgccagagcttgcagctcatgaggtttctgcaagtgaggcagaagaaagaccagtggcagaggaagaaattttgttgagagaatttgaggaaaggcaatcccttagaaaaagatctgagctcaaccaggatgctgagccagcaagcagtcaagaaacaaaagattctagcagccaggaggtgctgtccgaattgagggcactatctcagaaattgaaggaaaaacatcagtccaggaagcaaaaagcaagttcagaggggactgttccccaggtccagagagaggaacctgccccagaagaagcggaacccctattgctacagaggtcagagagagtacaaactctggaagagctagaagagctgggaaaagaagattgttttcaaaataaggagcttcccagacctgtgttagaaggacagcagtcagagaggaccccaaataatcggcctgatgccctaaggagaagaaagagaaggagcaactgatcaacctacagaacttcctgaccacacag

SEQ ID NO: 24792 - DNA, 2835 bp, Homo sapiens
tccggagttcgggggtcggcggaagatggcggccggcgaaaggagctggtgcctgtgcaagttgttgaggtttttttattcattattcttccctgggctcattgtatgtggaactttatgtgtgtgtttggtcattgtcctttggggaatcagactgctgctacagagaaagaaaaaattagtgtcaactagcaaaaatgggaaaaatcaaatggtgattgcattttttcatccatactgcaatgctggtggaggaggagaaagagttttatggtgtgctttaagagccctgcagaaaaaacatttctggacattcccttacatgagaaaaagatgaccccaggacatttgctggtttctgttggccagtttaggccggaaaagaatcatccattgcagatcagagcctttgctaaattgctgaataagaagatggttgagtcacctccttcgcttaaacttgtcctcattggaggttgtcgtaacaaagatgatgaacttagggtaaaccaactgagaaggctgtctgaggatttaggagttcaagaatatgtggaatttaaaataaacattccatttgatgaattaaagaattatttgtctgaagcaacaattggtctgcataccatgtggaacgagcattttgggattggagttgtggagtgtatggcagctggcacaattatccttgcacacaattcggggggcccaaagcttgacattgtggttcctcacgaaggagatataactggctttctggctgagagtgaagaagactatgctgaaactatcgctcacattctttccatgtctgcagaaaagagactccaaatcagaaaaagtgctcgtgcatctgtaagcagattctctgatcaggaatttgaagtgacattcctatcatctgtggaaaagttatttaagtaatgccatatctgtaaaattaaagatattttatataaactggttaaacaccttcatatgtaaatatttttctaaattcaatctcatttgtcaaatcattttactttagaaaacagacaaaatttccttttagaataaaaggaagtgttgaaaagaaaatggatgactagccttcggcttccattcttggtatacatgagagaggctggctgctgagatgaatgtgaaccaggttgcagagaatctggctttgagccaccaggaagaactagtggatttgccaaaaaactaccccttgagtgaaaatgaagatgagggggacagtgatggagagagaaagcatcaaaagcttctggaagcaatcatttcccttgatggaaagaataggcggaaattggctgagaggtctgaggctagtctgaaagtgtcagagttcagtgtcagttctgaaggatcaggagaaaagctgggccttgcagatctgcttgagcccgttaaaacttcatcttctttggccactgtaaaaaagcaactgaatagagtcaaatcaaagaaggtggtggagttacctcttaacaaagaaaaaattgaacagatccacagagaagtagcattcagtaaaacctcacaggtcctctccaaatgggaccctatcatcctgaagaaccagcaggcagagcagctggtttttcccctggggaaggagcagccagccattgctcccattgaacatgcgctcagtggctggaaggcaagaactcccctggagcaggaaatttttaacctcctccataagaacaagcagccagtgacagatcctttactgactcccatggaaaaggcctctctccaagccatgagcctggaagaggcaaagatgcaccgagcagagcttcagagggctcgggctctgcagtcctactatgaggccaaggctcgaaaagagaagaaaatcaaaagtaaaaagtatcacaaagtcgtgaagaaaggaaaggccaagaaagccttaaaagagtttgagcagctacagaaggttaatccaactgtggcattggaagaaatggaaaaaattgaaaatgccagaatgatggaaagaatgagccttaagcaccaaaacagtgggaaatgggccaagtcaaaggcaattatggccaaatatgacctggaggctcgccaagctatgcaggaacagttggccaagaacaaagaactgacacagaaactccaggtagcctctgagagtgaggaagaggagggaggcacagaagtggaagaactccttgtccctcatgtagcgaatgaagtgcagatgaatgtggacggaccgaatccctggatgttcaggagctgcaccagtgacaccaaagaggctgcaacacaggaggaccctgagcaagtgccagagcttgcagctcatgaggtttctgcaagtgaggcagaagaaagaccagtggcagaggaagaaattttgttgagagaatttgaggaaaggcaatcccttagaaaaagatctgagctcaaccaggatgctgagccagcaagcagtcaagaaacaaaagattctagcagccaggaggtgctgtccgaattgagggcactatctcagaaattgaaggaaaaacatcagtccaggaagcaaaaagcaagttcagaggggactgttccccaggtccagagagaggaacctgccccagaagaagcggaacccctattgctacagaggtcagagagagtacaaactctggaagagctagaagagctgggaaaagaagattgttttcaaaataaggagcttcccagacctgtgttagaaggacagcagtcagagaggaccccaaataatcggcctgatgccctaaggagaagaaagagaaggagcaactgatcaacctacagaacttcctgaccacacag

SEQ ID NO: 24793 - DNA, 2254 bp, Homo sapiens
aagtagaagcaaaagtcagactatgagcaaaaatcaaaagtcaagcactcagaagtgaacaagtagagttggagttgtggagtgtatggcagctggcacaattatccttgcacacaattcggggggcccaaagcttgacattgtggttcctcacgaaggagatataactggctttctggctgagagtgaagaagactatgctgaaactatcgctcacattctttccatgtctgcagaaaagagactccaaatcagaaaaagtgctcgtgcatctgtaagcagattctctgatcaggaatttgaagtgacattcctatcatctgtggaaaagttatttaagtaatgccatatctgtaaaattaaagatattttatataaactggttaaacaccttcatatgtaaatatttttctaaattcaatctcatttgtcaaatcattttactttagaaaacagacaaaatttccttttagaataaaaggaagtgttgaaaagaaaatggatgactagccttcggcttccattcttggtatacatgagagaggctggctgctgagatgaatgtgaaccaggttgcagagaatctggctttgagccaccaggaagaactagtggatttgccaaaaaactaccccttgagtgaaaatgaagatgagggggacagtgatggagagagaaagcatcaaaagcttctggaagcaatcatttcccttgatggaaagaataggcggaaattggctgagaggtctgaggctagtctgaaagtgtcagagttcagtgtcagttctgaaggatcaggagaaaagctgggccttgcagatctgcttgagcccgttaaaacttcatcttctttggccactgtaaaaaagcaactgaatagagtcaaatcaaagaaggtggtggagttacctcttaacaaagaaaaaattgaacagatccacagagaagtagcattcagtaaaacctcacaggtcctctccaaatgggaccctatcatcctgaagaaccagcaggcagagcagctggtttttcccctggggaaggagcagccagccattgctcccattgaacatgcgctcagtggctggaaggcaagaactcccctggagcaggaaatttttaacctcctccataagaacaagcagccagtgacagatcctttactgactcccatggaaaaggcctctctccaagccatgagcctggaagaggcaaagatgcaccgagcagagcttcagagggctcgggctctgcagtcctactatgaggccaaggctcgaaaagagaagaaaatcaaaagtaaaaagtatcacaaagtcgtgaagaaaggaaaggccaagaaagccttaaaagagtttgagcagctacagaaggttaatccaactgtggcattggaagaaatggaaaaaattgaaaatgccagaatgatggaaagaatgagccttaagcaccaaaacagtgggaaatgggccaagtcaaaggcaattatggccaaatatgacctggaggctcgccaagctatgcaggaacagttggccaagaacaaagaactgacacagaaactccaggtagcctctgagagtgaggaagaggagggaggcacagaagtggaagaactccttgtccctcatgtagcgaatgaagtgcagatgaatgtggacggaccgaatccctggatgttcaggagctgcaccagtgacaccaaagaggctgcaacacaggaggaccctgagcaagtgccagagcttgcagctcatgaggtttctgcaagtgaggcagaagaaagaccagtggcagaggaagaaattttgttgagagaatttgaggaaaggcaatcccttagaaaaagatctgagctcaaccaggatgctgagccagcaagcagtcaagaaacaaaagattctagcagccaggaggtgctgtccgaattgagggcactatctcagaaattgaaggaaaaacatcagtccaggaagcaaaaagcaagttcagaggggactgttccccaggtccagagagaggaacctgccccagaagaagcggaacccctattgctacagaggtcagagagagtacaaactctggaagagctagaagagctgggaaaagaagattgttttcaaaataaggagcttcccagacctgtgttagaaggacagcagtcagagaggaccccaaataatcggcctgatgccctaaggagaagaaagagaaggagcaactgatcaacctacagaacttcctgaccacacag

SEQ ID NO: 24794 - DNA, 3415 bp, Homo sapiens
tccggagttcgggggtcggcggaagatggcggccggcgaaaggagctggtgcctgtgcaagttgttgaggtttttttattcattattcttccctgggctcattgtatgtggaactttatgtgtgtgtttggtcattgtcctttggggaatcagactgctgctacagagaaagaaaaaattagtgtcaactagcaaaaatgggaaaaatcaaatggtgattgcattttttcatccatactgcaatgctggtggaggaggagaaagagttttatggtgtgctttaagagccctgcagaaaaagtatcctgaagcagtttatgttgtttataccggcgatgttaatgtcaacggtcaacagatactagaaggtgctttcagaagatttaacatcagattaattcacccagtgcagtttgtttttttaaggaaacgctatcttgtggaagattcactgtatcctcacttcacactgctgggccaaagtctaggatccatttttcttggctgggaagctctaatgcagtgtgttcctgatgtttacattgattcaatgggatacgcttttacgcttcctctgtttaagtatatagggggttgccaagttggaagctatgttcattatcctactatcagcaccgacatgctctctgtagtgaagaatcaaaatattggatttaataatgcagccttcattaccaggaatccttttctcagcaaagtaaagctcatctactactatttatttgcttttatttatggacttgttggttcttgcagtgatgtagtcatggtcaattcttcttggacactaaaccatattctctcactatggaaagttgggaattgcactaacattgtttatccaccttgtgatgtgcagacatttctggacattcccttacatgagaaaaagatgaccccaggacatttgctggtttctgttggccagtttaggccggaaaagaatcatccattgcagatcagagcctttgctaaattgctgaataagaagatggttgagtcacctccttcgcttaaacttgtcctcattggaggttgtcgtaacaaagatgatgaacttagggtaaaccaactgagaaggctgtctgaggatttaggagttcaagaatatgtggaatttaaaataaacattccatttgatgaattaaagaattatttgtctgaagcaacaattggtctgcataccatgtggaacgagcattttgggattggagttgtggagtgtatggcagctggcacaattatccttgcacacaattcggggggcccaaagcttgacattgtggttcctcacgaaggagatataactggctttctggctgagagtgaagaagactatgctgaaactatcgctcacattctttccatgtctgcagaaaagagactccaaatcagaaaaagtgctcgtgcatctgtaagcagattctctgatcaggaatttgaagtgacattcctatcatctgtggaaaagttatttaagtaatgccatatctgtaaaattaaagatattttatataaactggttaaacaccttcatatgtaaatatttttctaaattcaatctcatttgtcaaatcattttactttagaaaacagacaaaatttccttttagaataaaaggaagtgttgaaaagaaaatggatgactagccttcggcttccattcttggtatacatgagagaggctggctgctgagatgaatgtgaaccaggttgcagagaatctggctttgagccaccaggaagaactagtggatttgccaaaaaactaccccttgagtgaaaatgaagatgagggggacagtgatggagagagaaagcatcaaaagcttctggaagcaatcatttcccttgatggaaagaataggcggaaattggctgagaggtctgaggctagtctgaaagtgtcagagttcagtgtcagttctgaaggatcaggagaaaagctgggccttgcagatctgcttgagcccgttaaaacttcatcttctttggccactgtaaaaaagcaactgaatagagtcaaatcaaagaaggtggtggagttacctcttaacaaagaaaaaattgaacagatccacagagaagtagcattcagtaaaacctcacaggtcctctccaaatgggaccctatcatcctgaagaaccagcaggcagagcagctggtttttcccctggggaaggagcagccagccattgctcccattgaacatgcgctcagtggctggaaggcaagaactcccctggagcaggaaatttttaacctcctccataagaacaagcagccagtgacagatcctttactgactcccatggaaaaggcctctctccaagccatgagcctggaagaggcaaagatgcaccgagcagagcttcagagggctcgggctctgcagtcctactatgaggccaaggctcgaaaagagaagaaaatcaaaagtaaaaagtatcacaaagtcgtgaagaaaggaaaggccaagaaagccttaaaagagtttgagcagctacagaaggttaatccaactgtggcattggaagaaatggaaaaaattgaaaatgccagaatgatggaaagaatgagccttaagcaccaaaacagtgggaaatgggccaagtcaaaggcaattatggccaaatatgacctggaggctcgccaagctatgcaggaacagttggccaagaacaaagaactgacacagaaactccaggtagcctctgagagtgaggaagaggagggaggcacagaagtggaagaactccttgtccctcatgtagcgaatgaagtgcagatgaatgtggacggaccgaatccctggatgttcaggagctgcaccagtgacaccaaagaggctgcaacacaggaggaccctgagcaagtgccagagcttgcagctcatgaggtttctgcaagtgaggcagaagaaagaccagtggcagaggaagaaattttgttgagagaatttgaggaaaggcaatcccttagaaaaagatctgagctcaaccaggatgctgagccagcaagcagtcaagaaacaaaagattctagcagccaggaggtgctgtccgaattgagggcactatctcagaaattgaaggaaaaacatcagtccaggaagcaaaaagcaagttcagaggggactgttccccaggtccagagagaggaacctgccccagaagaagcggaacccctattgctacagaggtcagagagagtacaaactctggaagagctagaagagctgggaaaagaagattgttttcaaaataaggagcttcccagacctgtgttagaaggacagcagtcagagaggaccccaaataatcggcctgatgccctaaggagaagaaagagaaggagcaactgatcaacctacagaacttcctgaccacacag

SEQ ID NO: 24795 - DNA, 1651 bp, Homo sapiens
tccggagttcgggggtcggcggaagatggcggccggcgaaaggagctggtgcctgtgcaagttgttgaggtttttttattcattattcttccctgggctcattgtatgtggaactttatgtgtgtgtttggtcattgtcctttggggaatcagactgctgctacagagaaagaaaaaattagtgtcaactagcaaaaatgggaaaaatcaaatggtgattgcattttttcatccatactgcaatgctggtggaggaggagaaagagttttatggtgtgctttaagagccctgcagaaaaagtatcctgaagcagtttatgttgtttataccggcgatgttaatgtcaacggtcaacagatactagaaggtgctttcagaagatttaacatcagattaattcacccagtgcagtttgtttttttaaggaaacgctatcttgtggaagattcactgtatcctcacttcacactgctgggccaaagtctaggatccatttttcttggctgggaagctctaatgcagtgtgttcctgatgtttacattgattcaatgggatacgcttttacgcttcctctgtttaagtatatagggggttgccaagttggaagctatgttcattatcctactatcagcaccgacatgctctctgtagtgaagaatcaaaatattggatttaataatgcagccttcattaccaggaatccttttctcagcaaagtaaagctcatctactactatttatttgcttttatttatggacttgttggttcttgcagtgatgtagtcatggtcaattcttcttggacactaaaccatattctctcactatggaaagttgggaattgcactaacattgtttatccaccttgtgatgtgcagacatttctggacattcccttacatgagaaaaagatgaccccaggacatttgctggtttctgttggccagtttaggccggaaaagaatcatccattgcagatcagagcctttgctaaattgctgaataagaagatggttgagtcacctccttcgcttaaacttgtcctcattggaggttgtcgtaacaaagatgatgaacttagggtaaaccaactgagaaggctgtctgaggatttaggagttcaagaatatgtggaatttaaaataaacattccatttgatgaattaaagaattatttgtctgaagcaacaattggtctgcataccatgtggaacgagcattttgggattggagttgtggagtgtatggcagctggcacaattatccttgcacacaattcggggggcccaaagcttgacattgtggttcctcacgaaggagatataactggctttctggctgagagtgaagaagactatgctgaaactatcgctcacattctttccatgtctgcagaaaagagactccaaatcagaaaaagtgctcgtgcatctgtaagcagattctctgatcaggaatttgaagtgacattcctatcatctgtggaaaagttatttaagtaatgccatatctgtaaaattaaagatattttatataaactggttaaacaccttcatatgtaaatatttttctaaattcaatctcatttgtcaaatcattttactttagaaaacagacaaaatttccttttagaataaaaggaagtgttg

SEQ ID NO: 24796 - DNA, 581 bp, Homo sapiens
gtggtacttacgcatttatgcttctgtatgctgggttctgacccgcagatcctgacccagtgatggatgagagacatacactgacacagatattttgcctgtcagttaggctgaggggctgggccactcacagacactgaggaaggtgctgtaaagagttgtagctgcggtcccatcagccagcgaagctcacatttattcagtatagattaaatgacaaaggtcttgagtagacaccactagagggtaattgacattgcctacctcctgagtagagagcaattatgtggtcctaagaccaattaaaggttggtcttaggaccacatgagtaaacaagctgtttagataaactcctctgtgtctacgagctcagcttttaagagaattcagctgccttcagccaaacactttatgcaacccccaggcattccaagagggtttttgtttatttcctataattttacaatttctctcatcatcctgaccgagcccccacatctggatgaactagtcaagtttaaaaaaaaaaatcctaggggccagcacatgtatgaaaagatgttttcttttactcacagtt

SEQ ID NO: 24797 - DNA, 347 bp, Homo sapiens
aaggtttacctcattgcaagaatgaaagcctaggtcacttctcttttcactgtaccataccatctcctcttatgtatcttggccaggcatgttggcttatgcttgtaatcccagaactttaggaggctgaagcaggaggattgcttgagtccaggagtttgagaccttcctgggcaacatagggagacgctgtctctacaaaaaattaaaaattagccagctgtggtagtgcgcacctgttcctagccacttaggaggctgaggtgggaggattgcttaagcctgggaggtcaaggttgcagcctggatgacagagcaagactgtctcaaaaataaaaaagaaaaat

SEQ ID NO: 24798 - DNA, 367 bp, Homo sapiens
tttttttgagacagagtctcgctctgtcgtccaggctggagcgcagtggtgtgatctcactgcaacctccacctcctgggttcacgccattctcctgcctcagcttcccgagtagctgggactacaggtgcccaccatcacgcccagctaatttttgcattttcagtagggacggaatttcaccgttttagccaggatagtcttggtctcctgacttcaggatccacccacctcggcctcccaagtgctgggattacaggccaggcgtgagccaccacgcccggcctgcaataaagattcttatcatcagaattgatttggcctgcaataaagattcttatcatcggaattgattagcatgatttta

SEQ ID NO: 24799 - DNA, 829 bp, Homo sapiens
  misc_feature (616)..(616): n is a, c, g, or t
  misc_feature (618)..(618): n is a, c, g, or t
  misc_feature (632)..(632): n is a, c, g, or t
  misc_feature (637)..(637): n is a, c, g, or t
  misc_feature (647)..(647): n is a, c, g, or t
  misc_feature (655)..(655): n is a, c, g, or t
  misc_feature (661)..(662): n is a, c, g, or t
  misc_feature (664)..(665): n is a, c, g, or t
  misc_feature (682)..(682): n is a, c, g, or t
  misc_feature (685)..(685): n is a, c, g, or t
  misc_feature (687)..(688): n is a, c, g, or t
  misc_feature (691)..(691): n is a, c, g, or t
  misc_feature (696)..(696): n is a, c, g, or t
ggccgaataggaacagctccggtctacagctcccagcgtgagcgacgcagaagacgggtgatttctgcatttccatctgagaccagtgaccttttctatttcatagtaaacaaacttcatgagtacttgccggagtctagggataagaatgcactacaaaatcaaagccaaagggttgatgagctggtggcatgcattgaaattatacagaccctagtattgatgttcagagaaacagaaaccgagtcatcacgcctgaacacattggcagctaagaattacagaagcttattctggagtatacaaatactgctacagcacttttatatgagatacttctgtgtctttcagcagggaaatctcggattgggatccacaaagtttgctattagctggataatgtcctttctacaaagctgtcctcccatcattacttttgtggccagtattgtgacaacaagtggtgaggggtctttcagcttcatttcagctgctaagtccctgccaagcagttctgttgtaccagcaattttacatcctcaagagctgtctgcggcacagaaggactctagctgagtatattaggaataactacagagaagaattccaggtactntnatcacatgccagcntgcgnagaggtcccnttgtgttncccatnntnnacctacattcattttcntgnannctngaatnggtgaatagaaccaacatgtcgctgtttacggttactgttcccggtccctgtttccgggaacatttttttggaacctggtcctgggccaacgcatattggggccccacccctggaggaatacacaatttttcc

SEQ ID NO: 24800 - DNA, 953 bp, Homo sapiens
  misc_feature (740)..(740): n is a, c, g, or t
  misc_feature (742)..(742): n is a, c, g, or t
  misc_feature (756)..(756): n is a, c, g, or t
  misc_feature (761)..(761): n is a, c, g, or t
  misc_feature (771)..(771): n is a, c, g, or t
  misc_feature (779)..(779): n is a, c, g, or t
  misc_feature (785)..(786): n is a, c, g, or t
  misc_feature (788)..(789): n is a, c, g, or t
  misc_feature (806)..(806): n is a, c, g, or t
  misc_feature (809)..(809): n is a, c, g, or t
  misc_feature (811)..(812): n is a, c, g, or t
  misc_feature (815)..(815): n is a, c, g, or t
  misc_feature (820)..(820): n is a, c, g, or t
ggccgaataggaacagctccggtctacagctcccagcgtgagcgacgcagaagacgggtgatttctgcatttccatctgagaccagtgaccttttctatttcatagtaaacaaacttcatgagtacttgccggagtctagggataagaatgcactacaaaatcaaagccaaagggttgatgagctggtggcatgcattgaaattatacagaccctagtattgatgttcagagaaacagaaaccgagtcatcacgcctgaacacattggcagctaagaagggagcactatttaatctcttggtaattttaattagtgagcctcagattccaaaatcttgtcctgtgtttgatatccagttggtggctgattcagctttagtcagaatgtcttttgacgctgagttacagaagcttattctggagtatacaaatactgctacagcacttttatatgagatacttctgtgtctttcagcagggaaatctcggattgggatccacaaagtttgctattagctggataatgtcctttctacaaagctgtcctcccatcattacttttgtggccagtattgtgacaacaagtggtgaggggtctttcagcttcatttcagctgctaagtccctgccaagcagttctgttgtaccagcaattttacatcctcaagagctgtctgcggcacagaaggactctagctgagtatattaggaataactacagagaagaattccaggtactntnatcacatgccagcntgcgnagaggtcccnttgtgttncccatnntnnacctacattcattttcntgnannctngaatnggtgaatagaaccaacatgtcgctgtttacggttactgttcccggtccctgtttccgggaacatttttttggaacctggtcctgggccaacgcatattggggccccacccctggaggaatacacaatttttcc

SEQ ID NO: 24801 - DNA, 1079 bp, Homo sapiens
agcgtggtgttcctgcggcggcatctgccgcccgaggtctacgacgcggtccgcgcctacgagccatgcatcgtggtgtccaactctgagaaccacatcctcaagtatgtggtgctaagcgaccggctcgtctacctaaccgagaacccgcccaagtccatccggcgggtagtggctctgcgggacgtcgtggccattgacctgattgatgattacccggaatttttgagttcgccagatagagaaatcagccaacacattcgtatcatctattcttcaaccgttttgaaaaaagagtgtaaaaagtcaaacagtgtcaggaaattcctatttccatttcatcatactaaagctaacaacaagaaagtcaaggaagaaaagaacggccttgccttttggagaagcaaagagtccagaagtctgaaagaatctcctctcaggtctgaggagaaaattaagcacttcagtcaacttaaatctgaactttttcttaaagacaattctttgaggaggatactttctttacttatggaacttaaagtagcagcccagaaaaacttcattctgaaaaggcttttctggaagaccagtgaccttttctatttcatagtaaacaaacttcatgagtacttgccggagtctagggataagaatgcactacaaaatcaaagccaaagggttgatgagctggtggcatgcattgaaattatacagaccctagtattgatgttcagagaaacagaaaccgagtcatcacgcctgaacacattggcagctaagaagggagcactatttaatctcttggtaattttaattagtgagcctcagattccaaaatcttgtcctgtgtttgatatccagttggtggctgattcagctttagtcagaatgtcttttgacgctgagttacagaagcttattctggagtatacaaatactgctacagcacttttatatgagatacttctgtgtctttcagcagggaaatctcggattgggatccacaaagtttgctattagctggataatgtcctttctacaaagctgtcctcccatcgtaagtatctagaagtcaaaac

SEQ ID NO: 24802 - DNA, 575 bp, Homo sapiens
ggccgaataggaacagctccggtctacagctcccagcgtgagcgacgcagaagacgggtgatttctgcatttccatctgagaccagtgaccttttctatttcatagtaaacaaacttcatgagtacttgccggagtctagggataagaatgcactacaaaatcaaagccaaagggttgatgagctggtggcatgcattgaaattatacagaccctagtattgatgttcagagaaacagaaaccgagtcatcacgcctgaacacattggcagctaagaagggagcactatttaatctcttggtaattttaattagtgagcctcagattccaaaatcttgtcctgtgtttgatatccagttggtggctgattcagctttagtcagaatgtcttttgacgctgagttacagaagcttattctggagtatacaaatactgctacagcacttttatatgagatacttctgtgtctttcagcagggaaatctcggattgggatccacaaagtttgctattagctggataatgtcctttctacaaagctgtcctcccatcgtaagtatctagaagtcaaaac

SEQ ID NO: 24803 - DNA, 759 bp, Homo sapiens
ctcatcaatatttctgcacttaaaaagtcatggaacaattatattataaaagctactctgtggaagatcccttctatgctagtgagttcagtcctgctatggaagtcaaaagccatataggtctgaggagaaaattaagcacttcagtcaacttaaatctgaactttttcttaaagacaattctttgaggaggatactttctttacttatggaacttaaagtagcagcccagaaaaacttcattctgaaaaggcttttctggaagaccagtgaccttttctatttcatagtaaacaaacttcatgagtacttgccggagtctagggataagaatgcactacaaaatcaaagccaaagggttgatgagctggtggcatgcattgaaattatacagaccctagtattgatgttcagagaaacagaaaccgagtcatcacgcctgaacacattggcagctaagaagggagcactatttaatctcttggtaattttaattagtgagcctcagattccaaaatcttgtcctgtgtttgatatccagttggtggctgattcagctttagtcagaatgtcttttgacgctgagttacagaagcttattctggagtatacaaatactgctacagcacttttatatgagatacttctgtgtctttcagcagggaaatctcggattgggatccacaaagtttgctattagctggataatgtcctttctacaaagctgtcctcccatcgtaagtatctagaagtcaaaac

SEQ ID NO: 24804 - DNA, 437 bp, Homo sapiens
cctgaagtatatgttgcagacggccactggcacacttttctaattgggaaaaatggaacagcaacagtattgtctgttgacagaatatataacagagatattatccaccctactcaggacttcggtggccttgatgtgcttactatatcacttggaggaattccacccaatcaagcacatcgagatgcccaaacaggtaaatgcctttattaagtagagtcacaagggaagtaaaattgttcttcaaaaagtaattgctttttcttgtggcaagactacacatttaacatgaatctcatatacagaacaatttcattcaataaaatttatgtttaaaaaagtagtttgatgtctgataatatcaattataaatatcctaagaatgtcataactatcttcagaaagtttgtaataaactattagccaccaaaaaaaaa

SEQ ID NO: 24805 - DNA, 611 bp, Homo sapiens
tatttttagtagagatggggtttcaccgtgtaggccaggaaggtgaattatattttctaattgacacaaaagatgtgaaaataagtaacatacaatgataatggatgggaagctttcacgattggaaagatgtcaatgttccacaaaataagtgatacatttcatgtaatttccatccaaataccagtggaattttttttatgtgataaaagtagcctaagattaactttgaaaattaaatgaaaattgtgtaaaagaataatgagaaaagatttgctatgctgtatcattataaaaatattatgccaaggttcaacaactaaatctacagaatttgtacgaaaataaatccacagagaaaccaaaaacttgaacacagattctaatatagataagaatttcaaatatgataaagatgatgtttcaaatcagttaaataaatggagctgggacatttggattaacatctgattaaaaaaaagcttgattctcttacaacacatatcaaaataagttttaggtaacttcagaattacatataaactgaaaactttagaactaggaaataatacaaatatttacctaccttcagagtagaaaagacttattta

SEQ ID NO: 24806 - DNA, 367 bp, Homo sapiens
gggaggctgaggcaggggaatggtgtgaacccaggaggcagagcttgcagtgagctgagatcacgccactgcactccagcctgggcaacagagtgagactctgtttaaaaaaaaaaaatgtccaaagggcagggtggctaagtcattggacccctgtgctgttataaaagttgcagaggaggtcacacatgcactcatgagttagcagtctccagggccttgcaggagaaaacctgtctctaccaagcatggatttttgtcagccagaaggctgcggcaggagaattgcttgaacctgggaggcggaggttgcagtgagccgagatcgcgccattgcactccagcccaggcaacagagcgagactcc

SEQ ID NO: 24807 - DNA, 447 bp, Homo sapiens
tgaagtcaaatatttagaaaagcttgagaaattcatttgtagaaggaatctgaatgacaggttctgtgtaactttaaattcagcctttctgggtcctaggttaaatgctgaatggacttgaaaacagagagaagctgaggacatttaagaactaagtcagttcctttagctattaggggtgggtagagagctgggtggtgggttaaaagggctgatcaaggtccttaaatatccgatgttaagtaaaggtatcacagagagtaattttaggaaactaattcctctgctttgtttccctgtcagtgtgcttctgcagtttagcatttgatcaaacactttcttttcatctccattttaagttaacttaacaggcctgcctctaaaaattgacttggtctaatagaacaattgtgtgctgacagctgacctggatttagacagaaaggg

SEQ ID NO: 24808 - DNA, 751 bp, Homo sapiens
ctataggaatgcttggtatccttccaagaactcctcctttagaggagcctcacagaagttgctgggtaaacatgggctcaaaccaaggaaagtcaggtaacctgggtggaggttatcccaccaccaatggcaggggacagcttgcaagtatttgggcttatagtctcccagcccacagcctctctcccttgctagtgttagagagatgctgatcacgtttactcttctcttattttctctgcgtatccccttaccttaactttttgaccatgttcttgagcctagagttcagttagtctcatttctccaggagtcctggagacagtgtccttccacctaccatgtgtggagtttacctgccaccccaatggcaaagatagtaagcctgagcataattgattctcgatttcttttgaattaataactggtatatataaccattaattccaattataattcacatgaaaatgtcagagcttctattgagagcaaaagcaaactttagcattagcctggtaatattatattatggttttatattcatataatatggagtaaactgtcattacattaatgcaaccaaaattcctggagctgtccagaaacttggtagcaattgtaacataaacagttaattttccagttatttggaggcttggaaaattaacacaaactagtagtaatacctgaacagcaattggaaccatttttgtacaatatgggtgaattgtattcaaaatgccttttaatg

SEQ ID NO: 24809 - DNA, 674 bp, Homo sapiens
tagagatccaggctacggagcctccactatctgccctgtcctcaggaagagggaagggtgtgtagtgaatcaaggataggcttttaagatcttctgccttgaagtggccattttgaatcattggccaaagaaagtcacattgtggtgcctaatttcaaatggttgccgggaagtgcgaagtccttcctaagcacgccgtaaatcctttaatactaatttccgcttcatctctgagcatttgcacatgttgtttgctcttcctggaacatcctttcctttctctcctctgccttataaagtcctaattcaaaacacagttcacaggtcccctatgtcagtggtcaccaaactttttggcaccaggggccaatttcatggaagacaaattttccctggacaagggctgttgtgtgtgtggagtgggggtgggtttcaggatgaaactgctcctcctcagatcatcaggcattagattcttataaggagcgcacaacctagatcccttggatgcgaaggtcacaatagggtttgcactcctgtgagaatctactgccccctgctaatctgacaggaggaggagctcagatagtaatgcttacctctgctatgtggcccagttactaacacgccacagaccagtaccagtctgctgtccaggggttgggggtccctgc

SEQ ID NO: 24810 - DNA, 705 bp, Homo sapiens
cactgcactccagtctacgtgatagagtgagactctgtcttaaaagaagcctgggcgcggtggctcatgcctataatcccagcactttgggaggctgaggtgggtggatcacctgaggtcaggagttcgagaccagcctggccaacatggtgaaaccctgtctctactaaaaatacaaaaattagccaggcgtggtggccacgcgccttgtagtcccttctacttgggaggctgaggcaggagaattgctcaaacccaggaggtggagattgttgcagttacctgagactgtaccactgcactccagcctgggcgacagagtgagactccatctcaaaaaaagaaagaaaaaaatactgaaaataaagggataaaaatataccatgtaaattcgaaccaaaagaaagctgatataccaagtgtagtatcacaaagataggataagggggaaaagccactaatagagataaagagggatcctatctaataaacagttcatcaataagatataatagtcatgaacttgaatgcaccttacatagtcatgaaatgcataaactaataatgacaattacaaggagaaactgactttcacaaatatagtagcagattaaaattgacctttacagaatacaatcagaaaaaattattagtagagctatagacattttgaactatcaggttagttatttagttgtaattgac

SEQ ID NO: 24811 - DNA, 1194 bp, Homo sapiens
gttgccgctgcatcggattttaacagacatcctggaagttcggcagaagcccatcctgatgacctagctgcgtgcggagcctgcgcagagccccggccgggcccagccctcggagtgctgccaagtgcctacctgtccaccgccaccggggtctgcgatggcacgccagtgctggagccgcagccaggcgaggccactcgactcccggggccggggccgactccacgaacaccagcccaaactgaagtgcctcttccctcccctgctggcgctgctccgccctgtgccccccgcccatcgccccccacccatctctggagagccctctgcacccaaagaggactagagatgccgagcggccatgagagagagcggaaggagcagctgatgcccagagcggggccagagcggcgggtctatgttcacgtccccccagcagcaggcggaaccacccagccagggcactcagtgcattggactgtccacatgttcttgaggaaagccggtggaagattctggaatgccgtgcggatgaacttcagcgcccgagtcagtcccagctcatcctccccagtttaccactttgttctaataggagatgggaacacgagaagtttgatggctttgccctgggctgggaatacctcacccacgcccagttccagaaaggcctccagctgagcagacggccccgatcccgccagaacggccttttgcttccagccaaagaacaccgccaacacgcacacctccaacctgggacatcccacgctgggcctcgcacggaggaacctgcagaatttggattctgagggtagtcgggaggcctcggtagccaggcagaacaggatatctgccaaagggtgtctgatgtggggtggggctggcatcctcccaggaaggttctaggtgggaccccgtcttctgggggcgggggtgtcttttcatcttccctggtttcctagaactcacttcctttgacggcgtgtgttggtcccatctctcagaccagctcactgaggcagaggagttgctcagaggctcacatgggcacccccattggttcgtgtgagcagctgcccagccccaggcctgccctcggcctggtccagcatgaaggcgtttccatctgcaaggatgcacggtaccctccccgagagcaggcctgtcccctacccaactgggaataaactg

SEQ ID NO: 24812 - DNA, 662 bp, Homo sapiens
gaggacgacgagggggacgcgcgcgcccgggctcgcatcgcgctctacagcgtcttcccgcgtgaccaggtggaccgcgtgatggccgcgttcccggagctctcagacctcgccaggctcatcctcctggtacagagatgccagagcgcgggggcgcccctgggcaagccctaagggaccaacacgcacttgcagggaatggcccagcctcgccttgcgtcttggacgggtggacctgtggttgccagcctggacctgagtgggcccatcatggtgcccccttttctttaaagatggtcagggaagcctgcttcctcctcctgagcggggttgtgggggcctggtggcacttggtgatcctcactgaggccggggcctgctgcggggaggtccacccacttccgtggagggaatgattttccatgtgcacggagactgcgggtccaagctgcagtagaacccacaagtgggtcacaaaatcaatttagtgggtcaccaccacaaacacagtggactgggacagggcaaagcgcaccctgtgccatcaggctgagtctgaactcttgttacctatcctgtgtccccacccccttggcagccatgtaactaacctcaatgtgggtcgtagtcagaagtttaaaaaagactgtgaatgctcttga

SEQ ID NO: 24813 - DNA, 129 bp, Homo sapiens
agttcacttgcccaaggtcacacagcttatatgtggtggaaccagttcttgaatctaggtccagctggttctaaaacctttgccagctgttattttcaaaaagtgacacatatggccaaaatggccact

SEQ ID NO: 24814 - DNA, 348 bp, Homo sapiens
gaaaagagttgagtctaagactaagcaagcatcaccgtttcaggctactagagaactcttacgctttgcctactgccatttccatatttccctcttatcactgtgtggcatagtatagacagtgtattctgtattctggtaggagacaagcctatgcatgagtggagtactaaaatggtctgaagagctttcaaaaagttttcaaactacacagtccctaatctccatatccattatggatggatggtttagaagactatccatctgttttcagttgattttgaatatctgagagcaatctgaagaaaaagtttaaataaggctcatgtttcaaccataggaaaaaaa

SEQ ID NO: 24815 - DNA, 192 bp, Homo sapiens
accaccaccaccaccaagtgtaattcaattatgaaaactggcagaaactacatacatccatggtacaagatgctcacaagcccagttttaatcaataactcctcagcaacctgcatttaccttgtctaaaacaactgaaaccttctgtagctcaaaaaaccaagtatgtctcaaacaaccacagaaaaatgg

SEQ ID NO: 24816 - DNA, 427 bp, Homo sapiens
ggaaaaaataaatccccataagtgtccaagatgcccatagagagcagagctgttctggtttaaacccctgctcttagcactgtgtttttccagctgtgggtggtgggggatgagtatctttttatttccatgagatgagaaaaatgaattactagaagtgtgaaatacaaaacacagctgctcttttttttagccatagactcagcagccataaaattgctgtatccagttgcagaaattcctgctgcttactcttgaccctctctcggtttgtgtgcatctcctctcaggctggctcccagatgggagcttggctccaggcgacactgggtgctctgctccagggagggtccttatgtggggtcctgccctagcctagcccctctctttatgggactctgttcactgtgggtttatgattcactct

SEQ ID NO: 24817 - DNA, 512 bp, Homo sapiens
catgaagacaaagtgctttttgttgtctattcatgaaactgtagaagaatattttgagtttttattcttatattatgaagggattctttgcctagcagtggccgtcaaactgatgtagcattgtacttctcaacagtgaagcctgtgtaataccatacagtaggatgaaagactattctgagcaaaataaaatgggatgtcagaatctttgaaaattattttatcattttttctattttttcatttttataaattagaaggattttccattcaataaggataatctctcttcctatcattctgtcaaaatggcagtttcttttggtaattatccaacctagtttcattacatttagaaggaggtttcagagcttattcttgataactataataatgatttgaatgttttatatcatgaagttttttctatgaggaaggctattctcaatgtatctgtcgtctaattttttattttctatctataaagaatatttaaataataaaaagtgtat

SEQ ID NO: 24818 - DNA, 346 bp, Homo sapiens
atcagaacatttggtcatttcgcctgtgagtctgtactgattcatgcactccctgatcctcagtcattgctgagcatccgaagattctgagagactgcaggtctataaacaatgggacagggagccaaggcatggccagagtgttacaaaccctggctttctgtgtgataagccactcaccttgaggacgtttttggaatatgcattaacctttcagacctttcgggatagcataaaaaggtacgaaggaaaaacataattgaagccatagatgaatcataggaactcaaaaaccattcttcattggaaagtgttgcagtgaattggtgagcgtttctagtgattc

SEQ ID NO: 24819 - DNA, 382 bp, Homo sapiens
agttcaacaccagcctggccaatatggcgaaaccccgcctctactaaatacacaaagattagctgggcatggtggcgcacgcctgtaatcctagcacactcaggaggctgaggcatgagaaaagcttgaacccaggaagcagaggttgcagtgcgccaacgtcgcgcactgcactccagcctgggcgacagagtgaggtgagagtctgtcgcaaaaaaaacacaaaacaaaacaaaaagatgcagtattaatatatagtctccaacttagataaccattacatttcagaaggtctcataaaatcttgcctaagagcaccatgagatataatttctacgactcttctaccagcactaacagtcttactgttttttatattgtg

SEQ ID NO: 24820 - DNA, 452 bp, Homo sapiens
tagagctcactgataaaatatgggaaataggtcaagacgggatggtcaagttacactggcatattcctaaatctcctgaagccagcattactagataatagatgatgggactgggttgattgtgattttaacgaagtagagattggagaggcctcggtggtgaatccccttagaatggccatccagtggcaaacagaatgaagccagcagccacatccaggtaagaagcaatatgttgggaaagattctgttttttgagacggagtctagctctgtcacctagactggagtgcagttggcgctgtctcagttcagtgcaacctctgcctcccgggttctagcgattctcctgcctcacccttccaagtacctgggactacaggcacgtgtcaccacaatcggctgatttttgtatttttagtattttgtgtttttaaacctctttacttgaa

SEQ ID NO: 24821 - DNA, 484 bp, Homo sapiens
attttaaataggatactatgtataaaactgcttagcacagtgctccatcaatgttagtttggttaatctggttaaagcaaagttgggtaggggggcattctagcagctgtacatgcctagtccctaccttatcccatgtggtggctcctgagatagcttcctagaacccttctatagatgcagtttgaaaatctctaatcttggctaggtgcgatggctcaatctgtaatctcagcactttgggaggctgaggcaggcagatcatttgaggtcaggagttcaaggccagcctggccaacatggtgaaaccccactctctactaaaaatacaaaaattagctgggcgtggtaatgcatgcctgtaatcccagctacctggcaggctgaggcaggagaattgcttgaaccctggaggcggtggttgcagtgagtcaagagcacgccactgcactctggcctgggcaacagagcaagactctctctc

SEQ ID NO: 24822 - DNA, 349 bp, Homo sapiens
tacaaatagttctaatttattttgatttattggtttaaaaattacaaaaataataaactgctgttaacatggagagaaagtgaaaaataaagaaatacatcaccaataccagcaatctgaaagaatcacttttatcattttgctgaatttcctatcaaatgtttcatatatttgttttacaaaaattttatatcttgcctttttcatataacatatcataaataatttctactcctagaaatttcatatttttaaataactaagctttgtaaattacaattattttttctgataaaaataatatatactcactgaaaaaaactgaaaaatagagacaaacaggaaaaaa

SEQ ID NO: 24823 - DNA, 1868 bp, Homo sapiens
ttattcaataaataatcctcatataatgcacagtattgccacaaatgcccacttcatttgtctgcatagacatattaagaatttttcaatgatgtaatttaattatcctaaaagaaatgacagattcttctgtaggaaaaaataaaaacatgaatatctcaaattataatggttaatctctaaaatatgcttaaagtaagatgtttctatgttatgtggttatgttatcaataatatttggttgatcttcacatattttatatgcatatatatatcaagaagttatatatatataactcaagaaactcaagttatatatatatgtcaagaaatgtatgattattttggagagaatgggcccaaatgtgaaaaagatataaaaaaaacaaaaaaaacaaaaaaaaaacactattttcccctacgaaatatactgtatatttcaaaagaagaaaagttaaaagatatttgaagattgcaggggcaaaacaaaaacctaccagggctcagcacttaagcacttttcccacatccagggtcaaagcagcagtaactacatggacttttaagtgcggtatgaaatgcaacattacgcttacaaacagtactgtcaaacctcaaatgctttctttcttcagatgctttttcgtgtacatgatactagtagacacttttctctttatatttactgatagtgaaaatcatacgcaataaaatattgatgtttgaaggcagtggtcaccaattggttaaaaaactatgaaatgtaaactgaattgttatatctctatcctttttgcttttctctgtgtttttaatgtatggaataaatctcataaatagaaagaaaaataatctagaaatttttcaaagctagtactctttctccttataaatgtacacaattttaatctttttacaaatttatttaactgtacctactgtacttattgtagattcaatgacgcagttaagtcatcacccaaggatttatgaatttgagattactgacctgttttcttcatattgcattcacatcaatatttgtgaatttgttgttcagcttttcattcaaacaaaaaatattccctcaagaaagctccatttttatcataaacatttcaacataaccaacattagaacaagtctgccatgttaaaaataatttaaagacttatctctgaaaacggtatccagaaacgcaggtgttcccagtaatgtagcttcaaaaataaaatgtgctatttatatgacatgaaattcataacttttggaagggtatatttatgacagcataaaaaataaattctgtgctataaagaagatccaacaaattaaccatataagcacagaaagtagagaaacacagttattgaatctactcttgtcattaacattttcaaaaaacaaaatgcatattgtaatatttggtacatgacacttgcatgttgatatgcctatatacttacaaagtattcaatgtgtacttagcggcgcttaaaatatgtcatgtacaactcttataaacatttttacagggttcccatttgcacttcatctttcagtaaagtcttgtcagaaaaaaattgtctgataaatatggaaaaataaaatttgaattttagttatctgttggacattactgaattgtctattcatttagtacattttcttaaccttgaaaacagacattgaaagatggaactttcttttttccagtgacaggtccattaaatcgatggtacaaaacatacttctttatgccaaacacattattttgaatacctttttttcaacttcatacattatccatccattttagttttcctcgatgatgcccattttctttgtaaatttctaagtggaagttt

SEQ ID NO: 24824 - DNA, 455 bp, Homo sapiens
caaagaacagacctcatatggggcccactctcaagcactggttctatctcccactcttccatctttcctctaaaggacaccatggatcctccaaggcaggtgcacccatccactcaccatgtacacaaccacagtcaccacagagcaggataatactaacagtaatagcagagttacagtaattgagtgcatactatgtgccaggtacaatgcaaagtatcttgtgtatattgtctcatttaatcttcataatgacccagtgttaatagttttgcacaactattaacctcactttatttacaaggaaactggggttcagaaaggttaagtcacttttcgagattgcacagctcataagtggagtggctggtactcaaagcccttacagactgccccagaaccctacttcttaatcattctattatgctcataataaaaatttactgaggactcta

SEQ ID NO: 24825 - DNA, 375 bp, Homo sapiens
gggcttataccatgaaataataaagtctgtataatgtactcttaattatgagttcatttctatgactttttatttctctctcacttcttattttatataaggtgattaattatagattgacaatgaaagaaacacagacttacatacccacggattaaagaaatcagtcattacatttaatggtgagcctaacaatgagagatgtgcttcccttacggtgtttctcgttcagggttagtgttaactagaatcctgagggaaatttggcaaggagaatactattgaattaaaacttcgctgagtcttagtccattgagcttaggagcaagaaagaaaaccacattggtcagtgtggagaggtgttaataaaagcat

SEQ ID NO: 24826 - DNA, 439 bp, Homo sapiens
gagctttacctcctcacacctggctttttatagtgctcttctcgatcatgtatagtgagtgctcaccctgaaaatctcatttttccatcttgttacttttccagtgatctcctggggactttatagattggctaccaggaaaccgagtggttggcttaccccctaattcatctctggctgagagttttctaaaagatattttaaattaggccgggtgtggtggctcacgcctgtaatcccagcactttgggaggccgaggcaagtggatcacctgaggtcaggagttcgaaaccagcctggccaacatggtgaaaccccgtctctacgaaaaatataaaaattagccaggcgtggtggcacgtgcctgtaatcccagctactcaggaggctgaagcaggagaatcacttgaaccctggaggtggaggttccagtgagcc

SEQ ID NO: 24827 - DNA, 1024 bp, Homo sapiens
tttttataccacgacttcattagtcatatccctgtcagacctgtgaccagtgtcaaatgttttcaaaaagcacaccaggacaggcatggaactcatcagcctgtgtcaaaggtcgctctcattaaggagtcaaaatgaaaactttcagtgtctctaacacatcgcatagctctccctggtactcccacccccagtcctgaaatccagggccagctaagcacctccagctccccagacattcaaataagatcaagatgacagggcaagaaaatgaatagagttcttacccggctggacctcataatctggtactgattgaaacaaccagaaagctgtttgccaggtcttatagcaccatttcctgaggttaaacataacatctcaaaatgaagcaattaggggtttctccaaaacaagagtcttcagtaattaaaaaagaaaaaaaaaggcagaaagcaagaaagaagaaaataaagactatcatggtaggagctgattaggcccattaggtagggtttgatggtggaggaactgcttttttttgccacctgggaggtcaacttttgattatggaagcagtaggtaaagaagaacttatcgataatagtgctataaagatggacattaaggaatctgaagatcagagataagaagaaaaccatctttcccaggactcatttggacaatatggaatatcagagattcggtgctccttttcttgtttcattttgttttgaatcattactgcttttctgaagacctgttcactatgtgagcatagcctctgtgttatgatgctataagggatttccaaagaggtctgagtgatggtttcttattttccttcagaatcttcttcaagccacattctggtgttggtgttggtgttggatttgggttcctaggagacttgaaacatggattacatcctgtcaccacaatatttggctggttacagtggctttaagattgatgaacagatatttccagtatcacgtggggtaaatgtcaaggaagcctctag

SEQ ID NO: 24828 - DNA, 476 bp, Homo sapiens
gacctcaggtgatccacctgcctcggcctcccaaagtgctgggattacagggttgagccaccacgcctggccaaccatctgttttttaagccactcagtctgtggtctgtgaagacagccccggcagactcatccatccagcttcaagtgctgcagtgctcctagcacaatcgatcgctgtccctgacaacaaagacctccctggtcaactctgtgtctgtgtcccatcccatccacttgctcatgtcctgtagtccaagccctactttggacctccactggggctgttgcaaaagtaaaggcagccagcaatgaagagcctgttggaacacgagttttaaaaattcccttggctgggcgcagtggctcacgtctgtaatcccagcactttgggaggccgaggcgggcggatcacaaggccaggagtttgagaccagcctggccaatatggtgaaaccccgtctctactaaaaata

SEQ ID NO: 24829 - DNA, 454 bp, Homo sapiens
gctacagcggcagagctgatccgttgtgagagagatcacgtggcctgctaaactgaaaatcttaactgtctgaccctttactgtaaaagtttgccaaccactgttctaagaaggcctgtgataaggatggatttttaaaagcagtacatagaaatgctaccaaatgtgaacatgcacacacgcatacctccagccaaacttcagccatctggagcgttttggaggctttgggagcctcatttctggagagttaagctttacttttaaggaatttttctaaactctatcacccatttattttcctgccttctcaaatagagtacgctgaatgtgtgtgaagccttccttgaagaatccagccatcatttcaagcactaggttttagattcgtgctaaaagcactgatggttgcgcacgggcatccaaaatgctgtagctcttcactcagtgaccc

SEQ ID NO: 24830 - DNA, 350 bp, Homo sapiens
aacagggatgcaaaggaactgggtctttctaatattgctgatgggaatgtaaaatggtacaaccattctagaaaacagtttaggagtttcttctaaaattaaacatgcagtcaccatacagcccagcaattgtactcttgatatttatcccagaaaattgatgtttatgttcacccaaaaaccttgacatgaatgcagtagctagaaacaagaaacagctcaagtatccatcaatgagtgactgttaaacaaactgttatatactcataccactaaatactacacaacaatttaaaggaatgaactactgatactcaatattcacaactccaatggatgtcaagagcacc

SEQ ID NO: 24831 - DNA, 317 bp, Homo sapiens
ggactatgttaggagatatttagtagttcaacatatgaaaaatttgatagcgctgtagaagataatacaaaagccatgtttcgtaagagatttctccagtgccttgtttttgttttagggatagacaaggaaaatgaatggtttttgttttagggatagacaaggaaactgaatggtttcagattaaaagctcccttgaatttccttgagtagctttttcccaccttacagctgtttttttcatcttttaagatactgacttcagatgtcctgggtatgattctgtttttgcctgtgacttttcataatccttttag

SEQ ID NO: 24832 - DNA, 372 bp, Homo sapiens
acaagtagtcagcacattgcaggcaaaaggagccatcctacatagatatggggacaggtgaggcctagctgtcaccttcaggactgtaaagtaggccaggcgcggtggctcatgactgtaatcccagcactttgggaggccgaggcaggtggatcacttgaggtcagaaggtcaagaccagcctgaacaacatggtgaaaccccgtctctactaaaaatacaaaagaatttagttgggcgtggtggtccacgcctgtaatcccagctacctgggaggcttgaagaagaatcgtttgaacccgggaggcggaggttacagtgagctgagattgcgccattgcactccagcctgggcaacaagagtgaaactca

SEQ ID NO: 24833 - DNA, 588 bp, Homo sapiens
aatcataatttaatatatagatcactgacctttccccagattatgttttcctttttttgagggggaagctggatataaactggcagttaaaaaaattgtaaagaaatcaacttgctcattttcattgtgtatttttgctctcaagcattttgcatgaactgtgtgtggattcattgcctacattggatgatgaagacttgagtgttgctactaaggtaaagtggtctcttgtaaaattaatcttctcactctgagtgtagttttgcatagtatttacttttcaaatttagcagtggtttacctatcattgttttatggtggtaatggaaagctggtcagagaaaaacatacacatggctagttgattcaaaaaatgtgtttaactttggtaactaataaagattggtaagtactgtgacagggtgggagctgaaaaataaatgaactggaaaacaagtagtcacaggaaaatcacattaggaaatgctttctccaatagaggaaatatgaaatttggttaaagtttatttggataaatactactactttgacttttaaatcatacgagtgtgactttcttaatattta

SEQ ID NO: 24834 - DNA, 986 bp, Homo sapiens
  misc_feature (4)..(4): n is a, c, g, or t
  misc_feature (10)..(11): n is a, c, g, or t
gggngccggnnccgcgccgggccggctccagggcggccgcggcggtggggcgcaggccgccgcgcgagtgaatcgaggcggcgggcccatccggaaccggccggccatcgcccgcggcgcggccggcggaggcggcaggaaccgaccggcgccctacagcaggccaaaacaacttcccgacaagtggcagcacgatcttttcgacagtggcttcggcggtggtgccggcgtggagacaggtgggaaactgctggtgtccaatctggattttggagtctcagacgccgatattcaggaactctttgctgaatttggaacgctgaagaaggcggctgtgcactatgatcgctctggtcgcagcttaggaacagcagacgtgcactttgagcggaaggcagatgccctgaaggccatgaagcagtacaacggcgtccctctggatggccgccccatgaacattcagcttgtcacgtcacagattgacgcacagcggaggcctgcacagagcgtaaacagaggtggcatgactagaaaccgtggcgctggaggttttggtggtggtggaggcacccggagaggcacccgcggaggcgcccgtggaagaggcagaggtgccggcaggaattcaaagcagcagctttcggcagaggagctggatgcccagctggacgcctataatgcgagaatggacaccagttaaacagaccagcaaatccgcgtgcggaacaggacccaggcgtctcctcttgctccctggttggggggcggtggctggggctgtgcggccaatgatggatttgtttcttttatgttttaaaataggatttaaaaactcatgtaaaggttttttttttttctttttttttttttttaattctgaaacagacctgttttgtaccgagttatttttgggataaattttactggttgctgttgtggagaaggtggcgtttccaccttttccataataaaatagaaatgtgtgt

SEQ ID NO: 24835 - DNA, 1509 bp, Homo sapiens
  misc_feature (4)..(4): n is a, c, g, or t
  misc_feature (10)..(11): n is a, c, g, or t
gggngccggnnccgcgccgggccggctccagggcggccgcggcggtggggcgcaggccgccgcgcgagtgaatcgaggcggcgggcccatccggaaccggccggccatcgcccgcggcgcggccggcggaggcggcaggaaccgaccggcgccctacagcaggccaaaacaacttcccgacaagtggcagcacgatcttttcgacagtggcttcggcggtggtgccggcgtggagacaggtgggaaactgctggtgtccaatctggattttggagtctcagacgccgatattcaggaactctttgctgaatttggaacgctgaagaaggcggctgtgcactatgatcgctctggtcgcagcttaggaacagcagacgtgcactttgagcggaaggcagatgccctgaaggccatgaagcagtacaacggcgtccctctggatggccgccccatgaacattcagcttgtcacgtcacagattgacgcacagcggaggcctgcacagagcgtaaacagaggtggcatgactagaaaccgtggcgctggaggttttggtggtggtggaggcacccggagaggcacccgcggaggcgcccgtggaagaggcagaggtgccggcaggaattcaaagcagcagctttcggcagaggagctggatgcccagctggacgcctataatgcgagaatggacaccagttaaacagaccagcaaatccgcgtgcggaacaggacccaggcgtctcctcttgctccctggttggggggcggtggctggggctgtgcggccaatgatggatttgtttcttttatgttttaaaataggatttaaaaactcatgtaaaggttttttttttttctttttttttttttttaattctgaaacagacctgttttgtaccgagttatttttgggataaattttactggttgctgttgtggagaaggtggcgtttccaccttttccataataaaatagaaatgtgtgtgaaaaaaaaaaaaaaaaaaaacaaaaaaaaaaaaaaaagacaaaaaagagaatagaaacaaaaagaaaaaagagagaggagaaaaagagaacaacacagagagcgaaaaagagaaaaagcagagcaagacgaagaagagagcccaaagacaggagagaaggagaagacagacagagagagaagagaaaaaaaagaggaaggagagaagaacgaaaggagaacggagaggacgacacagagagaggagcgcacggagaacacaaccgaagaaagagaggcacgagggaaaacagacgaaagggaacagcggcggcaagcaagaaaggagacgaggaaaaaaagaaagacggagacagagccaaaaacacatctgagggagggacagaagagaaggggagggagagcaggagacgagaggagaggaaaaaaacacgcaagagcagcagccagcagggcaggaagaaggagaccgagaggacggaacgcagcgagacgccaggccagccgaggcacgacaccagct

SEQ ID NO: 24836 - DNA, 1055 bp, Homo sapiens
gcggtggctggggctgtgcggcaatgatggattagttgcctttggtggaccccaggacttcggcccactccggggcctcccctccctgctaggaggcaactcgtcacacccaagctgctggcctccagtcccatccgtcccccaacacatgtgacccgccaagaaagtgagccaggcacctctgtttcctgcatgtttattgacaaccagcaccggcgccctacaagcaggcccaaaacaacttcccgacaagtggcagcacgatcttttcgacagtggcttcggcggtggtgccggcgtggagacaggtgggaaactgctggtgtccaatctggattttggagtctcagacgccgatattcaggaactctttgctgaatttggaacgctgaagaaggcggctgtgcactatgatcgctctggtcgcagcttaggaacagcagacgtgcactttgagcggaaggcagatgccctgaaggccatgaagcagtacaacggcgtccctctggatggccgccccatgaacattcagcttgtcacgtcacagattgacgcacagcggaggcctgcacagagcgtaaacagaggtggcatgactagaaaccgtggcgctggaggttttggtggtggtggaggcacccggagaggcacccgcggaggcgcccgtggaagaggcagaggtgccggcaggaattcaaagcagcagctttcggcagaggagctggatgcccagctggacgcctataatgcgagaatggacaccagttaaacagaccagcaaatccgcgtgcggaacaggacccaggcgtctcctcttgctccctggttggggggcggtggctggggctgtgcggccaatgatggatttgtttcttttatgttttaaaataggatttaaaaactcatgtaaaggttttttttttttctttttttttttttttaattctgaaacagacctgttttgtaccgagttatttttgggataaattttactggttgctgttgtggagaaggtggcgtttccaccttttccataataaaatagaaatgtgtgt

SEQ ID NO: 24837 - DNA, 728 bp, Homo sapiens
ttccatctgcatcaatctgtttccatcggtgcttcaggaactctttgctgaatttggaacgctgaagaaggcggctgtgcactatgatcgctctggtcgcagcttaggaacagcagacgtgcactttgagcggaaggcagatgccctgaaggccatgaagcagtacaacggcgtccctctggatggccgccccatgaacattcagcttgtcacgtcacagattgacgcacagcggaggcctgcacagagcgtaaacagaggtggcatgactagaaaccgtggcgctggaggttttggtggtggtggaggcacccggagaggcacccgcggaggcgcccgtggaagaggcagaggtgccggcaggaattcaaagcagcagctttcggcagaggagctggatgcccagctggacgcctataatgcgagaatggacaccagttaaacagaccagcaaatccgcgtgcggaacaggacccaggcgtctcctcttgctccctggttggggggcggtggctggggctgtgcggccaatgatggatttgtttcttttatgttttaaaataggatttaaaaactcatgtaaaggttttttttttttctttttttttttttttaattctgaaacagacctgttttgtaccgagttatttttgggataaattttactggttgctgttgtggagaaggtggcgtttccaccttttccataataaaatagaaatgtgtgt

SEQ ID NO: 24838 - DNA, 922 bp, Homo sapiens
  misc_feature (4)..(4): n is a, c, g, or t
  misc_feature (10)..(11): n is a, c, g, or t
gggngccggnnccgcgccgggccggctccagggcggccgcggcggtggggcgcaggccgccgcgcgagtgaatcgaggcggcgggcccatccggaaccggccggccatcgcccgcggcgcggccggcggaggcggcaggaaccgaccggcgccctacagcaggccaaaacaacttcccgacaagtggcagcacgatcttttcgacagtggcttcggcggtggtgccggcgtggagacaggtgggaaactgctggtgtccaatctggattttggagtctcagacgccgatattcaggaactctttgctgaatttggaacgctgaagaaggcggctgtgcactatgatcgctctggtcgcagcttaggaacagcagacgtgcactttgagcggaaggcagatgccctgaaggccatgaagcagtacaacggcgtccctctggatgcgtaaacagaggtggcatgactagaaaccgtggcgctggaggttttggtggtggtggaggcacccggagaggcacccgcggaggcgcccgtggaagaggcagaggtgccggcaggaattcaaagcagcagctttcggcagaggagctggatgcccagctggacgcctataatgcgagaatggacaccagttaaacagaccagcaaatccgcgtgcggaacaggacccaggcgtctcctcttgctccctggttggggggcggtggctggggctgtgcggccaatgatggatttgtttcttttatgttttaaaataggatttaaaaactcatgtaaaggttttttttttttctttttttttttttttaattctgaaacagacctgttttgtaccgagttatttttgggataaattttactggttgctgttgtggagaaggtggcgtttccaccttttccataataaaatagaaatgtgtgt

SEQ ID NO: 24839 - DNA, 716 bp, Homo sapiens
gcggccgcggtgggaccgtgcggcctcgggctggggcagctgcagcgccggagggagcgctggcggccccgtttcggccggatcctctcaggccgggaagaggaagggtccggagtagccgtgagggtcaggaaagccctggactgagactcacagatctgctcttgttgcggtttttttttcagccaaaacaacttcccgacaagtggcagcacgatcttttcgacagtggcttcggcggtggtgccggcgtggagacaggtgggaaactgctggtgtccaatctggattttggagtctcagacgccgatattcaggtaagagacgagggcttctcggtgagccgttcgccctgcacaggacggatcgtgattttggggatgtggccctgagtccccttcccgccttagcgaagggagccctcccagctctgaagggctgcaggacagacccagtgctagtaaagccggggtcagtgcgcaggcaggtgcgagcctagctgagcctgaggaactgctgctgttagtctgaagatgggttctgtgagtgaaaatcccctgccagggcttccagtttctaacagggacaaagactgaccaaatgtgagtggtttttggctgttagacccagcccagttgctttttaaattttgtgcctgtcttagtgggttaatgtgagaaaaagaatcttctttatgtatcttgtgaagcacaggg

SEQ ID NO: 24840 - DNA, 954 bp, Homo sapiens
  misc_feature (4)..(4): n is a, c, g, or t
  misc_feature (10)..(11): n is a, c, g, or t
gggngccggnnccgcgccgggccggctccagggcggccgcggcggtggggcgcaggccgccgcgcgagtgaatcgaggcggcgggcccatccggaaccggccggccatcgcccgcggcgcggccggcggaggcggcaggaaccgaccggcgccctacagcaggccaaaacaacttcccgacaagtggcagcacgatcttttcgacagtggcttcggcggtggtgccggcgtggagacaggtgggaaactgctggtgtccaatctggattttggagtctcagacgccgatattcaggaactctttgctgaatttggaacgctgaagaaggcggctgtgcactatgatcgctctggtcgcagcttaggaacagcagacgtgcactttgagcggaaggcagatgccctgaaggccatgaagcagtacaacggcgtccctctggatggccgccccatgaacattcagcttgtcacgtcacagattgacgcacagcggaggcctgcacagagcgtaaacagaggtggcatgactagaaaccgtggcgctggaggttttggtggtggtggaggcacccggagaggcacccgcggaggcgcccgtggaagaggcagaggtgccggcaggaattcaaagcagcagctttcggcagaggagctggatgcccagctggacgcctataatgcgagaatggacaccagttaaacagaccagcaaatccgcgtgcggaacaggacccaggcgtctcctcttgctccctggttggggggcggtggctggggctgtgcggccaatgatggatttgtttcttttatgttttaaaataggatttaaaaactcatgtaaaggttttttttttttcttttttttttttttttttttttttttttttttttttttttttttttttttattatttttattttttaaccttaatcagggggacccccaaaaaacaa

SEQ ID NO: 24841 - DNA, 1194 bp, Homo sapiens
gcggccgcggtgggaccgtgcggcctcgggctggggcagctgcagcgccggagggagcgctggcggccccgtttcggccggatcctctcaggccgggaagaggaagggtccggagtagccgtgagggtcaggaaagccctggactgagactcacagatctgctcttgttgcggtttttttttcagccaaaacaacttcccgacaagtggcagcacgatcttttcgacagtggcttcggcggtggtgccggcgtggagacaggtgggaaactgctggtgtccaatctggattttggagtctcagacgccgatattcaggtggtttctagcatccactggaaaccgcttttggtgaactccagttcccgctgtgtgcctgcggccggagtatccccacactctgggttccctctccaactcccagcctgcctgaggtcagggcagtttccatgacagcgcttgacttcagactttgcgcaggcttgagtaggaggagagggaaaggaactctttgctgaatttggaacgctgaagaaggcggctgtgcactatgatcgctctggtcgcagcttaggaacagcagacgtgcactttgagcggaaggcagatgccctgaaggccatgaagcagtacaacggcgtccctctggatggccgccccatgaacattcagcttgtcacgtcacagattgacgcacagcggaggcctgcacagagcgtaaacagaggtggcatgactagaaaccgtggcgctggaggttttggtggtggtggaggcacccggagaggcacccgcggaggcgcccgtggaagaggcagaggtgccggcaggaattcaaagcagcagctttcggcagaggagctggatgcccagctggacgcctataatgcgagaatggacaccagttaaacagaccagcaaatccgcgtgcggaacaggacccaggcgtctcctcttgctccctggttggggggcggtggctggggctgtgcggccaatgatggatttgtttcttttatgttttaaaataggatttaaaaactcatgtaaaggttttttttttttctttttttttttttttaattctgaaacagacctgttttgtaccgagttatttttgggataaattttactggttgctgttgtggagaaggtggcgtttccaccttttccataataaaatagaaatgtgtgt

SEQ ID NO: 24842 - DNA, 1100 bp, Homo sapiens
  misc_feature (4)..(4): n is a, c, g, or t
  misc_feature (10)..(11): n is a, c, g, or t
gggngccggnnccgcgccgggccggctccagggcggccgcggcggtggggcgcaggccgccgcgcgagtgaatcgaggcggcgggcccatccggaaccggccggccatcgcccgcggcgcggccggcggaggcggcaggaaccgaccggcgccctacagcaggccaaaacaacttcccgacaagtggcagcacgatcttttcgacagtggcttcggcggtggtgccggcgtggagacaggtgggaaactgctggtgtccaatctggattttggagtctcagacgccgatattcaggaactctttgctgaatttggaacgctgaagaaggcggctgtgcactatgatcgctctggtcgcagcttaggaacagcagacgtgcactttgagcggaaggcagatgccctgaaggccatgaagcagtacaacggcgtccctctggatgcaagctacatccctcccctccttcagctccttccggaagattcacttctgtgaagccttctcagaaccgccatagtacacctctgagtgcggggctgtagtcgtaaagacaaaggccgccccatgaacattcagcttgtcacgtcacagattgacgcacagcggaggcctgcacagagcgtaaacagaggtggcatgactagaaaccgtggcgctggaggttttggtggtggtggaggcacccggagaggcacccgcggaggcgcccgtggaagaggcagaggtgccggcaggaattcaaagcagcagctttcggcagaggagctggatgcccagctggacgcctataatgcgagaatggacaccagttaaacagaccagcaaatccgcgtgcggaacaggacccaggcgtctcctcttgctccctggttggggggcggtggctggggctgtgcggccaatgatggatttgtttcttttatgttttaaaataggatttaaaaactcatgtaaaggttttttttttttctttttttttttttttaattctgaaacagacctgttttgtaccgagttatttttgggataaattttactggttgctgttgtggagaaggtggcgtttccaccttttccataataaaatagaaatgtgtgt

SEQ ID NO: 24843 - DNA, 500 bp, Homo sapiens
tcataattaagcaattcagcatgagatggatttatagatggactatcttagatttggtgttctctagcaggcagacttagtttcagtctggtggaaacactggatggtttcagcccagtatctgtttgcttttactccctaaacccacaactggactttgaggaggaggtgggaaggatgtcatgggaggtcacttcaggtagagtcagttcctgtgatactgactggcagctcccaggtcatgagcaaatggcaaccttggtagtatgcctccactgctgtccaggccttcagttccacttcttgtcttggaattcatgacacttgaaagagaagaagtcatctcataaagtgctgcatagtatttccagagagctgcatggctgtgaaaacataattggagttctaaaagctggcacagtcttttataacaacaggtaaatgcagtgaccagtttatttgtggcttttggtttcccactgcctgaaagcaaaaaaaaa

SEQ ID NO: 24844 - DNA, 370 bp, Homo sapiens
ggccacagtaggagaattgcttgaggccaggagttcaagaccaccttggccaacgtagtgagaccctatctgtgtaaaaacaataaataggccaggtgcagtggctcacacctgtaatcccagcacttcagaaacagaggtgggcagattgcttgagcccagaagctcaagaccagtctgggcaatatggcaaaaccccaactcgaggaaaaaaaaaaaaaattaactgggcatagggtcacgtgcctgtagtcccagctactggggtgggaggattgcttgaacccgagaggtcaaggctacagtgaggtgtgattgcaccactgcatttcagcctggtggtgacagagcgagaccccgtctcaaaaaa

SEQ ID NO: 24845 - DNA, 773 bp, Homo sapiens
ttttagaagtttcaatagcacaactctagtgaatctttagaactgacacaccagagacactggggaagtgacttttatctttctgaaaacgaggactctcaagtcagttaacagagaatgatttggaaggttatgtatcaaattgtttttcttgtgcaggaatatattgggagtttaattttcattgtaattggtatcatgtttttgttaccctaaaacagggcgagagggtaggaaaataaaattgtagtacggtaactaagcggtaatatttatctagtacttaagcacctagtactgggcgaagcacattaccaacattctattacattttattcttgctattgaggcacagagacattaagtaatttgtcgagggtcatactgttagtggtggagctgggattcagattaaagtctgtctggcccaagagtcagctcttgatcattgttctgttcttcgtttacatttcagaaagatagaaaaatacaggccaggtgaggtggctcacacctgtaatcccagcacttcagaaacagaggtgggcagattgcttgagcccagaagctcaagaccagtctgggcaatatggcaaaaccccaactcgaggaaaaaaaaaaaaaattaactgggcatagggtcacgtgcctgtagtcccagctactggggtgggaggattgcttgaacccgagaggtcaaggctacagtgaggtgtgattgcaccactgcatttcagcctggtggtgacagagcgagaccccgtctcaaaaaa

SEQ ID NO: 24846 - DNA, 773 bp, Homo sapiens
cctagttttagaagtttcaatagccacctagttttagaaccccccaggcagcaatgacactggggaagtgacttttatctttctgaaaacgaggactctcaagtcagttaacagagaatgatttggaaggttatgtatcaaattgtttttcttgtgcaggaatatattgggagtttaattttcattgtaattggtatcatgtttttgttaccctaaaacagggcgagagggtaggaaaataaaattgtagtacggtaactaagcggtaatatttatctagtacttaagcacctagtactgggcgaagcacattaccaacattctattacattttattcttgctattgaggcacagagacattaagtaatttgtcgagggtcatactgttagtggtggagctgggattcagattaaagtctgtctggcccaagagtcagctcttgatcattgttctgttcttcgtttacatttcagaaagatagaaaaatacaggccaggtgaggtggctcacacctgtaatcccagcacttcagaaacagaggtgggcagattgcttgagcccagaagctcaagaccagtctgggcaatatggcaaaaccccaactcgaggaaaaaaaaaaaaaattaactgggcatagggtcacgtgcctgtagtcccagctactggggtgggaggattgcttgaacccgagaggtcaaggctacagtgaggtgtgattgcaccactgcatttcagcctggtggtgacagagcgagaccccgtctcaaaaaa

SEQ ID NO: 24847 - DNA, 547 bp, Homo sapiens
acgatacgatcgagctcggtaccgtacggtaactaagcggtaatatttatctagtacttaagcacctagtactgggcgaagcacattaccaacattctattacattttattcttgctattgaggcacagagacattaagtaatttgtcgagggtcatactgttagtggtggagctgggattcagattaaagtctgtctggcccaagagtcagctcttgatcattgttctgttcttcgtttacatttcagaaagatagaaaaatacaggccaggtgaggtggctcacacctgtaatcccagcacttcagaaacagaggtgggcagattgcttgagcccagaagctcaagaccagtctgggcaatatggcaaaaccccaactcgaggaaaaaaaaaaaaaattaactgggcatagggtcacgtgcctgtagtcccagctactggggtgggaggattgcttgaacccgagaggtcaaggctacagtgaggtgtgattgcaccactgcatttcagcctggtggtgacagagcgagaccccgtctcaaaaaa

SEQ ID NO: 24848 - DNA, 359 bp, Homo sapiens
ggagaagcccgtggactggagctgtgtcagctctgatggaacaaaaacggaggcacagagaggtcaattgattggtctaatgacacagatctagcaagtggtggaaccaggactgaatccaggtgtgtgtccggaattggtgggttcttggtctcactgacttcaagaatgaagccgcggacccttgcggaactgtgaagactagagtgaccttggagatctcatctggaagatggtagaactgctatcagcctggcttcccaaatgacctcctggatcacagctacccatggcctgaaatgttgaccttggagttgttgcataggaaagaaataaacttctttgttctttgaaacaca

SEQ ID NO: 24849 - DNA, 363 bp, Homo sapiens
cctctccctccacacctcccggcaagctgagggagtaggctctggccttggccagcccagaaaggggctcccatagtgcagcggtgggctgaagggctcctcaagtgccgccaaagtgggagcccaggcagaggaggcgcccagagcgagcgacggctgtgaggactgccagcacgctgtcacctctcacagggaactgtgaagactagagtgaccttggagatctcatctggaagatggtagaactgctatcagcctggcttcccaaatgacctcctggatcacagctacccatggcctgaaatgttgaccttggagttgttgcataggaaagaaataaacttctttgttctttgaaacaca

SEQ ID NO: 24850 - DNA, 347 bp, Homo sapiens
ggtggccaagtcagaagagaagcacagaacaaaaacggaggcacagagaggtcaattgattggtctaatgacacagatctagcaagtggtggaaccaggactgaatccaggtgtgtgtccggaattggtgggttcttggtctcactgacttcaagaatgaagccgcggacccttgcggaactgtgaagactagagtgaccttggagatctcatctggaagatggtagaactgctatcagcctggcttcccaaatgacctcctggatcacagctacccatggcctgaaatgttgaccttggagttgttgcataggaaagaaataaacttctttgttctttgaaacaca

SEQ ID NO: 24851 - DNA, 416 bp, Homo sapiens
tcagggtgggaaagagtgactgggaagtgggttgtccctgaaggtgtctgggagtcactatatcccagcagcgttcagagggcaaagaggagttcgctcccattgaagatgaagaaggtaggaaggcaggtgcagagttgtcagacagcctgaggacaccacccactctcagccctctgtggtggctgcatagggtggggagggggacagatgagatcagggtaggccacaaagggcttggtgcttctggggtctctgtttctatgtgtctctgaatccagtagccaaggatcctgaaatccaagattctgagattccttctgatttgtttttctgagtttgacatagatctccaccaagcgccatctggaatccgtttttaaaaaagactcgggattggattttaaagagggcgg

SEQ ID NO: 24852 - DNA, 967 bp, Homo sapiens
gtagagacggggtttcaccatgttagccaggatggtctcaatctcctgaccttgtgatccgcccgcctcggcctcccaaagtgctgggattacaggtgtgagccaccgcgcccagcctattctttacttaaacttgttttcactttgctgtatggactcaattctttcttgcacaagatccaagaatcctctcttggcgtctggatccagaccctttctggtatcagtggtaagctctgtttaagacaactgtcatacccaagagaattcttaaattgtggcagttaaaaatgtatttatcccctcgagggccgggcgcagtcgctcaagcccgtaatcccagcactttgggaggccgaggaggcggatcatgaggtcaggagttcgagaccagcctgaccagcactgtgaaaccctgtctctactaaaaatacaaaaaaaattagccaggcgtggtggtgggcacctgtaatcccagctactcgggaggctgaggcaggagaatcacttgaacccgggaggcagaggttgcagtgagccgagatgacaccactgccctccagcctgggtgacagttgttagactgcgtatcaaaaaaaaaaaaaaaaatttatttactcccttgcttcaaaaaggacataagttggcttgcaaatcacattttgtagaaatgaagtttttaagattagtctcatactcattacataatatttattgactacttacatattgagtgctaaattcagtggaataatatgaacaataaagacccagccttgtttatgctcttcagggagcataaatagagtacagctggcaaaacaaaatgtgcatatcccaaacctgtaaatcatgatctaagacaatatacaaacactcaaatagggaacttaccagctagcagactttgattatgaaccacagaacctagaataaataaatactctcttgaaagaaccatcattgg

SEQ ID NO: 24853 - DNA, 255 bp, Homo sapiens
aataaaatctacgctagcagctttatttagtaagattgatttaaattcaacaccttggcaaagaccatccttaacttaaaaatcaaagacaacaggttaaagtttatcaatgttttatcaaaagaaaagcagcaggctgggcatggtggctcacaccgataatcccagcactttgggaggccaaggcaggagaattgcttgaggccaggagtttaagaccagcttgggcaacatagtgagaccttgtctatacgg

SEQ ID NO: 24854 - DNA, 169 bp, Homo sapiens
ctcgatttactgccagaagtaccaatctcctcatgtaaaagagagtgccttcctttgctccaaaactatcatgagattctttagaagaccctctgttaataatattaatagtatcagctaccacctattgagggccaactttatttctattatctcatttaatcatttc

SEQ ID NO: 24855 - DNA, 345 bp, Homo sapiens
gacaggagtccagaccaaatctgtctgactacacagtacaattcttaaactaaaccatactgtgtttctccttacatgaaaaacagggtgttagaagacattagctgtgatcacatagtaaagaatagatcaagtaccaaattgaactcaaggagaaaatagtgagggcttgtagaattaaaatatatgataataataaagtgatctatgatactattgttatccaagaggagaataaaggtattagttgatattggacttgaattatccagtaataggaaaagaaactataacatccaaactaaagagtatgggctaataaaaaataatggacccaaagtaggc

SEQ ID NO: 24856 - DNA, 476 bp, Homo sapiens
taagttgagggaacagcatgagcaaaggatcattactcagggagcaatgacacatttctgctccgtgggcagagggttcactgatggcaacagagagggctgaggttacgtaggaccagaccacaaaaggacttccatgtcacgtagtagctttgccttgtgggcagcagggaggtccactggtggttctcgagtgacagaggagcattatagaatttaaaatttgtattgtaagcagatccttctggctgcagcatggagctgtattagagggggacagaaatggagggagggagatattcacagttataaacacccactatgtgccaggcatgtttctagagactagaaatagagcaaaagagggccaggcacagtggcttatgtttgtaatcccagcactttgggaggccaaggcaggtggatcacgaggtcaggagattaagacaatcctggctaacacagtgaaatgccat

SEQ ID NO: 24857 - DNA, 418 bp, Homo sapiens
tgtatatacctgtatctacttctaattctctgtcctatccatcattctatagcaaagctattctgttttattctactagcttgtataagtccattctcctataaagaaatagttaagactgggtaatttataaagaaaagaggtttaacaggaagtatagtggcttctccttctggggaggcctcagaaaacttacagtcctggggaagcaggcacgtcttacacggccagaacaggagtgggaagggagttgttacacacttttcaacaacctggtctcatgataactcactagcttgagaacagaacctaggggatggagctaacccattcatgagaactctgtcccatggtctatccacctcccaccagggcccacctccaacactggggattacatttcaacatgagattcggt

SEQ ID NO: 24858 - DNA, 192 bp, Homo sapiens
taaataaaagaaaatacaactttaaagtgtcagttggctaatttgggaagaggtgtgggtgtcagtgtatggggggagggggacctgcctttaggtgtcattaccaaaggctatgatgatgtcatacagcccatttcaaatgtacaaggagaattactggggagaagaaagagaagggaagtggggaaggta

SEQ ID NO: 24859 - DNA, 856 bp, Homo sapiens
ctttgtctgcaccacacctccccaacagaggaaagaaaatgccacttggctgacaaagccatttttacactgacagtttaaatatacctccagctgccctcaacttcccagacagctcaattggcataaacctggctcttggttccccgcaccatgaatacatttgtaaaatcagccaatgactttatggggctggccagaaagcagccttttctttaaaatatctgctagtgttgctgttcatcaaacagtgtttgatgaacaagtgttttatgagtcttcctcccttgtttctattacatctttgaaaagctggtcattagcagcttctttgactttacaaataaactacattaaagaagaagaaaacaaaacaaaatacattatgctccaaatctccacagatcatccatgatcattcaagaaacttaatccagatattctgaagaacaaataggaattcattggtctattttaagttatggtccaaagtagaaaggaagctgaccaacttaccatgttatctttgaatggacctcccactctaaaatcaatcaaggaaaaagtaaagaccagtgtctggtattgcatttctcccaagaaagcagaatttcatcctgagataaacaaaaaaaggatcttccctttgacattggtcacgatacagataaaatcctaaataaacacttgcctgtgagttactgaagctcccttaagttttactgtcctgatggctacatgtatgtgatgacccatatccctcacagacataataatcatatgggggaaaaaaatgatgtttacctctgtaaataaacaggttgtagtcttaataaacttggagcattttctttta

SEQ ID NO: 24860 - DNA, 485 bp, Homo sapiens
  misc_feature (7)..(7): n is a, c, g, or t
  misc_feature (25)..(25): n is a, c, g, or t
ggcaganacggtagtgatacccagngaaggctgcacaggcgagctcggggctgtcacactgctgtgtgcttggtcggtactaaatcccgtgatactcgtaagcatgatcaaaagcaaagctctgaagtcaggctgcctgggttggacgttagctcgaccacttgctagcatacaacttaggcaagtgacttgttctctgaatgcccgtgtctctctgtatgtaattccttcagtggcaaaatagggtaaccacagtttcctacatatagggttactaggctcaagtgagatgttccacgtaaaggatgtagaacagttaccttggcagaccatgctcaatactgtttgattataactataactaagctgggcgcggtggctcatgcctgtaatcctggcactttgggaggctgaggcgggtggatcatctgaggtcaggagttcgagaccagcctggccaacatggtgaaaactccgtctctact

SEQ ID NO: 24861 - DNA, 472 bp, Homo sapiens
aggaatgcatatggtatgcgcagcgttcagtaaagagaacctggttgaagtacagaatttgtggggaggaatagtgccagataagttaggtagaccaaagaagacaggcttggaatgctaggcacggagtgtctgttggcacctgaagggaattggggcgaggtaataaggtagcacgtcagccagagactggagagtacatctctgtctgagtaattttggccccaaatttgtaatgtggggatgggaagtgtattggtcagtcctgataaagagttatgtgtgcatctgtgtgacgtgttaaaattgcttcctgccactgctcgtgtttggtcagatagtaggttaggctgaaggaaagagaggtagtagccacaggacagataagctttgagaagccagagtggttggtaaagtatttggctttcatttagtatctctcatatatatatatatatatatatattttttt

SEQ ID NO: 24862 - DNA, 178 bp, Homo sapiens
aggaatgcatatggtatgcgcagcgttcagtaaagagaacctggttgaagtacagaatttgtggggaggaatagtgccagataagttaggtagaccaaagaagacaggcttggaatgctaggcacggagtgtctgtcgggctagtcgggggggtaccgagcgcggaatcgtaactcag

SEQ ID NO: 24863 - DNA, 329 bp, Homo sapiens
cctctagcccagccgtgagctttacagatggggaaaccaagggcccacaggcacggggacttacccagagccctggcctggccaccaggacctggcatctcacactttggcggtcccctgactctagacaccatgagtacctccgtctcctgcccggtcctgttgtctactgacagcagcgctggctgaggaagggaggaggtgccacgtggtacaaccccttctccacccctgggaacagcaccaagcccagtgcccgcacacttagctcccctgagcaggagcagagggcactggagcttcaagggcagagcgggacacaccgccac

SEQ ID NO: 24864 - DNA, 413 bp, Homo sapiens
ccagcaattgtgcttccacctcagaggcctggacagttactacaaacaaacaaacaaacaaacaaacaaataaatcaacctctcctggtaattctaatgtgcagcagtagctgtgagtctctgccctattccacattgccttaccaggagctgcgttatctggtgtgttgttaccctgtaatcccagcagtttggaaggcggaggtgggaggattgcttgagcccaggagtttaagaacagcctgggcaacatagcaagaccccatctctacaaaaaatacacagaaaaattagccaggcatggtggcgcatgcctgcagtcccagctactcaaaagtctgaggtgggagactcaactgagcccagaaggtcgagattgtagtgagccgagattataatactgcacttcagcc

SEQ ID NO: 24865 - DNA, 479 bp, Homo sapiens
ccttatacaaactgccatgaaattcttcagtgacattaattttaagtgtgtgtgtgtgtgtgtgcacatctcaagggtagagaatatgtattataaatcaaacttaagtgtcacaactgcaaaacagctggaaataattgatttacatcagtatggcttagctgctgctgacccaaaaattcctttgattgtctttaaggatctgtgtgagttttaacccttttaaccagaatcagatcaagtatcaatggatatagtgcaatttagtattacaagacaccaacaacatgctcagtttataaattgagtatatttgtcaatttaattaaaacattatttcacattttccttaggtggaaaagaaactggatgatcattttatgtgttttatttattaagaacatcaagtaaatgtattgagatatctaattatatgatttatcttttccacatgcctttattattgttagtctccttgt

SEQ ID NO: 24866 - DNA, 1175 bp, Homo sapiens
taattttgcaccttgattttctgacatagtattatattcagagatattaatactcagattaacataaacattctccttgattcgttgtactggttgcaaagtgttccattgtgcatggataatttttgtaaccttttccctactgctgaatatttaagttgtttccaaatttttactaattataaaaaactgtacagttcgtttatgtgtaatttgttttacttctgcaagtatatcaataggggaaacttcttgcagtaaaattgctgccccaaggttatatgtattttaagtgctgataaatattcctagattgcctccccaccgggtttcatcagaccttactgattgtcagtatgatctgtgaaacaaatctctcagttttgatttgcattttttaaattatgagagcttgaacaccattttacatgtttattggctgttgttatttcctttttgagatctgttcgttatatgctttgcccgtttttctgttgggtggttattatttttcttattgaatggtataagctctttgtaagttaaggacattagcccttagtcagatattttgacttaggttttaatttttttccacacagaagttttaagctctgtggcaaatttatcagtcttatatcactacagggttataaatattagttatcacttcgggtttgtgtcttgcttagaaagcctcatttgaagattgtaaatgttagtaagtttccccatattttcctctaggacttccatggtttaatttgttttgtttaaactaggaattggcattcacatcctcttttgtcccaggtctcagaggtcccttgtatcttatagagcagtattgttttatgttattttcccatgtataatttaaaaacaaaatacgttgttcaaaacaaaatacagtggcagcagataatggcagtatctctgtaactgctggtaaactgtatttcatagtgaagtgttcataaactaaagagtcattgatttggtttcctggctaattaaaatctgaattccatttgaagttccattgaaatcatggttttactctatagcagtggatgttttttcccaacctttctgatatttttttccttcctgagacagggtcttgctctgtcacctgggatggagtgtagttgcaccatcaaggcttactgcag

SEQ ID NO: 24867 - DNA, 536 bp, Homo sapiens
taatcccttgtcagatgggtagtttgcaaatattttctcccattctgtgggttgcctcctcatttgaagattgtaaatgttagtaagtttccccatattttcctctaggacttccatggtttaatttgttttgtttaaactaggaattggcattcacatcctcttttgtcccaggtctcagaggtcccttgtatcttatagagcagtattgttttatgttattttcccatgtataatttaaaaacaaaatacgttgttcaaaacaaaatacagtggcagcagataatggcagtatctctgtaactgctggtaaactgtatttcatagtgaagtgttcataaactaaagagtcattgatttggtttcctggctaattaaaatctgaattccatttgaagttccattgaaatcatggttttactctatagcagtggatgttttttcccaacctttctgatatttttttccttcctgagacagggtcttgctctgtcacctgggatggagtgtagttgcaccatcaaggcttactgcag

SEQ ID NO: 24868 - DNA, 335 bp, Homo sapiens
aacaaagttataataaatatgatcaggcatgactcaatgaagagtatctaaattataatcacataattttatctttcattttaacaataccttgtaatttatgtagtgatctgaagaagctatgggctctcactatgtaatgttagcaaaataattacaaacgatccctatgcagaccatgtgaacgagccagaagtggaagcatatagcaaaactatgtaaaaagtagcaaaaaacctctaaggatgtccatttgactgatgtgaatgatgaatggaagcttctaaaaatactagtaacaataaacactgttgatttggctataatccaagcca

SEQ ID NO: 24869 - DNA, 327 bp, Homo sapiens
gagaagtgataaacgtccatgaaatattcacaatttatgttcagagattgcagtaaaggcaggtgtaagaaattataaaagtattaattttgggaactgataaatgtccatgaaatcttcacaatttatgttcttcgccttggctccagccggtccctccattcagggtccctgacttcccgtaacacactttctaattgatttgcatctaatacagatgtacatacacaatcttactgtactctctggagatcaggaaatatgatgaaagagtgttaaagacttacatttcaaaagactaggcagtcaaaaggatatttttatttt

SEQ ID NO: 24870 - DNA, 1222 bp, Homo sapiens
tcatccaacaaaaaacaaggccaagcgcgcctttggcgcttaaccctcggcggcttcccgtggaattccgggatgagaaaaccagatggacctgttagtactacatttttaaggcattttatatttgatggtgccgtacttttaataataataaaactgaagttttttagtggcaatactgatttattttttaaaccagaaagataatccatattgattacttactacaaaaaagggaaaatatgccaaaaaataaaaaaccttaaaattcatatgaagcaacgtaacagataactgagcacttggctcaagtggtcagacttttcataatgttactgtgtaagtttggaattacctaataaccccaggctcaggattaacagaaggttctgggtgagttttaaaacatttaatatacctatgatttgttttacaacttgaagaaaaggcaggcagtcttgtgtctaatgagcttaatgcaaattctaattatactgcaaataatttaaagttttgattgcattctacaattgtctgtttggaaaattacatattatgaagtcattatatattttatcaaatcagaaaaagtcagctcaggaactgtagcagcagggagttctaaagatgacatgaactatactataggggtgccctactctatatggcctagggctttggtttgggtcagtcttgttctttcagatacataacaccagcagtactttcgggctcacttcaagaaccagataactctcccaaaccatgatacatgaagtgtataatcaagatttttaattaagctttagaattctttatttgtgtagagtgatggaaatgaccaagaagtaataatataaagcaaaagaattgggagagatcaggttttaagtatataaatattttttttttctcatggcatattctcaaaggtgttttgttacaaaccagattttcattttttaaaaaatgagacttggtggtatttaaaacctacacctaccatgttgctatttcactttcattgctttagttgcttaatatttaagctttgcttcatgctaccttttgtctgtatttcaatcttcataagcctattttgttttgtagacttgaatgataaaaattgtttctcatcttaagtatgctcagagttttaaatgttaaagaatgttgtgtaacctttatccaataaagtctttgattttttaaaaaaaaaata

SEQ ID NO: 24871 - DNA, 888 bp, Homo sapiens
cagcctgggtgacagagtgagactctatctgaagacaaaaaatagaaacttgtgtggctggcggatggtgtctcttgcctgtaatcccagcactttgggagactgaggcaggaagatcacatgaaccctgaggtttgaaccagccttggcaacatactgagaccccatctcttaaaaaaatgcttgggcattttaattttgtggtatgtgcatattaaagggggtagctagctgtatttcagaattgatgtttttacaaatactgtgtgtgtgtacatgggggtactgttggattaaaaataattgatgatttccttaggaaacttcagttttcactaagttcttgaaagcaatttgtagaaaatttacgtgttttttgaggaaatataaaccaagacaatgatttcttttctttacagagaccatgaaacgtatggtgcaatagccctacttttggtgggaaaaatatacagccattctggtgaagcagtgagtagtggtatcagtagcttatactacagtgtccaggttgagaacttaggccctcaagtagtatgcttgaatgattgtgttgtggtacattataagtaatatttttttggtgattattctgcttatatgccaagatgtcaataaaggctttacacagtgaaacagagaagaggcaagtgccagtcactccctgacccacacagctttaggacgcccactactgtgcagtatgtgttgagagtgagctcttccattgcatgttgcattaatatgatctttttcagaagtgattattagttgggcattaaacctggtttcattctgagtctaaagaatcctccgggccactctgcctatggggtagccctgctctgtctatggagaagctactctaga

SEQ ID NO: 24872 - DNA, 4110 bp, Homo sapiens
cgctgcagccggagttggaggagggagaagctaggaagaaaatggcggccgtggctgcagaggcggcagcgactgcagcgtcccccggggaggggggcgccggcgaggccgagccggagatggagcccatccccggcagtgaggccggcactgaccccctcccggtcacggccactgaagcgtctgtgccggatggcgagactgacgggcagcaatccgctcctcaggccgacgagccgccgctcccgccgccaccgccgccgccgggggagctcgcccgcagcccagaggcggtggggccggagctggaggctgaggagaaactgtccgttcgggtggcggagtcggcggcagccgcgcctcagggagggccggaacttccaccttctcctgcatcgccgccggagcagcccccggctcccgaggagcgcgaggagccgccgctgcctcagcccgtagccccggcgctcgtgccgccggcgggcggggactccacggtgtcgcaactgatcccgggctcggaggtgcgggtcacgctggaccacatcattgaggacgcgcttgtcgtgtcgttccgcttcggggagaagctcttctccggggtcctcatggatctgtccaaaaggtttgggccccatggtatccctgtgacagtatttcccaaaagggaatataaggataaaccagaagccatgccgctccaaagtaatacattccaagaagggacagaagtcaagtgtgaagcaaatggtgctgttcccgatgacccttctcctgtcccgcatcccgagctgagcttggctgaaagcctgtggacttccaaaccaccacctctcttccatgaaggagcaccttatcctccccctttgtttatcagggacacatataaccaatcaatacctcagccacctcctcggaaaattaagcgacccaaacgaaaaatgtacagggaagaacccacttcaataatgaatgctattaaactacgacccaggcaagttctgtgtgataaatgtaaaaacagtgttgttgctgaaaaaaaggaaattagaaaaggtagtagtgcaactgactcttctaaatatgaagataaaaaacggagaaatgaaagtgtaactactgtgaacaaaaaactgaaaactgaccataaagtggatgggaaaaaccaaaatgaaagccagaaaagaaatgctgtggttaaggtttcaaatattgctcacagcagaggcagagtagtaaaagtttctgctcaggcaaatacatcaaaagctcagttaagtactaaaaaagttctccagagtaagaacatggatcatgcgaaagctcgggaagtgttaaaaattgccaaagaaaaggcacaaaagaagcaaaatgaaacctctacttccaaaaatgcacattcaaaagtccatttcacacgtcgatatcagaatcctagctcaggttcccttccaccccgggttcgtttaaaaccacagaggtacaggaatgaagaaaatgactcttctctgaagacaggacttgagaaaatgcggagtggcaagatggcacccaagccccagtctcgctgcacctctacccgctcagcagaatttatagaccaggaagctgactaatcattgggaaggaacatccattcaactctcatttacagatgtggaaccaaagaccaaacaattatctgtgagaggccaggtctcaacaaatggcagctattacatcagacagtgacgagtcctgctgctcccttacagtgtctgacagaccactgtggattcagactgggagcattgaagttaacagtgaaacgggcagcacaaagacattagcaggctgctggtttcatggacctgtaccacaatgacacagagaacaccagagcatcaggactgaatgaaattggagtttttaaagctgcactaagaagtaaatgttaaggcagtggttaaaaacaacagtctataaaggggcacttgcaaattgtgctgtcttaaaccgaagaaaaggtattagggaatattttataaaaaataaacttgcaataaattatgcatgagatgaggagaaaaatgatgtgaattacacacgtaagaactcacttgaattttatatatgaagaaacactgacagtaacttctttggaatgtgaagttcttatcagtacagtttggacaggcctaaaaggcatgggatgatgcagaaatgctgaattatttttcatacttaaactttgtgctttctccaaggtttaggttaatcagttcagatatgagcaaaggtatttctaaaatggctcttctatgaaaagcaatagtcacatatgccaaggccaatgtttccttcaaggtgccagtagaaacaacagaaaataacatcctgctgaaaggatggcaaagtgccccgccccaccccacaaacacaatttggatcttttccttctttaataaagcagggctgtattatcttgaatatatgtttgcttgttagaacatattaagatatatttatttgccactagtatttaacattttgtgcacattttcataattacattcttacctttcaaattttgactcaaagtggataggctagtgttgatattggagtgcaaatgtatatactccaagagctagttcttaattctgctgagttggaaagccttttattattgtctgtatccttactggttttatctagttcaaaaaaggtgacaacgtctaaattttgatgtggacctctctccatagagagccgctcctaagtgcaagaaattccaacaggtgtcagtaggacttggccctgggggacaacaagtggcaggaacaggatcctttaaaacagtgtcaaacttctcatgcatggagcatgaattcttactaatagagactgtagttttttttcttgtctttggtaaatatataaaagaccttaatttttcttttttaatgaatggagaaaacatgagaaaaccagatggacctgttagtactacatttttaaggcattttatatttgatggtgccgtacttttaataataataaaactgaagttttttagtggcaatactgatttattttttaaaccagaaagataatccatattgattacttactacaaaaaagggaaaatatgccaaaaaataaaaaaccttaaaattcatatgaagcaacgtaacagataactgagcacttggctcaagtggtcagacttttcataatgttactgtgtaagtttggaattacctaataaccccaggctcaggattaacagaaggttctgggtgagttttaaaacatttaatatacctatgatttgttttacaacttgaagaaaaggcaggcagtcttgtgtctaatgagcttaatgcaaattctaattatactgcaaataatttaaagttttgattgcattctacaattgtctgtttggaaaattacatattatgaagtcattatatattttatcaaatcagaaaaagtcagctcaggaactgtagcagcagggagttctaaagatgacatgaactatactataggggtgccctactctatatggcctagggctttggtttgggtcagtcttgttctttcagatacataacaccagcagtactttcgggctcacttcaagaaccagataactctcccaaaccatgatacatgaagtgtataatcaagatttttaattaagctttagaattctttatttgtgtagagtgatggaaatgaccaagaagtaataatataaagcaaaagaattgggagagatcaggttttaagtatataaatattttttttttctcatggcatattctcaaaggtgttttgttacaaaccagattttcattttttaaaaaatgagacttggtggtatttaaaacctacacctaccatgttgctatttcactttcattgctttagttgcttaatatttaagctttgcttcatgctaccttttgtctgtatttcaatcttcataagcctattttgttttgtagacttgaatgataaaaattgtttctcatcttaagtatgctcagagttttaaatgttaaagaatgttgtgtaacctttatccaataaagtctttgattttttaaaaaaaaaata

SEQ ID NO: 24873 - DNA, 3675 bp, Homo sapiens
ttgaaagctgttataaccagaggaagaaatatatgtgtgtttcacaaagttgtagctgcatttactgaaaatgttgtatatggttcagtgaatgtaatgtatgtgatgcttaacataaagctatctgagaaaacattctgattcaagactggaaatatctactttaagtatagtcaactattctgtcattgcttagggcagctgtttgtttttaccaaaaatgtagaacctaaagaaatgaaggtctttggacttttgggggaagagatagtagatttttgtagtcttgttttttaatatgaaatagttttcgggaaaggttatataaataagcatcagatgttgtttacgtttaagaaattgaattatagatgttaacttaatgtcttctttttttcttccatttctttcaaaggtttgggccccatggtatccctgtgacagtatttcccaaaagggaatataaggataaaccagaagccatgccgctccaaagtaatacattccaagaagggacagaagtcaagtgtgaagcaaatggtgctgttcccgatgacccttctcctgtcccgcatcccgagctgagcttggctgaaagcctgtggacttccaaaccaccacctctcttccatgaaggagcaccttatcctccccctttgtttatcagggacacatataaccaatcaatacctcagccacctcctcggaaaattaagcgacccaaacgaaaaatgtacagggaagaacccacttcaataatgaatgctattaaactacgacccaggcaagttctgtgtgataaatgtaaaaacagtgttgttgctgaaaaaaaggaaattagaaaaggtagtagtgcaactgactcttctaaatatgaagataaaaaacggagaaatgaaagtgtaactactgtgaacaaaaaactgaaaactgaccataaagtggatgggaaaaaccaaaatgaaagccagaaaagaaatgctgtggttaaggtttcaaatattgctcacagcagaggcagagtagtaaaagtttctgctcaggcaaatacatcaaaagctcagttaagtactaaaaaagttctccagagtaagaacatggatcatgcgaaagctcgggaagtgttaaaaattgccaaagaaaaggcacaaaagaagcaaaatgaaacctctacttccaaaaatgcacattcaaaagtccatttcacacgtcgatatcagaatcctagctcaggttcccttccaccccgggttcgtttaaaaccacagaggtacaggaatgaagaaaatgactcttctctgaagacaggacttgagaaaatgcggagtggcaagatggcacccaagccccagtctcgctgcacctctacccgctcagcagcacaaagacattagcaggctgctggtttcatggacctgtaccacaatgacacagagaacaccagagcatcaggactgaatgaaattggagtttttaaagctgcactaagaagtaaatgttaaggcagtggttaaaaacaacagtctataaaggggcacttgcaaattgtgctgtcttaaaccgaagaaaaggtattagggaatattttataaaaaataaacttgcaataaattatgcatgagatgaggagaaaaatgatgtgaattacacacgtaagaactcacttgaattttatatatgaagaaacactgacagtaacttctttggaatgtgaagttcttatcagtacagtttggacaggcctaaaaggcatgggatgatgcagaaatgctgaattatttttcatacttaaactttgtgctttctccaaggtttaggttaatcagttcagatatgagcaaaggtatttctaaaatggctcttctatgaaaagcaatagtcacatatgccaaggccaatgtttccttcaaggtgccagtagaaacaacagaaaataacatcctgctgaaaggatggcaaagtgccccgccccaccccacaaacacaatttggatcttttccttctttaataaagcagggctgtattatcttgaatatatgtttgcttgttagaacatattaagatatatttatttgccactagtatttaacattttgtgcacattttcataattacattcttacctttcaaattttgactcaaagtggataggctagtgttgatattggagtgcaaatgtatatactccaagagctagttcttaattctgctgagttggaaagccttttattattgtctgtatccttactggttttatctagttcaaaaaaggtgacaacgtctaaattttgatgtggacctctctccatagagagccgctcctaagtgcaagaaattccaacaggtgtcagtaggacttggccctgggggacaacaagtggcaggaacaggatcctttaaaacagtgtcaaacttctcatgcatggagcatgaattcttactaatagagactgtagttttttttcttgtctttggtaaatatataaaagaccttaatttttcttttttaatgaatggagaaaacatgagaaaaccagatggacctgttagtactacatttttaaggcattttatatttgatggtgccgtacttttaataataataaaactgaagttttttagtggcaatactgatttattttttaaaccagaaagataatccatattgattacttactacaaaaaagggaaaatatgccaaaaaataaaaaaccttaaaattcatatgaagcaacgtaacagataactgagcacttggctcaagtggtcagacttttcataatgttactgtgtaagtttggaattacctaataaccccaggctcaggattaacagaaggttctgggtgagttttaaaacatttaatatacctatgatttgttttacaacttgaagaaaaggcaggcagtcttgtgtctaatgagcttaatgcaaattctaattatactgcaaataatttaaagttttgattgcattctacaattgtctgtttggaaaattacatattatgaagtcattatatattttatcaaatcagaaaaagtcagctcaggaactgtagcagcagggagttctaaagatgacatgaactatactataggggtgccctactctatatggcctagggctttggtttgggtcagtcttgttctttcagatacataacaccagcagtactttcgggctcacttcaagaaccagataactctcccaaaccatgatacatgaagtgtataatcaagatttttaattaagctttagaattctttatttgtgtagagtgatggaaatgaccaagaagtaataatataaagcaaaagaattgggagagatcaggttttaagtatataaatattttttttttctcatggcatattctcaaaggtgttttgttacaaaccagattttcattttttaaaaaatgagacttggtggtatttaaaacctacacctaccatgttgctatttcactttcattgctttagttgcttaatatttaagctttgcttcatgctaccttttgtctgtatttcaatcttcataagcctattttgttttgtagacttgaatgataaaaattgtttctcatcttaagtatgctcagagttttaaatgttaaagaatgttgtgtaacctttatccaataaagtctttgattttttaaaaaaaaaata

SEQ ID NO: 24874 - DNA, 3955 bp, Homo sapiens
cgctgcagccggagttggaggagggagaagctaggaagaaaatggcggccgtggctgcagaggcggcagcgactgcagcgtcccccggggaggggggcgccggcgaggccgagccggagatggagcccatccccggcagtgaggccggcactgaccccctcccggtcacggccactgaagcgtctgtgccggatggcgagactgacgggcagcaatccgctcctcaggccgacgagccgccgctcccgccgccaccgccgccgccgggggagctcgcccgcagcccagaggcggtggggccggagctggaggctgaggagaaactgtccgttcgggtggcggagtcggcggcagccgcgcctcagggagggccggaacttccaccttctcctgcatcgccgccggagcagcccccggctcccgaggagcgcgaggagccgccgctgcctcagcccgtagccccggcgctcgtgccgccggcgggcggggactccacggtgtcgcaactgatcccgggctcggaggtgcgggtcacgctggaccacatcattgaggacgcgcttgtcgtgtcgttccgcttcggggagaagctcttctccggggtcctcatggatctgtccaaaagagaccatgaaacgtatggtgcaatagccctacttttggtgggaaaaatatacagccattctggtgaagcagtttgggccccatggtatccctgtgacagtatttcccaaaagggaatataaggataaaccagaagccatgccgctccaaagtaatacattccaagaagggacagaagtcaagtgtgaagcaaatggtgctgttcccgatgacccttctcctgtcccgcatcccgagctgagcttggctgaaagcctgtggacttccaaaccaccacctctcttccatgaaggagcaccttatcctccccctttgtttatcagggacacatataaccaatcaatacctcagccacctcctcggaaaattaagcgacccaaacgaaaaatgtacagggaagaacccacttcaataatgaatgctattaaactacgacccaggcaagttctgtgtgataaatgtaaaaacagtgttgttgctgaaaaaaaggaaattagaaaaggtagtagtgcaactgactcttctaaatatgaagataaaaaacggagaaatgaaagtgtaactactgtgaacaaaaaactgaaaactgaccataaagtggatgggaaaaaccaaaatgaaagccagaaaagaaatgctgtggttaaggtttcaaatattgctcacagcagaggcagagtagtaaaagtttctgctcaggcaaatacatcaaaagctcagttaagtactaaaaaagttctccagagtaagaacatggatcatgcgaaagctcgggaagtgttaaaaattgccaaagaaaaggcacaaaagaagcaaaatgaaacctctacttccaaaaatgcacattcaaaagtccatttcacacgtcgatatcagaatcctagctcaggttcccttccaccccgggttcgtttaaaaccacagaggtacaggaatgaagaaaatgactcttctctgaagacaggacttgagaaaatgcggagtggcaagatggcacccaagccccagtctcgctgcacctctacccgctcagcagcacaaagacattagcaggctgctggtttcatggacctgtaccacaatgacacagagaacaccagagcatcaggactgaatgaaattggagtttttaaagctgcactaagaagtaaatgttaaggcagtggttaaaaacaacagtctataaaggggcacttgcaaattgtgctgtcttaaaccgaagaaaaggtattagggaatattttataaaaaataaacttgcaataaattatgcatgagatgaggagaaaaatgatgtgaattacacacgtaagaactcacttgaattttatatatgaagaaacactgacagtaacttctttggaatgtgaagttcttatcagtacagtttggacaggcctaaaaggcatgggatgatgcagaaatgctgaattatttttcatacttaaactttgtgctttctccaaggtttaggttaatcagttcagatatgagcaaaggtatttctaaaatggctcttctatgaaaagcaatagtcacatatgccaaggccaatgtttccttcaaggtgccagtagaaacaacagaaaataacatcctgctgaaaggatggcaaagtgccccgccccaccccacaaacacaatttggatcttttccttctttaataaagcagggctgtattatcttgaatatatgtttgcttgttagaacatattaagatatatttatttgccactagtatttaacattttgtgcacattttcataattacattcttacctttcaaattttgactcaaagtggataggctagtgttgatattggagtgcaaatgtatatactccaagagctagttcttaattctgctgagttggaaagccttttattattgtctgtatccttactggttttatctagttcaaaaaaggtgacaacgtctaaattttgatgtggacctctctccatagagagccgctcctaagtgcaagaaattccaacaggtgtcagtaggacttggccctgggggacaacaagtggcaggaacaggatcctttaaaacagtgtcaaacttctcatgcatggagcatgaattcttactaatagagactgtagttttttttcttgtctttggtaaatatataaaagaccttaatttttcttttttaatgaatggagaaaacatgagaaaaccagatggacctgttagtactacatttttaaggcattttatatttgatggtgccgtacttttaataataataaaactgaagttttttagtggcaatactgatttattttttaaaccagaaagataatccatattgattacttactacaaaaaagggaaaatatgccaaaaaataaaaaaccttaaaattcatatgaagcaacgtaacagataactgagcacttggctcaagtggtcagacttttcataatgttactgtgtaagtttggaattacctaataaccccaggctcaggattaacagaaggttctgggtgagttttaaaacatttaatatacctatgatttgttttacaacttgaagaaaaggcaggcagtcttgtgtctaatgagcttaatgcaaattctaattatactgcaaataatttaaagttttgattgcattctacaattgtctgtttggaaaattacatattatgaagtcattatatattttatcaaatcagaaaaagtcagctcaggaactgtagcagcagggagttctaaagatgacatgaactatactataggggtgccctactctatatggcctagggctttggtttgggtcagtcttgttctttcagatacataacaccagcagtactttcgggctcacttcaagaaccagataactctcccaaaccatgatacatgaagtgtataatcaagatttttaattaagctttagaattctttatttgtgtagagtgatggaaatgaccaagaagtaataatataaagcaaaagaattgggagagatcaggttttaagtatataaatattttttttttctcatggcatattctcaaaggtgttttgttacaaaccagattttcattttttaaaaaatgagacttggtggtatttaaaacctacacctaccatgttgctatttcactttcattgctttagttgcttaatatttaagctttgcttcatgctaccttttgtctgtatttcaatcttcataagcctattttgttttgtagacttgaatgataaaaattgtttctcatcttaagtatgctcagagttttaaatgttaaagaatgttgtgtaacctttatccaataaagtctttgattttttaaaaaaaaaata

SEQ ID NO: 24875 - DNA, 3885 bp, Homo sapiens
cgctgcagccggagttggaggagggagaagctaggaagaaaatggcggccgtggctgcagaggcggcagcgactgcagcgtcccccggggaggggggcgccggcgaggccgagccggagatggagcccatccccggcagtgaggccggcactgaccccctcccggtcacggccactgaagcgtctgtgccggatggcgagactgacgggcagcaatccgctcctcaggccgacgagccgccgctcccgccgccaccgccgccgccgggggagctcgcccgcagcccagaggcggtggggccggagctggaggctgaggagaaactgtccgttcgggtggcggagtcggcggcagccgcgcctcagggagggccggaacttccaccttctcctgcatcgccgccggagcagcccccggctcccgaggagcgcgaggagccgccgctgcctcagcccgtagccccggcgctcgtgccgccggcgggcggggactccacggtgtcgcaactgatcccgggctcggaggtgcgggtcacgctggaccacatcattgaggacgcgcttgtcgtgtcgttccgcttcggggagaagctcttctccggggtcctcatggatctgtccaaaaggtttgggccccatggtatccctgtgacagtatttcccaaaagggaatataaggataaaccagaagccatgccgctccaaagtaatacattccaagaagggacagaagtcaagtgtgaagcaaatggtgctgttcccgatgacccttctcctgtcccgcatcccgagctgagcttggctgaaagcctgtggacttccaaaccaccacctctcttccatgaaggagcaccttatcctccccctttgtttatcagggacacatataaccaatcaatacctcagccacctcctcggaaaattaagcgacccaaacgaaaaatgtacagggaagaacccacttcaataatgaatgctattaaactacgacccaggcaagttctgtgtgataaatgtaaaaacagtgttgttgctgaaaaaaaggaaattagaaaaggtagtagtgcaactgactcttctaaatatgaagataaaaaacggagaaatgaaagtgtaactactgtgaacaaaaaactgaaaactgaccataaagtggatgggaaaaaccaaaatgaaagccagaaaagaaatgctgtggttaaggtttcaaatattgctcacagcagaggcagagtagtaaaagtttctgctcaggcaaatacatcaaaagctcagttaagtactaaaaaagttctccagagtaagaacatggatcatgcgaaagctcgggaagtgttaaaaattgccaaagaaaaggcacaaaagaagcaaaatgaaacctctacttccaaaaatgcacattcaaaagtccatttcacacgtcgatatcagaatcctagctcaggttcccttccaccccgggttcgtttaaaaccacagaggtacaggaatgaagaaaatgactcttctctgaagacaggacttgagaaaatgcggagtggcaagatggcacccaagccccagtctcgctgcacctctacccgctcagcagcacaaagacattagcaggctgctggtttcatggacctgtaccacaatgacacagagaacaccagagcatcaggactgaatgaaattggagtttttaaagctgcactaagaagtaaatgttaaggcagtggttaaaaacaacagtctataaaggggcacttgcaaattgtgctgtcttaaaccgaagaaaaggtattagggaatattttataaaaaataaacttgcaataaattatgcatgagatgaggagaaaaatgatgtgaattacacacgtaagaactcacttgaattttatatatgaagaaacactgacagtaacttctttggaatgtgaagttcttatcagtacagtttggacaggcctaaaaggcatgggatgatgcagaaatgctgaattatttttcatacttaaactttgtgctttctccaaggtttaggttaatcagttcagatatgagcaaaggtatttctaaaatggctcttctatgaaaagcaatagtcacatatgccaaggccaatgtttccttcaaggtgccagtagaaacaacagaaaataacatcctgctgaaaggatggcaaagtgccccgccccaccccacaaacacaatttggatcttttccttctttaataaagcagggctgtattatcttgaatatatgtttgcttgttagaacatattaagatatatttatttgccactagtatttaacattttgtgcacattttcataattacattcttacctttcaaattttgactcaaagtggataggctagtgttgatattggagtgcaaatgtatatactccaagagctagttcttaattctgctgagttggaaagccttttattattgtctgtatccttactggttttatctagttcaaaaaaggtgacaacgtctaaattttgatgtggacctctctccatagagagccgctcctaagtgcaagaaattccaacaggtgtcagtaggacttggccctgggggacaacaagtggcaggaacaggatcctttaaaacagtgtcaaacttctcatgcatggagcatgaattcttactaatagagactgtagttttttttcttgtctttggtaaatatataaaagaccttaatttttcttttttaatgaatggagaaaacatgagaaaaccagatggacctgttagtactacatttttaaggcattttatatttgatggtgccgtacttttaataataataaaactgaagttttttagtggcaatactgatttattttttaaaccagaaagataatccatattgattacttactacaaaaaagggaaaatatgccaaaaaataaaaaaccttaaaattcatatgaagcaacgtaacagataactgagcacttggctcaagtggtcagacttttcataatgttactgtgtaagtttggaattacctaataaccccaggctcaggattaacagaaggttctgggtgagttttaaaacatttaatatacctatgatttgttttacaacttgaagaaaaggcaggcagtcttgtgtctaatgagcttaatgcaaattctaattatactgcaaataatttaaagttttgattgcattctacaattgtctgtttggaaaattacatattatgaagtcattatatattttatcaaatcagaaaaagtcagctcaggaactgtagcagcagggagttctaaagatgacatgaactatactataggggtgccctactctatatggcctagggctttggtttgggtcagtcttgttctttcagatacataacaccagcagtactttcgggctcacttcaagaaccagataactctcccaaaccatgatacatgaagtgtataatcaagatttttaattaagctttagaattctttatttgtgtagagtgatggaaatgaccaagaagtaataatataaagcaaaagaattgggagagatcaggttttaagtatataaatattttttttttctcatggcatattctcaaaggtgttttgttacaaaccagattttcattttttaaaaaatgagacttggtggtatttaaaacctacacctaccatgttgctatttcactttcattgctttagttgcttaatatttaagctttgcttcatgctaccttttgtctgtatttcaatcttcataagcctattttgttttgtagacttgaatgataaaaattgtttctcatcttaagtatgctcagagttttaaatgttaaagaatgttgtgtaacctttatccaataaagtctttgattttttaaaaaaaaaata

SEQ ID NO: 24876 - DNA, 3307 bp, Homo sapiens
cgctgcagccggagttggaggagggagaagctaggaagaaaatggcggccgtggctgcagaggcggcagcgactgcagcgtcccccggggaggggggcgccggcgaggccgagccggagatggagcccatccccggcagtgaggccggcactgaccccctcccggtcacggccactgaagcgtctgtgccggatggcgagactgacgggcagcaatccgctcctcaggccgacgagccgccgctcccgccgccaccgccgccgccgggggagctcgcccgcagcccagaggcggtggggccggagctggaggctgaggagaaactgtccgttcgggtggcggagtcggcggcagccgcgcctcagggagggccggaacttccaccttctcctgcatcgccgccggagcagcccccggctcccgaggagcgcgaggagccgccgctgcctcagcccgtagccccggcgctcgtgccgccggcgggcggggactccacggtgtcgcaactgatcccgggctcggaggtgcgggtcacgctggaccacatcattgaggacgcgcttgtcgtgtcgttccgcttcggggagaagctcttctccggggtcctcatggatctgtccaaaaggtttgggccccatggtatccctgtgacagtatttcccaaaagggaatataaggataaaccagaagccatgccgctccaaagtaatacattccaagaagggacagaagtcaagtgtgaagcaaatggtgctgttcccgatgacccttctcctgtcccgcatcccgagctgagcttggctgaaagcctgtggacttccaaaccaccacctctcttccatgaaggagcaccttatcctccccctttgtttatcagggacacatataaccaatcaatacctcagccacctcctcggaaaattaagcgacccaaacgaaaaatgtacagggaagaacccacttcaataatgaatgctattaaactacgacccaggcaagttctgtgtgataaatgtaaaaacagtgttgttgctgaaaaaaaggaaattagaaaaggtagtagtgcaactgactcttctaaatatgaagataaaaaacggagaaatgaaagtgtaactactgtgaacaaaaaactgaaaactgaccataaagtggatgggaaaaaccaaaatgaaagccagaaaagaaatgctgtggttaaggtttcaaatattgctcacagcagaggcagagtagtaaaagtttctgctcaggcaaatacatcaaaagctcagttaagtactaaaaaagttctccagagtaagaacatggatcatgcgaaagctcgggaagtgttaaaaattgccaaagaaaaggcacaaaagaagcaaaatgaaacctctacttccaaaaatgcacattcaaaagtccatttcacacgtcgatatcagaatcctagctcaggttcccttccaccccgggttcgtttaaaaccacagaggtacaggaatgaagaaaatgactcttctctgaagacaggacttgagaaaatgcggagtggcaagatggcacccaagccccagtctcgctgcacctctacccgctcagcaggtgaggccccttcagaaaatcagagtccctcaaaaggccctgaagaggccagcagtgaggttcaggacacaaatgaagtgcatgtgcctggtgatcaggatgaaccacagacattgggcaaaaagggcagcaaaaacaatatctctgtttatatgaccctaaatcaaaagaaatctgactcttccagtgcttcagtgtgtagcattgatagcacagatgatttgaaatcttccaactctgagtgtagttcttctgaaagctttgattttcctccaggcagtatgcatgcaccttccacctcctccacttcctcctcttcaaaggaagagaaaaagctcagtaattccttgaaaatgaaagtcttttccaaaaacgtctctaaatgcgtcacaccagatggcaggaccatatgtgtaggggacattgtttgggccaagatatatggcttcccttggtggccagcccgtattcttactataactgtgagccggaaagataacggccttttagtccgacaggaggcccgtatttcatggtttgggtctccaacaacatctttccttgctctttcacaactctccccctttttagaaaacttccagtcacgctttaataagaagagaaagggcctgtatcgcaaggctatcacagaggcagctaaggctgccaagcagctgacccccgaagtgcgggctttgttgacacagtttgaaacgtgaacatgggcagtaaggtaggcaagaccattggaagtcaccacagattttctagtctagttaggaataatttctacaaaatagcgtggccagattggagagagaagttgcactcagttggctggctttttaatacttaccttatagccatttttagactgagagcttaaactgaacatataatcaaattttgtgttaaggaagtgagattttagcagtatttttcagttttgaagttcgaaaccatcccaaggcataggagccatagcctcaactgaaattgaatttttgtagggactgttaattgccatttgtacctaatactgtatatatacatatatatacgtgtgtgtgtgtgtatatatatatatccgtgtatgtatatatacacacatatatatgtatatatacacatatatatatatgaaatacagcctgtcactgtgtgacacagattgcatatttgggattgcaataagggcttggtgagctgggggaatagtggatatttaatgactacttgttttttaaataatgaacacttagcctttctatgcgcataatggtgtaaaagttagatggttaggtgtttgacaaacagatggttgcaattcagttacagactggggaaatagcccagtgtttgggattaaaactgtcaagactggataggtgttagtcatcactgtctttcgtccagtggggatttaataaatactttcaagcttctggtttgggagtttagataggtttgattttggatttgtaaatagtgattgctaaatttggtcagatttctcctgactggctgttcctaaattcttaggatatgtcccagtaaaattatactttgtgaattaattgtcatatgtgtaattgttgcattttggatgtacctaatttgataattaaaacaaaataatttccgtttaaggtatctgtttgcaggtcagaaaatgagaaaatgtaattgtgtaatgctctgaaatgtaaaaaaaaaa

SEQ ID NO: 24877 - DNA, 2062 bp, Homo sapiens
agaggtttgcgggagtcagtggcacggtctctgaagaagatggattgggagtgtgtgggaatcaataaatgcgagttctgtgaaatgtcttgattttcagggtgcatggggctctttctggcaaaggtaatgacatacgcatctgtgccagcatcccaagagtgaggctggtttctggaaatccattctgactctgtgacagcggggatggatgtgaccttgcccgtggttagaaaacaaatttactgagttctctgggtgccctgcagacctttggatcctgccaccttgctggacgggagggctctctagctcctgccagcccttagagccacaggaccttggtcacaacatctacagaaggccctgcagctaagtgatctaatccaggatcatatgctgcctttaggtgacacatccctttagtctcctttaatcaggagcagtttctcagtgttcatcttccatgaagtcgacatttttgaagagtataggtgtcagatctttttcaagaacagcagaaaatgatcgaataccagatacctgtgtcattcaaagatgtggttgtgggcttcacccaagaggagtggcaccggctgagtcctgctcagagggccctgtaccgggatgtgatgctggaaacctatagcaacctcgtctcagtgggttatgaaggcaccaaaccagatgtgatcctcagactggagcaggaagaagcaccatggattggtgaggcagcatgcccgggctgccactgttgggaagacatctggcgagttaatatccagaggaaaagacggcaagacatgcttttgaggccaggcgcacataagcaagaaaacattgcccaaggagaaaagctgtgaatataataagtttgggaaaatatcacttctgagcactgatcttttttcttcaatccagagccctagtaactggaacccccgtctctactaaaaatacaaaaattagctgggcatggtggcaggcacctgtgatcccagctactcgggaggctgaggcaggagaatcacttgaacccaggaggcagaggttgcagtgagccaagatcgcgccattgcactccaacctgggcaacagagcaaaaagattccatctcaaaagaaaagaaaagaaatctgttaatattattaaaatatttatgtcactttggagaatcttcccttagaagtaaaagctccaatacataaaagacagatgaacatgtgaacatggacatttattgtaaaaattgttcttaatggcaaaaaaacccccaaaaccaaagcaaacactagaatcaaagtaaatacccatcaactgggaaattgtagaaaggaaaaaactatagtgtatccattccatagaatgttaatatagccattaaggtggacaaattaaaactatgctagtggacttgagtggaattccacaatgttctcttgagtgaaaaatgcaaggtagatattaagtatgttaaatatgactccatttttttaaatcattaacaaaatgtctctaggtgtttgtcagcaataaacggtatctatatatgtttatttgattttatgtgcatgaagaaaagtatagaagagtatgcattgacttggagggaggtgggtaatgcaggtaggttatgggggagtcaggggtgtagggaaaaggaaaaccaaaaaagaaaaatacataaatgactgaatcacgggtgataccacaaatgtgtgagttagtaaatttggctggggatgggggagctagaattttgctaatttgtggggatgttcatggtatatattgtaaaaagggaaaatttcataataatgtatacgattctatttttaaaaaaagtaaaaactcctgtgtgtgtatatatgcatgtggatgtttatatgaacatagaaaagtgtagaagaatacacacgaaggtgttaacattcattggttaccttggtggagaagggtaataagttttctgaatacctttgcattgtcttgttcacatatattgcttttgtaatttgaaaaacaaaataaagggggaaaacatttcaaactgaatgaa

SEQ ID NO: 24878 - DNA, 1813 bp, Homo sapiens
agcttcatccctgagccagaagctgagcaagaccaaacctgaagacgttactctttccagggactctccatggctaaatgaagggaggatggttggcccaagatccaggaagacagagtgaagggagaggatctaatccaggatcatatgctgcctttaggtgacacatccctttagtctcctttaatcaggagcagtttctcagtgttcatcttccatgaagtcgacatttttgaagagtataggtgtcagatctttttcaagaacagcagaaaatgatcgaataccagatacctgtgtcattcaaagatgtggttgtgggcttcacccaagaggagtggcaccggctgagtcctgctcagagggccctgtaccgggatgtgatgctggaaacctatagcaacctcgtctcagtgggttatgaaggcaccaaaccagatgtgatcctcagactggagcaggaagaagcaccatggattggtgaggcagcatgcccgggctgccactgttgggaagacatctggcgagttaatatccagaggaaaagacggcaagacatgcttttgaggccaggcgcacataagcaagaaaacattgcccaaggagaaaagctgtgaatataataagtttgggaaaatatcacttctgagcactgatcttttttcttcaatccagagccctagtaactggaacccccgtctctactaaaaatacaaaaattagctgggcatggtggcaggcacctgtgatcccagctactcgggaggctgaggcaggagaatcacttgaacccaggaggcagaggttgcagtgagccaagatcgcgccattgcactccaacctgggcaacagagcaaaaagattccatctcaaaagaaaagaaaagaaatctgttaatattattaaaatatttatgtcactttggagaatcttcccttagaagtaaaagctccaatacataaaagacagatgaacatgtgaacatggacatttattgtaaaaattgttcttaatggcaaaaaaacccccaaaaccaaagcaaacactagaatcaaagtaaatacccatcaactgggaaattgtagaaaggaaaaaactatagtgtatccattccatagaatgttaatatagccattaaggtggacaaattaaaactatgctagtggacttgagtggaattccacaatgttctcttgagtgaaaaatgcaaggtagatattaagtatgttaaatatgactccatttttttaaatcattaacaaaatgtctctaggtgtttgtcagcaataaacggtatctatatatgtttatttgattttatgtgcatgaagaaaagtatagaagagtatgcattgacttggagggaggtgggtaatgcaggtaggttatgggggagtcaggggtgtagggaaaaggaaaaccaaaaaagaaaaatacataaatgactgaatcacgggtgataccacaaatgtgtgagttagtaaatttggctggggatgggggagctagaattttgctaatttgtggggatgttcatggtatatattgtaaaaagggaaaatttcataataatgtatacgattctatttttaaaaaaagtaaaaactcctgtgtgtgtatatatgcatgtggatgtttatatgaacatagaaaagtgtagaagaatacacacgaaggtgttaacattcattggttaccttggtggagaagggtaataagttttctgaatacctttgcattgtcttgttcacatatattgcttttgtaatttgaaaaacaaaataaagggggaaaacatttcaaactgaatgaa

SEQ ID NO: 24879 - DNA, 827 bp, Homo sapiens
agaggtttgcgggagtcagtggcacggtctctgaagaagatggattgggagtgtgtgggaatcaataaatgcgagttctgtgaaatgtcttgattttcagggtgcatggggctctttctggcaaaggtaatgacatacgcatctgtgccagcatcccaagagtgaggctggtttctggaaatccattctgactctgtgacagcggggatggatgtgaccttgcccgtggttagaaaacaaatttactgagatctaatccaggatcatatgctgcctttaggtgacacatccctttagtctcctttaatcaggagcagtttctcagtgttcatcttccatgaagtcgacatttttgaagagtataggtgtcagatctttttcaagaacagcagaaaatgatcgaataccagatacctgtgtcattcaaagatgtggttgtgggcttcacccaagaggagtggcaccggctgagtcctgctcagagggccctgtaccgggatgtgatgctggaaacctatagcaacctcgtctcagtgggttatgaaggcaccaaaccagatgtgatcctcagactggagcaggaagaagcaccatggattggtgaggcagcatgcccgggctgccactgttgggccttgaaagtcctccgagagcttcagccacgttaatgactcttcaacctccatgcaaccccaccgcccatatctgagtgtttttctcggctctacttgattgcacctctgcccttatgtgcttggtccatctctctttctccagaatctttcccatgcaggtattcttacaaataaaagcttctatgattctct

SEQ ID NO: 24880 - DNA, 320 bp, Homo sapiens
ccatggattggtgaggcagcatgcccgggctgccactgttggggtaagtgtgataaatctagcaaaaggggtactgaaggaggctggcacctttggaattttgttcagcattcttctcttaaaagccttgaaagtcctccgagagcttcagccacgttaatgactcttcaacctccatgcaaccccaccgcccatatctgagtgtttttctcggctctacttgattgcacctctgcccttatgtgcttggtccatctctctttctccagaatctttcccatgcaggtattcttacaaataaaagcttctatgattctctg

SEQ ID NO: 24881 - DNA, 1933 bp, Homo sapiens
agaggtttgcgggagtcagtggcacggtctctgaagaagatggattgggagtgtgtgggaatcaataaatgcgagttctgtgaaatgtcttgattttcagggtgcatggggctctttctggcaaaggtaatgacatacgcatctgtgccagcatcccaagagtgaggctggtttctggaaatccattctgactctgtgacagcggggatggatgtgaccttgcccgtggttagaaaacaaatttactgagatctaatccaggatcatatgctgcctttaggtgacacatccctttagtctcctttaatcaggagcagtttctcagtgttcatcttccatgaagtcgacatttttgaagagtataggtgtcagatctttttcaagaacagcagaaaatgatcgaataccagatacctgtgtcattcaaagatgtggttgtgggcttcacccaagaggagtggcaccggctgagtcctgctcagagggccctgtaccgggatgtgatgctggaaacctatagcaacctcgtctcagtgggttatgaaggcaccaaaccagatgtgatcctcagactggagcaggaagaagcaccatggattggtgaggcagcatgcccgggctgccactgttgggaagacatctggcgagttaatatccagaggaaaagacggcaagacatgcttttgaggccaggcgcacataagcaagaaaacattgcccaaggagaaaagctgtgaatataataagtttgggaaaatatcacttctgagcactgatcttttttcttcaatccagagccctagtaactggaacccccgtctctactaaaaatacaaaaattagctgggcatggtggcaggcacctgtgatcccagctactcgggaggctgaggcaggagaatcacttgaacccaggaggcagaggttgcagtgagccaagatcgcgccattgcactccaacctgggcaacagagcaaaaagattccatctcaaaagaaaagaaaagaaatctgttaatattattaaaatatttatgtcactttggagaatcttcccttagaagtaaaagctccaatacataaaagacagatgaacatgtgaacatggacatttattgtaaaaattgttcttaatggcaaaaaaacccccaaaaccaaagcaaacactagaatcaaagtaaatacccatcaactgggaaattgtagaaaggaaaaaactatagtgtatccattccatagaatgttaatatagccattaaggtggacaaattaaaactatgctagtggacttgagtggaattccacaatgttctcttgagtgaaaaatgcaaggtagatattaagtatgttaaatatgactccatttttttaaatcattaacaaaatgtctctaggtgtttgtcagcaataaacggtatctatatatgtttatttgattttatgtgcatgaagaaaagtatagaagagtatgcattgacttggagggaggtgggtaatgcaggtaggttatgggggagtcaggggtgtagggaaaaggaaaaccaaaaaagaaaaatacataaatgactgaatcacgggtgataccacaaatgtgtgagttagtaaatttggctggggatgggggagctagaattttgctaatttgtggggatgttcatggtatatattgtaaaaagggaaaatttcataataatgtatacgattctatttttaaaaaaagtaaaaactcctgtgtgtgtatatatgcatgtggatgtttatatgaacatagaaaagtgtagaagaatacacacgaaggtgttaacattcattggttaccttggtggagaagggtaataagttttctgaatacctttgcattgtcttgttcacatatattgcttttgtaatttgaaaaacaaaataaagggggaaaacatttcaaactgaatgaa

SEQ ID NO: 24882 - DNA, 354 bp, Homo sapiens
aagtgctgtactaagcagccatgccaattgacgtgttttagtcctgtgaggtttacctgttgtctttcccaaatttcccagaattttatcctggaaggctctggctgatcctgaattcatatttgggtgtaccttgagtctttgttctggaacccagctgggaagggctcagtctgcctagcccaggcaaggcctggaagcagacctcagggagggccaaactacccctggatggccaggagaacctgggctgtatggggccatgctgtgagggtgtactgctttactgggagagagcagaccaggacagaccttcagagtccaggcattcaaccacgtagaagggaattagag

SEQ ID NO: 24883 - DNA, 357 bp, Homo sapiens
acaaaatgttctttaacgggtgaactggtaaacaacctgtgttgcattcatacagtgagatagtaattagcaataaaaaggaatgaattactgatacctgtcaacaatgacattctggaaaaggcaaaactatagggacagaaaacaaatcagtagttaccagttgtgactagcgggaagggaattgatgacaaaagagcatcagaaggcttgtgggggtgatggagctattttacatcttgcttttggtggtagtggttacacaactgcatgtgtgtgccagcagaactgcacactaacatgggttaatttactctgggatatcaataaatctgacttaagcatgagtaaaatgga

SEQ ID NO: 24884 - DNA, 592 bp, Homo sapiens
gtttaaatacatagtatttgtaaatctaaagcataacaagaaatgtgagaaaaacaacacatttagaaattgttaaaaaataagttattcagagatagggacaggttcttggtttgtatgactatgagaccgtgaagtattagccatctccgccttcctagaaagatgtctccctcctgcttcggactcctccttcctcctaaaccttgtttatcgtctgctgctcttgcactggccacaagagagactttttacagacttaagtctgccaagagaccttgcttttgttctacagcacctgttttaaatttcacccttcccaggaggcattttcctattaagtgagagtgagatgtagattctaccctctgtaacacaaacgacacacgaacacttcagtgcaagaaagaaaagtacaaagatggtgatactttgtgcggttcgtcagttgctgtctgttagcgtgtaagccccatgtgggcagggaccacatgcattgctctgcgctcatccaagcacctcatctaagaatactcaatatgtattattttgtggtgtttcctattttgaaatatgtgttggccgtgtacag

SEQ ID NO: 24885 - DNA, 318 bp, Homo sapiens
tgctgcatactagcagtcccagctgtgtgacctcaggcagatcacttaccctctctgagtctcagccatttcttctctgtgaaatgggagtactgatcactgcctttacaggactgtcatgatgcccaggtgaaactggctctgaagtcttcagatagacctgtggggctggctgcagggtccttgctggatccacctctcctaacccctctggcctcttctgccccaaacactgtgctaagggtggggctgtgtattagtccattttcacgctgctgacaaagacatacacgagactggataatttacaaaaaaaaa

SEQ ID NO: 24886 - DNA, 385 bp, Homo sapiens
ccattagcaagttgcttttatttttatgtaataaaatgatggcaaaatatataacgtatttgaaggcatttgcataagtaatcttgaaggcatttgcataagaagcatcgctgagaatctggaagttaaaggaaataaaaaagctgagaatctatctggaagttaaaggaaataaaaaaggtcacagattctacaaattcacacaacttacttgtagaacaaaccctcaggtcctctgtcagagcctatttactctaattttagcacatttcaaatgggcgtggtagtgtttaaatggtttcccagcccacagtaagtcagaggtagcaaattagataagagatggaggaagcactctgaggcttcaagaagtgacagctgacag

SEQ ID NO: 24887 - DNA, 120 bp, Homo sapiens
tctttgaggatggggtggcctgccaggcctaaggagaggatcccggggataccatgtggtgccttgttttgtactttgcaggtttctgcatattctcacatcagtgccatgggtcttaag

SEQ ID NO: 24888 - DNA, 639 bp, Homo sapiens
gtttttctatgttaatacatacaaccctccatctgagatttttaataacaatatagtgtttcattgattgcatgtgacatactttaagcaatatcctcctgatgaacatttatttccattttgtcaatattataataataactgagatgaacatcattgtacatacatgtatgcccttgcctgcagatttcctttagatgaaaatcttagcatggtattttgaggtcacattttacttagtgatatatactgacaagtggccttctacgaatgtcctatcaattgacatattcaccaacagtgagaagcgagcccatttctctcaccaacatttaatactggtgttttcatctatgcccattgtataggtgactaataatattaccatgtgcttatttgcatttctttgattactgatgaggtacaatatagttattatctagagctaaattgcctaaatttgaatcctagttccactggttcaaagttacttaacctcatggtgcctcagtttcctcaactgcaaagcaaggataataatagtatctaccatatgagttactgggaaaattaaattgtctaatacctatgaagtgctcacaaccatgccaataaacagtgctaccattaatattttaa

SEQ ID NO: 24889 - DNA, 375 bp, Homo sapiens
aaatatttaaagaagaattaatgccaattattcacaactcttccaaaaaatagaagaggaggaaacatgtcccaactcattctacagggtcactatgaccctgatggcaaatccagacaacgatcacaaggaaggaaaactgtaggtcaatgtcttttatgaatacatacacaaaatccttaacaaaatactagcaaaccaaatacagcaacatttaaaacataaccaagtgtgatttatcttaggaatgcaaggttggtttgacattgaacagtctattaatataatatgctacaccaaaagaataaaggtgattgtatcagtagacacagaaaaagtatttgacaaaacctgacaatctttcatgataaacac

SEQ ID NO: 24890 - DNA, 284 bp, Homo sapiens
ggattaacccaaattaaggatggggaagccagaaaaggcttcctgggaaaggttgaatctagagagagctgtaagttgttgaggtgaaagaacaggagaggaggaatatgtggtcaattatagaatctatatatagagagggagcttattaaaaatattgttcttggccaggcgcgatggctcacgcctctaatcccagcactttgggaggccaaggcgggtggatcacgaggtcaggagatcgagaccatcctggctaacatggtgaaaccctgtcgtcgacg

SEQ ID NO: 24891 - DNA, 145 bp, Homo sapiens
agtaatcttttcaatgagggaataaatgaatgaagcagcccaaattaatgattaggccaaattaaagatatgtgggcctcagttttgatctggcaatcatttcattttgttgaacacatccctgaaactctcttggggccacttt

SEQ ID NO: 24892 - DNA, 603 bp, Homo sapiens
tagggtagactttctgggtcatattatagccctgtgtttaacattttgaggaactgccaaattgtttttcaaaaatggctgtaccattttacatttccaccagagttcaagtttcttcatcttgttctctcttaagccaactttaatcaggtttttcctctatttcccaaacttcttagctgaacgtgcccttgacaaggtcattagtaacatcaaagtgcctaaattcaacagtcagttcacagtcctcattttgtttgacctatgcccagcatttgacacaattattcattcctccgtaatacactttattcacttttggcttccaggatactgcatgttgtgtgcagctccccctgtcccccaaccccacacacacattttattggtcaatccttgtcagtttcctttgttatttactcctttctctcctgcctttaaaaattggcgtgtccattggagatctttatctagacttacacatctttaagtactatccttgaactggctcccaagttgatatctctaacctagatcttcttctttttgtccttccgagccatgtgtccagctgcctgcccaccaggatgttagacattttaa

SEQ ID NO: 24893 - DNA, 655 bp, Homo sapiens
gtttctaggctccagggttgggcctactgacatggtcccagaaggccaaaggggttttgcttgtggaagaatgggagatccagtcgtcttctcagtatgttacaacaacaggtaaagcaaggcttccactgatccttgcttgctgtgttgttgggttgacactgggatggcatgggaacctcattttccacaacatgaccaaattctggagcaaaatgataataaaaccactcctccaagctgtgcatgagccaaatctggctgaggcattaataattgttctaataattgtttttacatttttaaagtgttataaaaagaagaagaagaaacaacaaaaaactatacaatagagatagtttatggcccacaattcctacaatattttcgcactttgccaaaaaagcttcccagcccctattcttaactccagtttacagaggagacaactgaggctcagagaggaaaagcaactggcctgaggtcacacagctgagtactggtagagctgggactagacccaggtctgtctggcccacatcagagctttgtccatcacagaaggcagctgggctgggtgcagtggctcacacctgtaatcccagcactttgggaggccaaggtgggtggatcatctgaggtcaggagatcgaga

SEQ ID NO: 24894 - DNA, 371 bp, Homo sapiens
ctttattcatttatcaataaatgtattcatgtatttgttagtgctaaagtctctttaagagctgcatggtttttccactgttgatgtactataatttatttatccaaagccctattgataggttttttggttgttttccagatttttttctactggactcttacagtgagcatccttgtattttagttagtatgagcactggtatgtggatttttctagttttgattcctagaagtggaatagctgtagctgaatcaaagagtattttacatttacaagttttaacaatattaaattactcattcaagtttgtgccaatttagacaactgccaatagtgaacaaaaggccatactgcttctgcctggaata

SEQ ID NO: 24895 - DNA, 335 bp, Homo sapiens
acaatcagagggcctgcctggacatagaaatcagggagagattatatcgtttacttcaatgatagctctgtaactttcaaaaggaaactatgtttatattgctggtattttgagagattactttgtcagtgaaatccattgagaaataggtatcggaggaaaacagaaatcatttttatcctgataaggctgttataaggatatgccatatattctggcaacaataggtttgcagaatgatatagaatcagttaccctccctgtctcaggcagaggtggaaaaacagaggggttcctggtagaggcttgtctctctaatactaccccatggagta

SEQ ID NO: 24896 - DNA, 625 bp, Homo sapiens
gaaagtgacttagaaatcagcctggagtccctagagcaggtctaacaatgaggctaggctccgtgattggtctttatccatgagccttgggtctctctgcacgactagaacgctaatcagagaaataacaacaacgtatttcaggagatggggtgagagggaaggtggataaaaataggcagcccagtttcacaaaggcttggttttgctttacaaatctgacagtgttttgagaaaggaacacagaacattgccagaaggagcctatgattgaggtgaacctcacgaatgtctttgaaaacctgactctaaccaaaaagtatgagggagggagagttctggctgctgtagacgacactacctcatgaaagtgacttagaaatcagcctggagtccctagagcaggtctaacaatgagggaggcaagattaaaatggagaaagaagcctgctaggggttgcatgagctggttgagttcaccaagccagattttccaacgcaacattttatgtgtgtgtgcttgtattcgtttatctggggagagaatgaataactttccatcagattttcagaggaacctgtgaacccttcccctgcctactccctgctcccaattaaaaactac

SEQ ID NO: 24897 - DNA, 330 bp, Homo sapiens
gtccatttatgtaatgcagtaagtagtagtaaaagtatgtgcttaacaactgacatcaaataaatgaatactgtgtgtcttgggaagtgagagaactctaaattaggcattggcaaacttttttggtaaagggtcagaccatctcttgtaattattcacctctgccactgtaccatgaaagtagcccttgatgacatttaaatgggttgatgtccatgtgttccaataaaactttatttacataaacaagagctgggctggatttgagctctagtttactgatttctgttttcagttttcatttttatcctggactgacaaaagctgtga

SEQ ID NO: 24898 - DNA, 548 bp, Homo sapiens
gctcatagacccagcatggtagagcagtgagttgatgattagactggaggtacacagggagtgcagggaaggggacagcccagccatcctgtgcagggcgcagcgacgtccccgtgaagcagcatcacaagccaggtgctgaggaatgaggggaattgtgagatgttggcaagaggagaggtggttcagtaggtggcaggagcatatgctggcatcaccaagtggctaaatgggtttattcaggcagccaggcacccgaaggagatggacctatcaaatgtcatcatggccttgctgtgtcgtgaggccaccgtgcaaatgaatgaggccagaggaagcatccacagacacctgcaggagagcaggcaggcatacagtagcgcctagcagcaacttgcagccattgaccctctcactagatgggctccaagtatccatccctcagaaatttcaataattgtgaccatcggtttacttcaagatttatttttgtcttgacctgaaccattgttcaaaatgtgccttgagaaactgttaattggaatttg

SEQ ID NO: 24899 - DNA, 471 bp, Homo sapiens
tttttttctgcacggaggttttgccagtggactggacaggggtatgagtgaaagctaggagtcaaggatgactcctacatgcttaaaacgagcaaatagaaggatggaattactattcgctgaaattgtgaagactgaatgtgggtggagcagatttaatggaaaaagcaggcgttcatcaaggcacgttacaaactaccatgtaaaagcgatatatctaggttttatgcaagaatttcgcaaaatgagggaatgggaactagttctgaactgaaggattttgttagagcatgttttgggaggggataggattaatagaaataagtaaatgaataaatgattactgataactagttgtaatatattagctcttccaagcaattagattatgctaagaaacatttaaaaaatatatagcccaaaggactgaatctaattgtgggatttcaaacaatacatggtatggtggta

SEQ ID NO: 24900 - DNA, 460 bp, Homo sapiens
ccgttctctgtattcttgtccagatgctgtggacagtgatgatgggaaaatagtccctgctgcacactagggcctgttaggagatttgagggctagaggagcacaaggggccagactgctgctacttctgaattttataggacatgcatttttttcatataaacttagaactagcacgcctaattttttttttatttttattttttttgaggcagagtctcactttgtcacctaggcgggaatgcagtggcacagtctcggcttactgcaacctctacctcctgggttcaagcaattctcctgccttagcctccctagtagctgggactacagacatctgccaccatggactggctaatttttttttttattaggagacagggttttcaccatgttgggccaggctggtctcaaactcctgacctcaagtgatctgcccgcctcagcctcctaaagtgct

SEQ ID NO: 24901 - DNA, 789 bp, Homo sapiens
ccataatcttgccttgacccagaaacattgtgttcacaggactttcagcttcccacccccataagtaagcttcctaattatgatatcttggtcttgccaagcatttagagggccttactctgtggccctccagatagtgatttgaatgattaagtaaacctctttttagataagtgttctagtccagtctaacatcagcttgttggtctttttggcactgtcattgtccagtaccagcacattcttggctccttgccacatctctggcctcaatgtgggaggcaaagacagtgagcatttccagagtggtgagatgggtgcagcacataatgaggcgatgaccacacagcatctctgaacagcatgtccacacagggctcgaagtcattatgctgcatgtccacctcatgtccacaatagctgagcagttgagattggtggagtggaccttctcattactcatcatctagaggaaggtcctcatcatctctacttctcaaaggggtagaattgaacctgaacctgcttgacagacaagagcccaagcctaaccaaggtggctgccatggtgacccttgccctgaaagccatttccattaatttaaaaattgtaggtatataggaactataataacaggcttaaaattaaaatttgctctgtttgttgggtcacacgtgtaatcccaatactttgggaggctaagccgggacgatcacttgagctcagaagtttgagactagcctgggcaacatagtgagatcccggtctctaccaaaaaaaaaaaaaaa

SEQ ID NO: 24902 - DNA, 280 bp, Homo sapiens
tgatcaatttggttgttaatgctcccactgagttttttatttcattctttatattctttagccccagaatttgtttgatatttaaaattatttccatttccttgttaattttcttattttgttcacctattgccttccttatttccttgtttctctgaattttcttgaaatttgccaagtccttaaaacagttatataattagaatactgaaataattagaatattcaaatagacacatgcattgtatgcttattgtgcatacatcttcgccaacaattt

SEQ ID NO: 24903 - DNA, 228 bp, Homo sapiens
aaaacatataaaccacagccaccctgttctgcctaggataatgaagttatgacatcatagaccgagcacatcatccaatctttgctccttccctctggaccaatggctagtggaattttcccaacaattaaagctatcactggtaagggagcatttgtttgggtttggggtttttgatttttaaaaaatttccaatctgtcatgaaccaaaatctgtaccaaatataa

SEQ ID NO: 24904 - DNA, 452 bp, Homo sapiens
tttcttcctttttttaagacagggtctttgtcacccaggttggagtgcagcgatgcaatcatagctcactgtaaactcaaacgccccagttcaaatgacccacctcagcctccaagtagctgggactacaggcatgcgccaccacacccagctaattttttttttttttaagagatggggtcttgccatgttgcccaggctggtctcaaacacctgccctcaatccctcaagatatcctcccacgtcagcatcccaaagtgctgagattacagtcatgagccactgtgcccagctatatccctgtttcttgaccaaggagaaattagccattcttgaatcaggaggacattgctatcagagacctcaaatggagaatactgaggaatcatccagaagcagaaaactgcaggaaggggacaacttccactgaagaccataggaacaagctaac

SEQ ID NO: 24905 - DNA, 172 bp, Homo sapiens
tgaattcctaattttgtaggctatgccacttttaagacataagtgcctaaaaggatgaaaagtaatagaaagtagaatggggaagtggaaacactggaatcaccccttgcactgaacgcatagtaatttttaatgatcacagagtggctcttcgttgtaattagtgtaattt

SEQ ID NO: 24906 - DNA, 587 bp, Homo sapiens
ggaattcatccaaaaaggattataaaacaccaaacaaattaaaaagtgggataattattaattctagggaaacagccatttgtttcagaaaagaaagtcattgtagtgtactatgtagtatgctgtaaacaacaaaatttccatctaaatagtaaaagaaattgattaaataataacaaaaatatgatataactaaattgaaaaatgtaagcaaggatgaagtaaaatatgttggtgagcaaggctatgataaaagctgagtcctcatcatccaaggtagaatatcaaaacttactgtctctaaattttttaaaaagataaaaatacatttaaaaacagaggcaaaattagaagaaataatttgaagagctgaaaaagttgtatgaaaaagtgtcatctgtgtataggaaaggctggggcaggagaccttgatcattctttatcagccttgacttttttaaataaaaatttttaaaaagcaggtgatgcttctggaaacctcggtgaagaatgatttatttcagaatgtataacactaaagcagaagttcattcttaatgtgttctcctattatatagaagtattta

SEQ ID NO: 24907 - DNA, 379 bp, Homo sapiens
agaccatattggatgtggccttaactcccatcattagtccttgtcctgaactcagtagaaagctctcttctgtcagagtaattggctgagacttagaacagaacctgaagtttaagacaacaaactctaaaataattgtggaattacagttcccatagaatataggaaatgcgaggcaaagtaatgaagtctttaattggatgggattgtgaattattctaccctctgcatcctgggcaggaatggcaagacagtagtaggactggctcttatcactgaaagttcacctatatacagaacctctcatttcccaattccatgtttctggaactgcatacaaaattttgttctctgcaagatttgaacaaactaagctaaa

SEQ ID NO: 24908 - DNA, 1111 bp, Homo sapiens
gcagactcggacttctgagcctgcagagcaggacctgggacaggaaagagaggaaccaataccttcaaggctcttcttcctcaccgagcatgcttccctaggatcccgtcttccagagaacctgtgggctgactgccctccgaagagagttctggatgtctggctcaaagcagcaggactgtgggaaagagcctaacatctccatggggaggcctcaccccagggacagggccctggagctcagggtccttgtttctgccctgccagctgcagcctggttggcagcatctgctccatcggggcagggggtatgcagagcttgtggtggggcaggaacggtggaggcagaggtgacagttcccagagtgggctttggtggccagggaggcagcctagcctatgtctggcagatgagggctggctgccgttttctgggctgatgggtgccctttcctggcagtctcagtccaaaagtgttgactgtgtcattagtcctttgtctaagtagggccagggcaccgtaattcctctcccaggtgtttgtggggctggaaggacctgctcccacaggggccatgtcctctcttaataggtggcactaccccaaacccatcttttgttctcctatatcctccttctcctgttccatttcagttcagtttcagcggtgccaacctctttgcgtttcctttttgttgatgaggacccagagctgctgcacacactcacctctaaccccctcccctcgctgctgggccccatctccacaggagagactggttcggctctagggcctcagtctggagtgggataggagcagtgagtgacaaagcctctgaaagatgcatcatctcttcctcacacccatttagtggggggatgggtcctctagacttgaggggctacctggggaagctgcctagcttcagccagggcaagaaagcttccttcaacctgcatagccggtgggtgaggagattcccaccttccatagcctccaaacatgttcccaaggccccactttcaagaatcagacagcaggaagccatagatgctggctgggttccaggttatggggagaagaaatacagtcaataaaaggtttttgtat

SEQ ID NO: 24909 - DNA, 774 bp, Homo sapiens
gaggggcgggacccaactgattgtcaaaggcggcagattgtagtttttgttttggccggaaaggcttaccatgagttgccagggctgagagagatggagaaggattcgcggcggtgacagattaaattccccagttacattatagacttggagacttgtccttgtgtggacgggagccggaaagccttgagaacttattcctcgacccggacatggcacaggagaaaatgaaactaggtttcaagtcgctgccgagttccactaccgcagacggcaacattctgagaagagtcaacagtgcccctttgatcaatggacttggttttaattcacaggtgttgcaagctgacatgttaagaattaggacaaacagaacaacatttaggaatcgacgctctctggaaattacttcacccacttctgttgaacagaagcccaaagacctcttctgaccttgagactatgccttctcccaaatcgcccctttgctttatctcctaagaactctgaagttgccatgcctgttcctttctctcccaccaggaattctggcacttctgctcaagccggatgtcactgcgtcacttctccatccccaccccctcctcttccaaaggaagcaggggaaatgtctcatcttcctaagagaaaaggttgtgcttttcttgagcaattcatctgttctaattttaggcctactgacatctgtctcattaggttttgcttttcctattggcaaccacaaaccccaaatctagtgtatggcccacaaag

SEQ ID NO: 24910 - DNA, 766 bp, Homo sapiens
tggtgcgcgaccaacttgatggttcaaggccgcaatggtagttgggttgggcggaaaggctacatggagttgcaggactgagagagattgagaaggactcgcgcgttgaaagaataatccccaaggtccttatgacctttggagaacttgtccttgtgtggacgggagccggaaagccttgagaacttattcctcgacccggacatggcacaggagaaaatgaaactaggtttcaagtcgctgccgagttccactaccgcagacggcaacattctgagaagagtcaacagtgcccctttgatcaatggacttggttttaattcacaggtgttgcaagctgacatgttaagaattaggacaaacagaacaacatttaggaatcgacgctctctggaaattacttcacccacttctgttgaacagaagcccaaagacctcttctgaccttgagactatgccttctcccaaatcgcccctttgctttatctcctaagaactctgaagttgccatgcctgttcctttctctcccaccaggaattctggcacttctgctcaagccggatgtcactgcgtcacttctccatccccaccccctcctcttccaaaggaagcaggggaaatgtctcatcttcctaagagaaaaggttgtgcttttcttgagcaattcatctgttctaattttaggcctactgacatctgtctcattaggttttgcttttcctattggcaaccacaaaccccaaatctagtgtatggcccacaaag

SEQ ID NO: 24911 - DNA, 479 bp, Homo sapiens
tgcttccaaatcttaggtattgtaaacagtgctgcaataaacatgggaatgtagatatctcttctatatgctgatttcctttttggtgggtgatataccttggagtgagattgctggatcatatggtaactctatttttcattttttgaggaacctccaaacttgaacaacatggatttgaatggcgtgtgatgtgaaaccctcctatacgtatgggtgactttttgtatcctcgggttccagaaggcccactgtggacttgaggatgtgtggattttggtattgcagtgggggggtgctggaaccaattccccacatataccaagggatgactgtaagtaattatgcataatgccaagagtactgcattaaaaaaaatctttttaaatggaaaatttaaaacatggaatatagaatcttcatgtacctaacaccctgccaaatccccctctgcgagaaacacgcaagaatgatcaata

SEQ ID NO: 24912 - DNA, 479 bp, Homo sapiens
gaggggcgggacccaactgattgtcaaaggcggcagattgtagtttttgttttggccggaaaggcttaccatgagttgccagggctgagagagatggagaaggattcgcggcggtgacagattaaattccccagttacattatagacttggagacttgtccttgtgtggacgggagccggaaagccttgagaacttattcctcgacccggacatggcacaggagaaaatgaaactaggtttcaagtcgctgccgagttccactaccgcagacggcaacattctgagaagagtcaacagtgcccctttgatcaatggacttggctgctttgtcacctctgaccttcacctccagccgcttgaatggaaatggttgtcaagcaaataagctttggacttttttacatttttttttttgtctttttttgagacggagtcttgctctgtcgcccaggctggagtgcattggcacgatctcagc

SEQ ID NO: 24913 - DNA, 985 bp, Homo sapiens
gaggggcgggacccaactgattgtcaaaggcggcagattgtagtttttgttttggccggaaaggcttaccatgagttgccagggctgagagagatggagaaggattcgcggcggtgacagattaaattccccagttacattatagacttggaggtgggggatcttctcatcgttagaggccccgatcatgggagataggcggttcggagccagttctgcctaactttgtgttcactgatgttagggctgctagggctgcaaaggtgggcacccctactcgcctaagagctttctcctctcttctctttttcccctttgcctctctccttacatcacctgcccactaagtagacttgtccttgtgtggacgggagccggaaagccttgagaacttattcctcgacccggacatggcacaggagaaaatgaaactaggtttcaagtcgctgccgagttccactaccgcagacggcaacattctgagaagagtcaacagtgcccctttgatcaatggacttggttttaattcacaggtgttgcaagctgacatgttaagaattaggacaaacagaacaacatttaggaatcgacgctctctgttgttgccacctcctccctttcatggttccatcagccgccttcatcaaatcaaacaggaacctccaaacttgaacaacatggatttgaatggcgtgtgatgtgaaaccctcctatacgtatgggtgactttttgtatcctcgggttccagaaggcccactgtggacttgaggatgtgtggattttggtattgcagtgggggggtgctggaaccaattccccacatataccaagggatgactgtaagtaattatgcataatgccaagagtactgcattaaaaaaaatctttttaaatggaaaatttaaaacatggaatatagaatcttcatgtacctaacaccctgccaaatccccctctgcgagaaacacgcaagaatgatcaata

SEQ ID NO: 24914 - DNA, 800 bp, Homo sapiens
gaggggcgggacccaactgattgtcaaaggcggcagattgtagtttttgttttggccggaaaggcttaccatgagttgccagggctgagagagatggagaaggattcgcggcggtgacagattaaattccccagttacattatagacttggaggtgggggatcttctcatcgttagaggccccgatcatgggagataggcggttcggagccagttctgcctaactttgtgttcactgatgttagggctgctagggctgcaaaggtgggcacccctactcgcctaagagctttctcctctcttctctttttcccctttgcctctctccttacatcacctgcccactaagtagacttgtccttgtgtggacgggagccggaaagccttgagaacttattcctcgacccggacatggcacaggagaaaatgaaactaggtttcaagtcgctgccgagttccactaccgcagacggcaacattctgagaagagtcaacagtgcccctttgatcaatggacttggttttaattcacaggtgttgcaagctgacatgttaagaattaggacaaacagaacaacatttaggaatcgacgctctctgttgttgccacctcctccctttcatggttccatcagccgccttcatcaaatcaaacaggtaagaagactttccaaactgacagctgttcatttaaaaaagtaaattttatttttctttgtgaaaatacctatgtttcagtaattctaagtgaggtcacgtgtaatattaagtttttatttctaggaatgatttcttcaaaaa

SEQ ID NO: 24915 - DNA, 313 bp, Homo sapiens
cattgtaaaaaaaaaaaaaaaaaaaaaaactgttccctcacaattattttgtttaattaagtgcaaatattttcttcacttctctcaggaaattacttcacccacttctgttgaacagaagcccaaagacctcttctgaccttgagactatgccttctcccaaatcgcccctttgctttatctcctaagaactctgaagttgccatgcctgttcctttctctcccaccaggaattctggcacttctgctcaagccggatgtcactgcgtcacttctccatccccaccccctcctcttccaaaggaagcagggg

SEQ ID NO: 24916 - DNA, 1375 bp, Homo sapiens
gaggggcgggacccaactgattgtcaaaggcggcagattgtagtttttgttttggccggaaaggcttaccatgagttgccagggctgagagagatggagaaggattcgcggcggtgacagattaaattccccagttacattatagacttggaggtgggggatcttctcatcgttagaggccccgatcatgggagataggcggttcggagccagttctgcctaactttgtgttcactgatgttagggctgctagggctgcaaaggtgggcacccctactcgcctaagagctttctcctctcttctctttttcccctttgcctctctccttacatcacctgcccactaagtagacttgtccttgtgtggacgggagccggaaagccttgagaacttattcctcgacccggacatggcacaggagaaaatgaaactaggtttcaagtcgctgccgagttccactaccgcagacggcaacattctgagaagagtcaacagtgcccctttgatcaatggacttggttttaattcacaggtgttgcaagctgacatgttaagaattaggacaaacagaacaacatttaggaatcgacgctctctgttgttgccacctcctccctttcatggttccatcagccgccttcatcaaatcaaacaggaagaagccatggatttaataaatagagaaacaatgtctgaatggaagctacaaagtgagatacagataagtcactcttgggaagaaggcttgaaactggtgaaatggcatttcaatatcaaccaaaaaagattttccaaggcacaaccaacatgctttcttctgatacttcccaactgtcagaaaataatgtgtatctacttccagctacttttgatggaaacgacagcaatgctggatcttctggtaattcgtcagctgaaatcggcactgtcacaaactctcctgtgtcaccttctgatactggttctcatttgttctagtagacaaactttcaactaaatgattcacccatcccaagactttctcaccagtggagaaacacacacatcaagcaaaccaagtcagagcaatgagaattgtactgtataatttaaactatctcctatttatcttttttcctcaatttcctaaaattctatttatctacagaacttgcgtgtataattcttgtgtacatccttaaatttaatgtaataacatgttaaagatgttttccaaatcagaaccatgttgaagatacaagcgtaaattgttaggctgctattttctagaaaatgctgtaccttgactttttaaaataatcttatgaaacataattctgataaaatataattgttcaattaacaaagtaaaatgatgtttgacaattatgtact

SEQ ID NO: 24917 - DNA, 744 bp, Homo sapiens
gacgcaccctgtcaggggttgtgagaaagctgcagtgtccagtttcccacccctgtttcctgctgtctctctcccactcatccctgtttcttactcatcccttttccttctttgcccaaacatcatatttctaggcaaagataagagaggagatagtgatgtcctgaaaggggttcagaacaacgtagcatggcctttggtgaaagcgtcaccgatgggaaataattgagaattgtgcagtgcttgcagcgtcagaatcagcactgttttttgtgttggtgaaaatattccatgtgcgtaaagggagagcatcagggactttgcaaattcttcacaaggacccagaaatagcttaaagattcatggttttcctgttggcttaaatagccttaatctttcattttctactaccattaagtcggggaaatgacattgaactacctcattagcagccttcccttgattaactactgactaaaagtgtgctgaaaatggcctttgtttttgtgaagctcatcctatacactaacatttgcttaaccatggattattttgtctctacaaagctgtgccctgtattcgatttttacttcaatgagtggttattgctagaattcctacaaaaaaaaaaaaaaccgttgcagatatttttgtatgtagcttaatagatatttagtttaaggagactgcaacatttgcataaggtgcctaaaaactcaagaaccattgataagtgagatcact

SEQ ID NO: 24918 - DNA, 318 bp, Homo sapiens
aataatgatagacttaaaatatcaccattttgaaacccctaatgaattaatggatctaggttgattatccatggctgcttacatcacaaaagacaaacagctattaaatgccttttgatactagaccataagaccacctatcaaatagtcttacaaataagtaaacttgaatgtgatctgaactctagatccaaccaccataacaggaaatacagaggatggggacatcatggcaaatggtaaatgacacctaggggatgcaatcagcaaaatccaggccatggaaaactccagggcaaatgacttcatttttttcaa

SEQ ID NO: 24919 - DNA, 633 bp, Homo sapiens
gtaattaagttactaatcatttgactttagtttaaaaaggagacctaggtgtgcctattctaattacatgagctgttttaaaaacataaagttttctctggctcaaagcagaactgcaagtcagagcaatttgaaagatgagaaggacttttcctgttgctggcttgaagatggacggggccatgtgagaagaaatgtgagaggtcttgagctaagagaggcttgtggttaacaacccatcagaaacggggacctcagtcctataccttaagggaactgaattctgccaacaaccaaacgagcctgtaagcagattcttttccagacaagaacccagcctggctggcaccttgattttggccttgagagatcagaccccaagcagagaacccagtcagctccacctaaacttctgacctacagaactgaaaaattttaaataaatgttgttttttagcctctaagttggtagtggtttgttatatggcaatagaaaattgatatgcaaggccacttggcaaccatgtgaataaatgctatggaagaaatggaaatctcatgagtgaaaaaaacaaaataaaaattataggtacaacctgataatagtcatatgaaacattcacatgggaaaag

SEQ ID NO: 24920 - DNA, 492 bp, Homo sapiens
gaatacagccctgtcaacactgtgattttagcccaatgagattaaattctgatttttgaccttccaaaactataagatagatttacattgtttaaaccattaaatttgtggtaatttgttacagcagtgataggaaattaatataggccccaagtgagaactacccagtagagcccagtcgactcatagaaacatgagaaataatttttaaaaatgaagtttgaaccactaagttttactgcatagcaatagataactggaatagcaaggaagttaccaagtctattaggctatctgaatagaattcataagccaaactgaaaaggtttccattaggcaaagggggaataaatggagcatcaataaggataacactttaatagagtaaatgatcaaatacatttaaattcataacttcataaagatacaacaaaattgatcacctttgcaggatgtcaaagaataaattcattatttgtaaaactgttaggt

SEQ ID NO: 24921 - DNA, 2272 bp, Homo sapiens
aatgatgtttcagtagagagtggacagagctgtgcagatacctcaggaaaacccaattttatctatttattttactggagtgctgtagtctgaatgtttgtgtcctatcaaaattcatatgttcaaatcctgacccccaaggtgatgatattaagaggcaggacctttgggaggtgattaggcagagacctcatgaatgagattagtgcctttataaaagaggcctgggggagctcagtcacatcatgtgatgacagagcaagaaggcaccatctacaaaccaggtcctcaccagacagcaaatctgccggcaccttgatcttcgacttcctagtctccagaagtatgagaaatttctgttttttataaacaatctggtttatggttttttgttttgttttgttttgtttttgacagagtgtcgctctgtcatctgggccagaatgcagtggcgcgatctcggctcactgcaacctccacctcccaggttcaagcagttctcctgcctcagcctcccaagtagctgggattacaggtgcctgccatgacgcccagctaattttctcgtctttttagtaaagacggggtttcaccatgttggtgaggctggtttcgaactcctgacctcaagtgatccacccgccttggcctcccaaagtgctaggattactggcgtgagccaccacgcctggccagttttatggtattctgtaattgcagcccaaactgactaagacgtgaagtttaggtaaacatttgcagtttgctatgctgatattgaagtattatctgttggtaaatattctttgctgatacttaataagtattcttattaataacaagtattaataatatgtattcctcactaatgcttaatacaaatccttactaatagcagtattagtattaattagtattaatcagtattctttgccaataagggttctgacagaaaatcagttgttcattaaatattattgagatacttcttgatcttatagtagacaggtactgttttagattctggggattcagtcgtaactgagatagatgtaatccctaccctcaaagggttgccagagaaaacacaggactcaattgaattggaatttcagataaaaaacacataatttttagtataaatatgtttatgtgatacttatactgaatataccatgtgatatttggaatatacttatactaaaatgtacactaaatgtgttgataacctgaaatccaaatttaactgggcttcctatgtttttatttgctgagtctggcaattctatgccctcactacgcttataagctaacatgctggaagcagagatttgtaaatacaaatagcatacagtgaacaatgctgtataacctggggagccataaattagaaggcactgggaccctaaatgtatggagaaaaactgtcagccaaccaggaacatccacccttaaagcaagaaataaacttctgtcgtatttgagccattatgttttggaaccatttgtgccatggtctatttgttatgccagcttaacctaactaacaatatgtcctgaaatctactatcatttccaaatttactacagaatcaaaagttttaatataatataccaacaactaataaaatatatgtaaataaaggcaacaggaagatggggcaaaccctaaaaatgcttatgctgtagtcatcattctattaacaatatagctttaaacctaagtattttcaaaatggtcatgagggacatcagatcattttaggaaaattacataactcgatggcttccctaagcaactaatactacacatttatacattattcctggcgattaaaacattttctttcagctaattatcgaatgtaaagacaggttttgtaggctctaaaattttaattaagacatggtttttgccttcagaaagtatatggcctaatagaggaaataaggatacaaaatactagcagaatatgatcagtgccaaaagatatgtgcaaattatatctctaattggagtgagaaattcattcagattagaggggattaaaaagaagctgaatgaggaagcattttttccctcaaagctttacaattttctgtcttttgaatttaaaagtagagcttattgtcaagaatttgcaaaatacaaatagagaaaaacaaatatcacttctaatctcactacccagagatagccactaataacatttttgtatgtattccctcctttatgttttaaataaaattggggtcttattatctattcttt

SEQ ID NO: 24922 - DNA, 476 bp, Homo sapiens
ctgtatgccttcagtcctgggacgctgatctgcttaattctgcctcattagaaaggggccacctgctggatttgttactgagccttttgtgttctaccttggtgctgtgggagaagctgagtggcctggagaagagctagggagtgggcttatgggtgagtacctgagcctgaggctgaacctggctttgacttgcaattctttcagtaggtgagggttgccaaaactttaatgtgatccagttcacctggaagatcttattaaagttcagctttggttttaatagtgtggggtggaggtctggaatcttgcctttctgacagctgccaggcattgttaaggtagctggttcttggaccacactttgagtagcagcaaggaatcaggcaatgggttcttcttcagtagttcttccatgcatagatctaaaagagtcagggtttccacacttttgtgtggatcccagatgggcaggg

SEQ ID NO: 24923 - DNA, 765 bp, Homo sapiens
ctctctcaggcgcctaaaccacattgaggtgctccttcctctgtgtgtgtttgtacctcatgtacacttcgggtctagctcatttcactcttactgtaattctttgaaaatctctctaaattataagctgtttgactcaatgattgtagcgacacatatttgtaacaccattgtctgaggtaattcctggcatgtgtaggtggtcacccctccataaacactgaataaatttttaaacgtatttctctatgcttttcaaggagtttcctctatactttctcactgtacctcatcactaagaaggaaataggaccagtgttattggccttcttttacagagaaagaaactaatgcttaggaaacttgagtggtttaaaggcacggcgctcagtttttggaagggccaaactttcagatcttctgactgaagtgtcttaatgtgtggggaagctctttgtcttataaactgtaaaataccgtaataattgaggtctgcgcaggccccaacctatccatggtttggggctgctatctgcctcataaagcaaagtggagggtttgtcttttggaaaaacaaagtcgttttctcctctgaaaaagcctcctacatagttggttttgccatttgccaagaataagagggcacagattgaggcctcttgagtatgggttttcagttgaggttgaagagagaagacagggattgtaaccagaaaattcagaatggaatgcagttccctccagaactcctgggcttcatgacag

SEQ ID NO: 24924 - DNA, 431 bp, Homo sapiens
aatgcccaatactttgacgaacttctgagactgatagactaaagaagggaatggggaatatgcaataaaaggattttataaaagtgaagctacagggctctgatttatataataggactaaggcttaggcatataaaaatgattaatcggctgggctcacgcctgcaatcccagcagtttgggaggcggaggcgggtggatcacctgaggtcaggagttcgagaccaacctggccaacatggtgaaaccccatctctactaaaaatacaaaaatttgccggacgtggtggcgggcacctgtaatcccagctactcgggaggctgaggcacgagaatcgcttaaaacaggaggcagaggtttgcagtgagccaaggtcatgtatgccattgcactccagcatgggcaaaagagtgagactcggtctcaaaaa

SEQ ID NO: 24925 - DNA, 794 bp, Homo sapiens
aatcatgtcactgcactccagcctgggagacagaggggaaactgtctcaaatataaataaaaataaataaataaataaatactaattaaaaaaataaaccaaacaaatcaaagaaatgcagagagcaagaatttggcagtgtctgtcaaatatcaccacgcacacaccattttatattctactcccttataccctctacctcattccattcatattaatttgcattttcaatatttttcacttctccctattttgagtgggttcccagtttctctcaatgggagaaagtacatcttccattgctttcctgggactggggatttttcccaggcaaaatttaccagcaatagagtcaaagcctcctcttgggttttgtaaaaatcccaaggcccttgaagagaattatgaagagtttcctggaggaaagagaagagggcaaatactttctttctttctttctttctttttaacttttggagagaaatggtaattctctccagaaattcccctggatggagaaagggggagccacagggaatctcacactgctcagcagcagtttccgggaagcatcagcagaggctggctgcatgttgtatctaagggctaggatctcagcaccaggggcccagtctcagcgaagattcctgaacctgagcactgggtgtgtggaaggagaatgctgctggcttttaagggaccataggctgggtccatgacctcattgccattctcaatttatagagacagaattgaaagctaattcagttttctagcttggctgatccaaaaaa

SEQ ID NO: 24926 - DNA, 304 bp, Homo sapiens
gcagatcgaccgccacctgctggtgggacgtggcccgctggggagaccccgctctgccccgaattccgcctctgcagtcgccctccgatttgcagtcagccctggggagggtgggggaaacgaggtggacccgaaccccgaagaaggggaggagggcgcaggcccactggcgggtggagcgtttcccaaggaggagcaggagatgctgaagacatatctcaagactcaagatctggccaaggacccgcgctcccccaaagcaaagcagtgttttgagaagaaaaataataataataaagctttg

SEQ ID NO: 24927 - DNA, 378 bp, Homo sapiens
atcttcactgaggtgtcctgacccttccttctctgtcagagattcctgttgctttgctcagtttccctctcctgggaggtgcagcagagttcctctgcacagaggcactgggcttcctgtcagggcatctgagccaagcagctgtcaccccagctggctggtgctgatcacctctgaaccaggccccaggcatgttgagtacttcacatgcagcttctgagtccatcttctctgcagtctcacatcagctctcatcggcccttgccatgtgacgcattcttctagatgtgcttcatacacagagcaccccaaaaagtcttagtgcaggtttaagctgggattctttcagacataaatgtctccaacttacacacctct

SEQ ID NO: 24928 - DNA, 354 bp, Homo sapiens
gtttcatctgccaagattgacctgtacattctagaattgcttcttggctcctggaacatcatatgcaggaagagaacagagacagcaaagccatggagtcagcccagctcagggaggagaggtctccagcgactggggcatctggccctgggaagcgcgacccagactctcagcttctcaacacagcacatccttccccacttggatatacagggtgcacctgtcaggaggaggtgccaaccaggtctcctgagtgagctggcctggtgatcccatgtggagtcaaagtccttctgtccccccaccccaccccattttccaagtaaggaaatccaaggtcacaaatcctgtact

SEQ ID NO: 24929 - DNA, 337 bp, Homo sapiens
ccaaagtgctgggattacaggcatgagccaccatgcccagcttctagattctttaatggttgctgtccttacctacccactgtcctccatgttctagtctattcctattaggtatgccagggtttttgctttaaagatatatccttattgtagaaacctttgggatgtgatcaagccgcacttacagaaaatttgagctttctgatggaggggctgtagaaagtagtagtagaagccatgagatggctgtcccaactatgtaagtgaaggtaacatggactgaaagggaatcttctggtcaaatctctcactagtcatagacagatattcccatttt

SEQ ID NO: 24930 - DNA, 343 bp, Homo sapiens
atgaagaaacagaggctcaggtgaggtcacaagcctaaaccaagctcccccagtgaagaggcagtagagctgggactagcacctgggtgtcttcccccagctggggctcctccaccccagtaatgctgtgtttgaggtaggctctccccactgggcagttctccttttggtaagtggaaaggaaatgtcctttctgaaggttacttggcctggcctcctgagctggtgtgtgggctggggggaataacagcttccagctccatgaaggtaactcagatctctgtaccaggttttcaagttcagcttccagcaacgaagtcaaatatgagaagagtgctgagct

SEQ ID NO: 24931 - DNA, 394 bp, Homo sapiens
ggtcgaccaggagacccaggagagacctctccctatcgggaggccccacctcctgaccttatcaccctggagttaatatttcaacatgggaatctggggtgcacgtgtagatcacgtgctgggtgccttgtgtcacgtgtgtgtcctgactcgaggcccgtgtgtaggtcgtgtgctgggtgcatcctgtcatgcatgtgatcctggctcatggcccgtgtgtaggtcgtgtgctgggtgcatcctgtcatgcgtgtgtcctggctcgtggcccgtgtgtaggtcgtgtgctgggtgcatcctgtcatgcgtgtgtcctgcctcgtggtgtgtgtgtaggttgtgtgctgggtgcatcctgtcatgcgtgtgtcctggctcgtggcccgtgtgt

SEQ ID NO: 24932 - DNA, 716 bp, Homo sapiens
ggtgaggaacagggggaatattacagcagccatagcctgagggggaataatctccacgtggactctggaacaaagctatattttgtcagaagcgctgcaacaattaccattccccttaagtactgatgaaatctttttgcagttggggtatggaaacagggaaaaaaccctcagcccctgaggaaggggtaggaatatctacagtgataaaaactatactaggggaggagaaggatcatggagaaggctgtacacctcagacttagggtcacagtgttcacctaagactgaggctgagtcagaagaccaaagaagaccttcctccgtttcttactctgctgttaggatcataagtaccttggtaaataacttttttgagtacaaaggaaagacgtgacttagtatgtaggtagtggttctgaaaatgaagaaagaaatatttttacaaactaaatcccacaccccaatataaggtatcatttaggaatggtagcctgtagagcactgagtgtagcgtagaagtaacaaacttcaaacctagctcactttctaattatgttgatgcaaacccctgtgctaaagttttagcagaaggaaacatgtggccatatccaagcaatgaaaactgttttagtctttactgtcatacatctgatgacaataatacatgagaatttaaacaaaaagttaaaagcatatgaacgcgcaaaaaaaaa

SEQ ID NO: 24933 - DNA, 668 bp, Homo sapiens
atttgaaaccagactcattttataccagacttttttattttaaaccagactttttaatattttataatatatacctattctcttatctactgtaccctttctcatttctgcacatttctttgtatttattttataatacctagtagtatttctgttacatgaaaaagagaatcaggttttgaggtgtaaaggtacctgataactcctctggttcgtgctgcgtgtttgaagagtagagccatagcggcatcccggcatttaggcttccaggccaatgctcttgtcaccccaagttggtcttagaagtatgagcctgttggtaaaactacttgaatgaaaatttatcctggaattgagagggtaactttaaatcacttaattattctggtgttttctctagccctgttctcttttgtcacccatattgatgatagaatgccacttgtaaagtacatcttaagcaccctcctcctagttagatctcagccagaataactactgtacataaacaaatcatgtaaagatatacctaatatttgctaaggtgttatgtcttagctgaaaaaactgctgtaacaaatgtttgctgaataaatgccataaatatattcaatataaaaaaactatatcttcaaagtaaatgaatgaataaataaatatccatgtat

SEQ ID NO: 24934 - DNA, 379 bp, Homo sapiens
ttgagaagatgctgccttgggagactgaccctccacccatcgtgagattttgtcctgatttcacatttcacatacattaacatgtaaaacaggttgggtacagtggctcacgtctgtaatcccggcagtttgagaggcaaggcaggagaattgcttgagcccaggagctcgagaccagcctgaacaacatagtgagaccccatatgtacaaataattaaaaaattgtccgggtgcggtcgctcacacctgtaatcccagcattttacgaggccgaggcaggtggatcatgaggtcagaagatcaagaccatcctggccaacatggtgaaaccccatctctactaaaaatacaaaaattaactgggtgtggtggcgcatg

SEQ ID NO: 24935 - DNA, 314 bp, Homo sapiens
cagaaaggaatccattatagagaaagactttcttcatactatggcatttgtttttgttttagttttcactctagaaagggagccctcccccagccaacttttccttttatctcattggctacaactgggtcatatgttgagcctaagccaatcataacttgtcctttgggtctgggggaggggttctgcattctctgaggtcatgggatctctaccagcttaaaaaaaaattatgtttcatttgaaaggaagaaagtgaatagacaattaacagtgtctgtcatagagttggttggaagcagacacgctagcaa

SEQ ID NO: 24936 - DNA, 563 bp, Homo sapiens
tgcagttcctccatgtgacattgtgacctgagattggtttcttagtctgccatagctgtacttctctgacctgaaggatggttttaattgtaatttggattgcttatcttacagggttagttgagaattcagtaaaatcgcacgagtgaaagcactttggaacaagaaacttacttgtagactttggttttggcttttttactacctggattcagttttctcatttacaaaatataaatgttatactagaatagatgatctttcaggtcccatttatgactggcattgtataaaacacctcacccataaagctgtaagtgatagtaaatattacaaataaacaatatattttattggaaatatgtggctattccccccattttgctccattcgtaaacttttcaagctaatcatagaattctgtgtacctttgcagagttaactgattttctattccatttctctactgtttctacttttccaatcctcttttctcatcttaagacttgtaatactttttcacctatattaattttggacaaataaaaacatatagcataaaa

SEQ ID NO: 24937 - DNA, 355 bp, Homo sapiens
gaacatggtggcatataagacaaatatagggaatcgagatataaaacacagaatgttaaaatgtgtttgctggattactgtggctttgttggactacatcagcctcagagagaaagtgtcatagtacatccagggagagatttttaaaactgaggaaaccagggtataccagtaaattatttacatagggttaagtcccttgcctccccaccacctccgtaacctgggagataacaaaatttacccaaatttccatcctaagcttttaaggtttcattccatgtatagagtccaggtttccacagagcgcagttagggtgcttgatgttacctaacatactccatgtgcaaaact

SEQ ID NO: 24938 - DNA, 423 bp, Homo sapiens
gaaactgaggacatacgtgacacaagagatgtgagggttgtgaggtgaagcacggagttaagctggcaggctcgggttggtgacgtctgggttcaatccccggccgctcatctccccagctatgtgacctgaggcctgcccttcagacccatctgagcttcactttcctccctcataaagcagttcagcagggccagacgtggtggttcccagcacttgtaatcccaacacatagagaggctgaggtgggaggatcgctccagctcaggagtttgagaccatcctcagtagcatggcgaaacctcatctctacaaaaaatacaaaaaatttgccaggcacagtggctcacgcctgtaatcccagcactttgggaggccgtggtgggtggatcccttgaagccaggaggaattcaagaccagcc

SEQ ID NO: 24939 - DNA, 2941 bp, Homo sapiens
ggagcagctcgggactgaaccgagaggtgccgaaggaaccggcgggccgcttgatcccgctgcagacgtaggagatgcctgggacaaggaggccaccttctcagggcaaaagaaaaagaaggtgacaggcgttgagaccaccgaagggaacccatggctaggatcagtttttcctacctctgcccagcctcctggtacttcactgtgcccacagtgagtccatttctccgtcagcgggtggcattcctgggactcttcttcatatcctgtctccttttacttatgttaatcatagactttcgacattggagtgcttcattaccacgagataggcaatacgaaaggtatttggctcgagtaggggagcttgaagctactgacactgaagacccaaatctgaattatggacttgttgttgactgtggcagcagtggttcccggatttttgtttatttctggccaagacataatgggaacccccatgacttgctggacatcaaacagatgagagaccgcaacagccaaccagtggttaaaaaaatcaagccaggaatctctgcaatggcagacactccagaacatgccagtgattaccttcgtcctctgctgagctttgctgctgctcatgtgcctgtgaagaagcacaaggagacccctctttacatcctctgcacagcaggcatgaggcttctccctgagaggaagcagttggctatcttggctgacctagtgaaagatttacccctggagtttgacttcctcttttcacagtctcaagcagaagtgatctctgggaagcaggaaggggtttatgcatggattggaatcaactttgttttgggaagattcgaccacgaggatgaatcagatgctgaggctacccaggaattggcagcaggacggagaaggacagtagggatactggatatgggaggagcctctctccaaattgcttatgaagttcctacctcaacctctgtccttcctgcaaagcaggaagaagctgccaagatcctgctggctgagttcaacctgggctgtgatgtgcaacacactgaacacgtgtacagggtttatgtcacaacttttctgggtttcggaggcaactttgcccggcagcgctacgaagaccttgttctgaatgaaactcttaacaaaaacagattgcttggtcagaagacaggtctgagtcccgacaatccatttctggatccctgcctgccagtgggactcacagatgtggtggagaggaacagccaagtcttacatgtccgaggaagaggagactgggtgtcttgtggggcaatgctgagccccctgctggctcgctccaacaccagccaggcctcactcaatggcatatatcaatcgcctattgacttcaacaacagcgagttctacggcttctctgagtttttttattgtacagaggatgtgttgcgcattggtggccgctaccatgggccaacatttgccaaggctgctcaggattactgtggcatggcttggtcggtactaactcagagattcaagaatggcctcttttcatcacatgcagatgagcatcgactcaaatatcagtgttttaaatcggcttggatgtaccaagtcttacatgaaggattccactttccctatgactacccaaacctgcggacagcccagctggtgtatgaccgagaggttcagtggacgctgggagccattctatataaaacacgattcttaccactcagggatcttcggcaggaaggtgtccgacaagcccatggtagctggttccgtctctcctttgtatacaaccactatctcttctttgcctgtatcctggtggtgctactggccatcttcctataccttctgcggctacgccgaattcaccaccgacaaacacgagcctcagctccattggacttgctgtggcttgaagaggtggtgcccatgatgggagtacaggtggggccgtgaggctggaccaggactagagaagcttgagcacccccgagttgctgctcattgaattcctccactttcttatatagcctcagatgctgtgataattccttctccgtacccaggtcttctctgagagaagctataatttaatctgtgaggaactaaatgacaggagattggtgctaatacgggggaccaagctttgtccaagtgaagcaggcttcgactccttctgagaggtctggtgtgttcctagaatctcaccttttcttcccttgctaaagcatgaagtttggcatttggcacactggaagcctggttgaaatgaaatttgtagcatctgatacaaagccagagacattctagcaagtgcagcagccccttctttctctgtaacagagatatcatttatgtggagatccacaacctttaacagggatccaagatctttgcagttcaatcgaccacataggaatttccaggcaccaaaatgatataacttccttgcttccttgacaaagaagccatcatgggtgtgatccaagatccctgtcgtagtgttgatgatgttagtacatgattttaaaggttagaaccccttctaaatgaatggtctgtggaagattttagtatcttatctgatgcctggtatgatgaggatagaaaatttttccatttttatgtgcctcacaggctgtttgggcattaattttgctttttgagccttaagtgtgttagtaggatggagaaactgtgatgggggactgggaacctggatttgtctgattttaggtcactgttccctgggcctgtttttgtgagcccttacacaggaagatataaagagagttctttcatttccctgctaaaatcagtatgtagtatggggaatgtatttgggttgtttttaaagaaaaggggaacagaatcaggagagtgggcaaaggcaataaaatcaaagtttttattaattatttctgagaaa

SEQ ID NO: 24940 - DNA, 475 bp, Homo sapiens
tttcgatatcttcgtgacattcagatgatttatacttcttagacatttgttatacaattaatttctattcattgaggaaatttagaagatgcaaataattttaaaagggaaaaaaatcacaagatgaaagatttgaaattcctacattgagagtatggaataaaatactatgattactttttccaagaaaaagaggaaagagaagccctaagggagaggtgtatacatggcatagcagtagagaattaagtgagggcttttctgtttcttacttaggggtttatgcatggattggaatcaactttgttttgggaagattcgaccacgaggatggtgagtaatattgtctttttatgacagtttacctaagggctgaagatttaagttataacctatcagtagcatgtaaatgcaaattttgagttgtttttcttttttcaaacataagatgcttcattttccagtcctaatttgc

SEQ ID NO: 24941 - DNA, 2845 bp, Homo sapiens
tggtgttttatgtctggcttcttttatttagcaaaatgttttcaaggttcagccatctcgtggtatgggtatttcattcctttttaatggctgaacagcattccattgtatgaccaaccatgctgtattttgtttatccatttatcagctgatgaacatttcagtggttttccctttttggctattatgcacagtgctgctgtgaacattcatatacacatttttctatgtacataagtttttttgtttttttttttttttttgagatggggtttcactcttgtcactcaggctggagtgccatggcacgatctcggctcactgcactccagcctggtgacacagtgagactccgtctcaaaaaaaaaaagaaaagaaaaagaaaaggccacagaatagatcttatgatgatccacagagttccttaaatttatttttattaaaggattttttcctattaaaataacacattcccattgagggaattggaaaatacagaaaaatacatgtgagaaaatgatatctgtagtaattctacctcctatataactacagatagtgttttgggtttctaatttcatatttagttcttaatttagtgtctaatttgtaccttttagtgcagtcttgtcattttgtgtctttgtttaaaataatgctatgaggatgaaagaatgcttaagatgttttaaagagtagtcatagaaatgaagcctcgtgtattagcaatgtcatagctttctagaaggcaaccaaaactaaaattccctttttctcttggtattgtattataggaagaagctgccaagatcctgctggctgagttcaacctgggctgtgatgtgcaacacactgaacacgtgtacagggtttatgtcacaacttttctgggtttcggaggcaactttgcccggcagcgctacgaagaccttgttctgaatgaaactcttaacaaaaacagattgcttggtcagaagacaggtctgagtcccgacaatccatttctggatccctgcctgccagtgggactcacagatgtggtggagaggaacagccaagtcttacatgtccgaggaagaggagactgggtgtcttgtggggcaatgctgagccccctgctggctcgctccaacaccagccaggcctcactcaatggcatatatcaatcgcctattgacttcaacaacagcgagttctacggcttctctgagtttttttattgtacagaggatgtgttgcgcattggtggccgctaccatgggccaacatttgccaaggctgctcagctggtagcccacaagtaactttagaaatggaacagctgtgactgtggggaaggtagagagtttgcctccaaattcatgttgcactatttctctgtggttgatccaggattactgtggcatggcttggtcggtactaactcagagattcaagaatggcctcttttcatcacatgcagatgagcatcgactcaaatatcagtgttttaaatcggcttggatgtaccaagtcttacatgaaggattccactttccctatgactacccaaacctgcggacagcccagctggtgtatgaccgagaggttcagtggacgctgggagccattctatataaaacacgattcttaccactcagggatcttcggcaggaaggtgtccgacaagcccatggtagctggttccgtctctcctttgtatacaaccactatctcttctttgcctgtatcctggtggtgctactggccatcttcctataccttctgcggctacgccgaattcaccaccgacaaacacgagcctcagctccattggacttgctgtggcttgaagaggtggtgcccatgatgggagtacaggtggggccgtgaggctggaccaggactagagaagcttgagcacccccgagttgctgctcattgaattcctccactttcttatatagcctcagatgctgtgataattccttctccgtacccaggtcttctctgagagaagctataatttaatctgtgaggaactaaatgacaggagattggtgctaatacgggggaccaagctttgtccaagtgaagcaggcttcgactccttctgagaggtctggtgtgttcctagaatctcaccttttcttcccttgctaaagcatgaagtttggcatttggcacactggaagcctggttgaaatgaaatttgtagcatctgatacaaagccagagacattctagcaagtgcagcagccccttctttctctgtaacagagatatcatttatgtggagatccacaacctttaacagggatccaagatctttgcagttcaatcgaccacataggaatttccaggcaccaaaatgatataacttccttgcttccttgacaaagaagccatcatgggtgtgatccaagatccctgtcgtagtgttgatgatgttagtacatgattttaaaggttagaaccccttctaaatgaatggtctgtggaagattttagtatcttatctgatgcctggtatgatgaggatagaaaatttttccatttttatgtgcctcacaggctgtttgggcattaattttgctttttgagccttaagtgtgttagtaggatggagaaactgtgatgggggactgggaacctggatttgtctgattttaggtcactgttccctgggcctgtttttgtgagcccttacacaggaagatataaagagagttctttcatttccctgctaaaatcagtatgtagtatggggaatgtatttgggttgtttttaaagaaaaggggaacagaatcaggagagtgggcaaaggcaataaaatcaaagtttttattaattatttctgagaaa

SEQ ID NO: 24942 - DNA, 1445 bp, Homo sapiens
tggtgttttatgtctggcttcttttatttagcaaaatgttttcaaggttcagccatctcgtggtatgggtatttcattcctttttaatggctgaacagcattccattgtatgaccaaccatgctgtattttgtttatccatttatcagctgatgaacatttcagtggttttccctttttggctattatgcacagtgctgctgtgaacattcatatacacatttttctatgtacataagtttttttgtttttttttttttttttgagatggggtttcactcttgtcactcaggctggagtgccatggcacgatctcggctcactgcactccagcctggtgacacagtgagactccgtctcaaaaaaaaaaagaaaagaaaaagaaaaggccacagaatagatcttatgatgatccacagagttccttaaatttatttttattaaaggattttttcctattaaaataacacattcccattgagggaattggaaaatacagaaaaatacatgtgagaaaatgatatctgtagtaattctacctcctatataactacagatagtgttttgggtttctaatttcatatttagttcttaatttagtgtctaatttgtaccttttagtgcagtcttgtcattttgtgtctttgtttaaaataatgctatgaggatgaaagaatgcttaagatgttttaaagagtagtcatagaaatgaagcctcgtgtattagcaatgtcatagctttctagaaggcaaccaaaactaaaattccctttttctcttggtattgtattataggaagaagctgccaagatcctgctggctgagttcaacctgggctgtgatgtgcaacacactgaacacgtgtacagggtttatgtcacaacttttctgggtttcggaggcaactttgcccggcagcgctacgaagaccttgttctgaatgaaactcttaacaaaaacaggtacatttgatatgggatctgagtttctgaaatataatgtcaggctgcagatattagggagaaatactcacatcctcctaagacagataagtccctgcttcctccttctttctgactacccctgccaatggggtagcatctcttaaagacctctattagcagtcccactctgggtgagggtgcattctgatctttgttattaggactcataaagtacagtagcttattgtgatctcttgctgtttcccatattcagacctaacatcatgggaaaagggagatgaattaaattgccagtttaaaatgtacaatatatagtgtagctgctagcagttccttctgcatggaagtgttcaagacatgtttgttgaattacagtgcagttgcatcttttgtgagagttcagttctgtagtatgtctaaaagataaaaagcaagcatagttaaaattaacttttaaaatggtctctcatcaaattcataa

SEQ ID NO: 24943 - DNA, 1727 bp, Homo sapiens
tggtgttttatgtctggcttcttttatttagcaaaatgttttcaaggttcagccatctcgtggtatgggtatttcattcctttttaatggctgaacagcattccattgtatgaccaaccatgctgtattttgtttatccatttatcagctgatgaacatttcagtggttttccctttttggctattatgcacagtgctgctgtgaacattcatatacacatttttctatgtacataagtttttttgtttttttttttttttttgagatggggtttcactcttgtcactcaggctggagtgccatggcacgatctcggctcactgcactccagcctggtgacacagtgagactccgtctcaaaaaaaaaaagaaaagaaaaagaaaaggccacagaatagatcttatgatgatccacagagttccttaaatttatttttattaaaggattttttcctattaaaataacacattcccattgagggaattggaaaatacagaaaaatacatgtgagaaaatgatatctgtagtaattctacctcctatataactacagatagtgttttgggtttctaatttcatatttagttcttaatttagtgtctaatttgtaccttttagtgcagtcttgtcattttgtgtctttgtttaaaataatgctatgaggatgaaagaatgcttaagatgttttaaagagtagtcatagaaatgaagcctcgtgtattagcaatgtcatagctttctagaaggcaaccaaaactaaaattccctttttctcttggtattgtattataggaagaagctgccaagatcctgctggctgagttcaacctgggctgtgatgtgcaacacactgaacacgtgtacagggtttatgtcacaacttttctgggtttcggaggcaactttgcccggcagcgctacgaagaccttgttctgaatgaaactcttaacaaaaacagattgcttggtcagaagacaggtctgagtcccgacaatccatttctggatccctgcctgccagtgggactcacagatgtggtggagaggaacagccaagtcttacatgtccgaggaagaggagactgggtgtcttgtggggcaatgctgagccccctgctggctcgctccaacaccagccaggcctcactcaatggcatatatcaatcgcctattgacttcaacaacagcgagttctacggcttctctgagtttttttattgtacagaggatgtgttgcgcattggtggccgctaccatgggccaacatttgccaaggctgctcaggattactgtggcatggcttggtcggtactaactcagagattcaagaatggcctcttttcatcacatgcagatgagcatcgactcaaatatcagtgttttaaatcggcttggatgtaccaagtcttacatgaaggattccactttccctatgactacccaaacctgcggacagcccagctggtgtatgaccgagaggttcagtggacgctgggagccattctatataaaacacgattcttaccactcagatgtggaattattcagtggttgtctactgtatcaatatttcaacccaatttggcttctctgtgggaatgactgccaagacaacacgtccagtccttactgggatctagctactagctccaagtacctaatggatgattcgacttaagagtcctgctgtcatctcaaacttttctccaggaacagcttactcag

SEQ ID NO: 24944 - DNA, 494 bp, Homo sapiens
aagaggtggtgcccatgatgggagtacaggtggggccgtgaggctggaccaggactagagaagcttgagcacccccgagttgctgctcattgaattcctccactttcttatatagcctcagatgctgtgatgtctgaccttgtggatatttgcccttggaatttctactttactttctaccgtaattccttctccgtacccaggtcttctctgagagaagctataatttaatctgtgaggaactaaatgacaggagattggtgctaatacgggggaccaagctttgtccaagtgaagcaggcttcgactccttctgagaggtctggtgtgttcctagaatctcaccttttcttcccttgctaaagcatgaagtttggcatttggcacactggaagcctggttgaaatgaaatttgtagcatctgatacaaagccagagacattctagcaagtgcagcagccccttctttctctgtaacagagatatcatttatg

SEQ ID NO: 24945 - DNA, 2739 bp, Homo sapiens
tggtgttttatgtctggcttcttttatttagcaaaatgttttcaaggttcagccatctcgtggtatgggtatttcattcctttttaatggctgaacagcattccattgtatgaccaaccatgctgtattttgtttatccatttatcagctgatgaacatttcagtggttttccctttttggctattatgcacagtgctgctgtgaacattcatatacacatttttctatgtacataagtttttttgtttttttttttttttttgagatggggtttcactcttgtcactcaggctggagtgccatggcacgatctcggctcactgcactccagcctggtgacacagtgagactccgtctcaaaaaaaaaaagaaaagaaaaagaaaaggccacagaatagatcttatgatgatccacagagttccttaaatttatttttattaaaggattttttcctattaaaataacacattcccattgagggaattggaaaatacagaaaaatacatgtgagaaaatgatatctgtagtaattctacctcctatataactacagatagtgttttgggtttctaatttcatatttagttcttaatttagtgtctaatttgtaccttttagtgcagtcttgtcattttgtgtctttgtttaaaataatgctatgaggatgaaagaatgcttaagatgttttaaagagtagtcatagaaatgaagcctcgtgtattagcaatgtcatagctttctagaaggcaaccaaaactaaaattccctttttctcttggtattgtattataggaagaagctgccaagatcctgctggctgagttcaacctgggctgtgatgtgcaacacactgaacacgtgtacagggtttatgtcacaacttttctgggtttcggaggcaactttgcccggcagcgctacgaagaccttgttctgaatgaaactcttaacaaaaacagattgcttggtcagaagacaggtctgagtcccgacaatccatttctggatccctgcctgccagtgggactcacagatgtggtggagaggaacagccaagtcttacatgtccgaggaagaggagactgggtgtcttgtggggcaatgctgagccccctgctggctcgctccaacaccagccaggcctcactcaatggcatatatcaatcgcctattgacttcaacaacagcgagttctacggcttctctgagtttttttattgtacagaggatgtgttgcgcattggtggccgctaccatgggccaacatttgccaaggctgctcaggattactgtggcatggcttggtcggtactaactcagagattcaagaatggcctcttttcatcacatgcagatgagcatcgactcaaatatcagtgttttaaatcggcttggatgtaccaagtcttacatgaaggattccactttccctatgactacccaaacctgcggacagcccagctggtgtatgaccgagaggttcagtggacgctgggagccattctatataaaacacgattcttaccactcagggatcttcggcaggaaggtgtccgacaagcccatggtagctggttccgtctctcctttgtatacaaccactatctcttctttgcctgtatcctggtggtgctactggccatcttcctataccttctgcggctacgccgaattcaccaccgacaaacacgagcctcagctccattggacttgctgtggcttgaagaggtggtgcccatgatgggagtacaggtggggccgtgaggctggaccaggactagagaagcttgagcacccccgagttgctgctcattgaattcctccactttcttatatagcctcagatgctgtgataattccttctccgtacccaggtcttctctgagagaagctataatttaatctgtgaggaactaaatgacaggagattggtgctaatacgggggaccaagctttgtccaagtgaagcaggcttcgactccttctgagaggtctggtgtgttcctagaatctcaccttttcttcccttgctaaagcatgaagtttggcatttggcacactggaagcctggttgaaatgaaatttgtagcatctgatacaaagccagagacattctagcaagtgcagcagccccttctttctctgtaacagagatatcatttatgtggagatccacaacctttaacagggatccaagatctttgcagttcaatcgaccacataggaatttccaggcaccaaaatgatataacttccttgcttccttgacaaagaagccatcatgggtgtgatccaagatccctgtcgtagtgttgatgatgttagtacatgattttaaaggttagaaccccttctaaatgaatggtctgtggaagattttagtatcttatctgatgcctggtatgatgaggatagaaaatttttccatttttatgtgcctcacaggctgtttgggcattaattttgctttttgagccttaagtgtgttagtaggatggagaaactgtgatgggggactgggaacctggatttgtctgattttaggtcactgttccctgggcctgtttttgtgagcccttacacaggaagatataaagagagttctttcatttccctgctaaaatcagtatgtagtatggggaatgtatttgggttgtttttaaagaaaaggggaacagaatcaggagagtgggcaaaggcaataaaatcaaagtttttattaattatttctgagaaa

SEQ ID NO: 24946 - DNA, 1614 bp, Homo sapiens
tgggactgcccaggccagcttgaaactagggcaggcctactgcttgggtctgcagggcctagcctggcaccagggttaactggagaaggcctgatactggggttcactatgaactcattgctcgatccattcttctccccacatgctaaaggtatcattctccatgttgtgctgcatggttttcggggaaggttgatgcaggtaatataaaactgtcctccttaccatctgctgtgcatcttttcttattctcgtgcttcgctcaagtgctgtaatctttcacctgcattccttagagcatggtaaggtattttctggtgcggatggttgttcaaatggatatttttgtgaagggaaactcctattccaccatgttgctgatgatacccctcttcttatttaattatttttaaatcatgcagcttaaaatactgaacatctggatacctccccaaatcaacataggtcatgttcagtaaatttaagcatgcttgtgttagacagcagcttacatttagaattttttttaattgaagacataattttaaaatactttgctttaaatacattgaaactttttgaaacattttcaaagatattacaccaacatttatttaaacagaatctataaaaatcatatgcattttaaaatttgtttggtttataatagaagtacaagctcaaaaagtcgcattcccagggtccaatatctggcttggtgacttgcttattgtgtggctttggacaattggcttacctctgtgcatgttctcttatctgtaggataggggtaattgtagctacataatggagtttaagtaaggaggggttgacataggtcaagctcatgaaacagtagctggcacacagtaagtgttccaagaatgttggctcatactactagctttttttttttttttttttttgagacggattctcactctattgcccaggctggggtgcactggtgtgatctcggctcactgcagcttccacctccctggttcaagcagttcccctgcctcagccccctgagtagctgggattgcaggcacacaccaccatgcccaggtgatttttttgcatttttattagagatggggtttcacaatgttggtcaggctggtcttgaactgctaaccttgtgatctgcccagcttggcctcccaaagtactgggattgcaggcatgagccaccgcgcccagcccatactactagttttaactcaagtttgtcaaaccattgaaagggagagtttattaaataatttgaaaaattaattgtctaataagagtggtacagttacaattcagtgtccattctcaggagatgctaagtagcactggtcatagactcttgcctgaaaaagttgcccctaaaaaccacacagtcaaaacagccaacaagcaacaacaacaaaaacaaaacaaaaatgcaccccaactgcaaacaaacaaaaaacaaaagacaaaaaactattccacaggcagcctgatatggagtaatagtgcaaaacaggagaaaataaaatccaaaacacagaaagccttcctttttaattcactcatttgaatatttaaagcaagttagatttgagtgactgcaaaaaaaaa

SEQ ID NO: 24947 - DNA, 3180 bp, Homo sapiens
ggcgggaggagcgcgcgcgggtgctaattggcccgggcggcggccccgcccgcgagtggtgagcggtcacgtgacgcgacggctgggggctcccggcgcgggggacgctggtgaccaagatggcggcggagctggtggaggccaaaaacatggtgatgagttttcgagtctccgaccttcagatgctcctgggtttcgtgggccggagtaagagtggactgaagcacgagctcgtcaccagggccctccagctggtgcagtttgactgtagccctgagctgttcaagaagatcaaggagctgtacgagacccgctacgccaagaagaactcggagcctgccccacagccgcaccggcccctggaccccctgaccatgcactccacctacgaccgggccggcgctgtgcccaggactccgctggcaggccccaatattgactaccccgtgctctacggaaagtacttaaacggactgggacggttgcccgccaagaccctcaagccagaagtccgcctggtgaagctgccgttctttaatatgctggatgagctgctgaagcccaccgaattagtcccacagaacaacgagaagcttcaggagagcccgtgcatcttcgcattgacgccaagacaggtggagttgatccggaactccagggaactgcagcccggagttaaagccgtgcaggtcgtcctgagaatctgttactcagacaccagctgccctcaggaggaccagtacccgcccaacatcgctgtgaaggtcaaccacagctactgctccgtcccgggctactacccctccaataagcccggggtggagcccaagaggccgtgccgccccatcaacctcactcacctcatgtacctgtcctcggccaccaaccgcatcactgtcacctgggggaactacggcaagagctactcggtggccctgtacctggtgcggcagctgacctcatcggagctgctgcagaggctgaagaccattggggtaaagcacccggagctgtgcaaggcactggtcaaggagaagctgcgccttgatcctgacagcgagatcgccaccaccggtgtgcgggtgtccctcatctgtccgctggtgaagatgcggctctccgtgccctgccgggcagagacctgcgcccacctgcagtgcttcgacgccgtcttctacctgcagatgaacgagaagaagcccacctggatgtgccccgtgtgcgacaagccagccccctacgaccagctcatcatcgacgggctcctctcgaagatcctgagcgagtgtgaggacgccgacgagatcgagtacctggtggacggctcgtggtgcccgatccgcgccgaaaaggagcgcagctgcagcccgcagggcgccatcctcgtgctgggcccctcggacgccaatgggctcctgcccgcccccagcgtcaacgggagcggtgccctgggcagcacgggtggcggcggcccggtgggcagcatggagaatgggaagccgggcgccgatgtggtggacctcacgctggacagctcatcgtcctcggaggatgaggaggaggaggaagaggaggaggaagacgaggacgaagaggggccccggcccaagcgccgctgccccttccagaagggcctggtgccggcctgctgaccccggccgcacactcgactttcctggtgctcaccacgcagaggggcacgggccagcctcgggcgcagagggaggagtgacctttctttttctttttattgtcgttcgttttgtttttccacccttttgcctggctcctggcacctgtacctctggactctcctatcgggggattaaaaaaaaaagtaaaatgacaaaaaaagatacaaaaaagaaaaatgaaacaaaaaagtcaaactcttaaaaacaaggccggccacccacacagccgcctccccggctggagtccgagccgggaaggggtagtgggcgggagggaccaggacgccgccccgcgccctcccctccggatgccccgccgcccgccgccctctgcccacgaccattccagccagtgcgcggggacccgggcggcgggcggtggggcgcagcccctctctggcgaccactttgacgtttgtctcttcctttgctttttctctgcaaatgcatcctcgcccagagaccctcacgcgccgagcagcgagcgttttagccgagaagccatggagtgggttggggcggggaggggcagtagggtggggggatgggtgggcaggatgggggtacagtgggcggctggggagggtttagccacagatgtgttgtattttttgaaagtgcaataatttggtattttgaagacccggcgtgtggtcaggaacccccggggaaggcgggggcccagggtgcggcaccgtgtggcgtgggggggtctcagttttctagccagctacctcggtaattccaattcaggttaacttccctacggaacagcacagatgtccacagatgtccacagctgccgccgccgccgccgccaccataccccggtccttggggcatgggttgcggtcgcttcccaaggggcagcagggaccccggccaccccggctctcggtttgggttgattcctctcctttttgctcttggttttccgacgggtacgaggctggcccggcaccctgtcccccgggagcctcactcttccagcaggaccagaccaggggcctccttcctgtccccaggcgttcccggcccctcgcaggccccacccatgcccttggcctcagggtccaacaactgggggagctaccagggctctgccttcaggagcccacagctgggcaccccccttgccccccaggagaccggggcgcaggcggggcaccggcctcacctggttctccaacaccgctgcctgcggtctgttttgcttttgtcctccccagcccagaattttcctttgtataaacagaactcctagtcaggaagcaatatcatttcaggtctaaagaaagggacgtgcatctggccgagggcagttcagtctcactgcagagcccgcagcccgctgcgcagctcggcccctcccgcccgcacgggcagctgaaggccgctgttttctaatatttgtattctaatttaattgtttttaaaaaatgcaaataaaaaaggtcgaggtgaagccaaccaggcgtccgctttt

SEQ ID NO: 24948 - DNA, 366 bp, Homo sapiens
ttttttttttaaaaacaattaaattagaatacaaatattagaaaacaccggcctcacctggttctccaacaccgctgcctgcggtctgttttgcttttgtcctccccagcccagaattttcctttgtataaacagaactcctagtcaggaagcaatatcatttcaggtctaaagaaagggacgtgcatctggccgagggcagttcagtctcactgcagagcccgcagcccgctgcgcagctcggcccctcccgcccgcacgggcagctgaaggccgctgttttctaatatttgtattctaatttaattgtttttaaaaaatgcaaataaaaaaggtcgaggtgaagccaaccaggcgtccgctttt

SEQ ID NO: 24949 - DNA, 1860 bp, Homo sapiens
ggcgggaggagcgcgcgcgggtgctaattggcccgggcggcggccccgcccgcgagtggtgagcggtcacgtgacgcgacggctgggggctcccggcgcgggggacgctggtgaccaagatggcggcggagctggtggaggccaaaaacatggtgatgagttttcgagtctccgaccttcagatgctcctgggtttcgtgggccggagtaagagtggactgaagcacgagctcgtcaccagggccctccagctggtgcagtttgactgtagccctgagctgttcaagaagatcaaggagctgtacgagacccgctacgccaagaagaactcggagcctgccccacagccgcaccggcccctggaccccctgaccatgcactccacctacgaccgggccggcgctgtgcccaggactccgctggcaggccccaatattgactaccccgtgctctacggaaagtacttaaacggactgggacggttgcccgccaagaccctcaagccagaagtccgcctggtgaagctgccgttctttaatatgctggatgagctgctgaagcccaccgaattagtcccacagaacaacgagaagcttcaggagagcccgtgcatcttcgcattgacgccaagacaggtggagttgatccggaactccagggaactgcagcccggagttaaagccgtgcaggtcgtcctgagaatctgttactcagacaccagctgccctcaggaggaccagtacccgcccaacatcgctgtgaaggtcaaccacagctactgctccgtcccgggctactacccctccaataagcccggggtggagcccaagaggccgtgccgccccatcaacctcactcacctcatgtacctgtcctcggccaccaaccgcatcactgtcacctgggggaactacggcaagagctactcggtggccctgtacctggtgcggcagctgacctcatcggagctgctgcagaggctgaagaccattggggtaaagcacccggagctgtgcaaggcactggtcaaggagaagctgcgccttgatcctgacagcgagatcgccaccaccggtgtgcgggtgtccctcatctgtccgctggtgaagatgcggctctccgtgccctgccgggcagagacctgcgcccacctgcagtgcttcgacgccgtcttctacctgcagatgaacgagaagaagcccacctggatgtgccccgtgtgcgacaagccagccccctacgaccagctcatcatcgacgggctcctctcgaagatcctgagcgagtgtgaggacgccgacgagatcgagtacctggtggacggctcgtggtgcccgatccgcgccgaaaaggagcgcagctgcagcccgcagggcgccatcctcgtgctgggcccctcggacgccaatgggctcctgcccgcccccagcgtcaacgggagcggtgccctgggcagcacgggtggcggcggcccggtgggcagcatggagaatgggaagccgggcgccgatgtggtggacctcacgctggacagctcatcgtcctcggaggatgaggaggaggaggaagaggaggaggaagacgaggacgaagaggggccccggcccaagcgccgctgccccttccagaagggcctggtgccggcctgctgaccccggccgcacactcgactttcctggtgctcaccacgcagaggggcacgggccagcctcgggcgcagagggaggagtgacctttctttttctttttattgtcgttcgttttgtttttccacccttttgcctggctcctggcacctgtacctctggactctcctatcgggggattaaaaaaaaaagtaaaatgacaaaaaaagataca

SEQ ID NO: 24950 - DNA, 2191 bp, Homo sapiens
cgcggtttgtacgggtgctttacccaatggtctcacctctgcagcagctccgatgaggtcagctgccgcaccaggtacaggtccaccgagtagctcttgccgtagtcccccctggtgaagatgcggctctccgtgccctgccgggcagagacctgcgcccacctgcagtgcttcgacgccgtcttctacctgcagatgaacgagaagaagcccacctggatgtgccccgtgtgcgacaagccagccccctacgaccagctcatcatcgacgggctcctctcgaagatcctgagcgagtgtgaggacgccgacgagatcgagtacctggtggacggctcgtggtgcccgatccgcgccgaaaaggagcgcagctgcagcccgcagggcgccatcctcgtgctgggcccctcggacgccaatgggctcctgcccgcccccagcgtcaacgggagcggtgccctgggcagcacgggtggcggcggcccggtgggcagcatggagaatgggaagccgggcgccgatgtggtggacctcacgctggacagctcatcgtcctcggaggatgaggaggaggaggaagaggaggaggaagacgaggacgaagaggggccccggcccaagcgccgctgccccttccagaagggcctggtgccggcctgctgaccccggccgcacactcgactttcctggtgctcaccacgcagaggggcacgggccagcctcgggcgcagagggaggagtgacctttctttttctttttattgtcgttcgttttgtttttccacccttttgcctggctcctggcacctgtacctctggactctcctatcgggggattaaaaaaaaaagtaaaatgacaaaaaaagatacaaaaaagaaaaatgaaacaaaaaagtcaaactcttaaaaacaaggccggccacccacacagccgcctccccggctggagtccgagccgggaaggggtagtgggcgggagggaccaggacgccgccccgcgccctcccctccggatgccccgccgcccgccgccctctgcccacgaccattccagccagtgcgcggggacccgggcggcgggcggtggggcgcagcccctctctggcgaccactttgacgtttgtctcttcctttgctttttctctgcaaatgcatcctcgcccagagaccctcacgcgccgagcagcgagcgttttagccgagaagccatggagtgggttggggcggggaggggcagtagggtggggggatgggtgggcaggatgggggtacagtgggcggctggggagggtttagccacagatgtgttgtattttttgaaagtgcaataatttggtattttgaagacccggcgtgtggtcaggaacccccggggaaggcgggggcccagggtgcggcaccgtgtggcgtgggggggtctcagttttctagccagctacctcggtaattccaattcaggttaacttccctacggaacagcacagatgtccacagatgtccacagctgccgccgccgccgccgccaccataccccggtccttggggcatgggttgcggtcgcttcccaaggggcagcagggaccccggccaccccggctctcggtttgggttgattcctctcctttttgctcttggttttccgacgggtacgaggctggcccggcaccctgtcccccgggagcctcactcttccagcaggaccagaccaggggcctccttcctgtccccaggcgttcccggcccctcgcaggccccacccatgcccttggcctcagggtccaacaactgggggagctaccagggctctgccttcaggagcccacagctgggcaccccccttgccccccaggagaccggggcgcaggcggggcaccggcctcacctggttctccaacaccgctgcctgcggtctgttttgcttttgtcctccccagcccagaattttcctttgtataaacagaactcctagtcaggaagcaatatcatttcaggtctaaagaaagggacgtgcatctggccgagggcagttcagtctcactgcagagcccgcagcccgctgcgcagctcggcccctcccgcccgcacgggcagctgaaggccgctgttttctaatatttgtattctaatttaattgtttttaaaaaatgcaaataaaaaaggtcgaggtgaagccaaccaggcgtccgctttt

SEQ ID NO: 24951 - DNA, 1070 bp, Homo sapiens
ggcgggaggagcgcgcgcgggtgctaattggcccgggcggcggccccgcccgcgagtggtgagcggtcacgtgacgcgacggctgggggctcccggcgcgggggacgctggtgaccaagatggcggcggagctggtggaggccaaaaacatggtgatgagttttcgagtctccgaccttcagatgctcctgggtttcgtgggccggagtaagagtggactgaagcacgagctcgtcaccagggccctccagctggtgcagtttgactgtagccctgagctgttcaagaagatcaaggagctgtacgagacccgctacgccaagaagaactcggagcctgccccacagccgcaccggcccctggaccccctgaccatgcactccacctacgaccgggccggcgctgtgcccaggactccgctggcaggccccaatattgactaccccgtgctctacggaaagtacttaaacggactgggacggttgcccgccaagaccctcaagccagaagtccgcctggtgaagctgccgttctttaatatgctggatgagctgctgaagcccaccgaattagtcccacagaacaacgagaagcttcaggagagcccgtgcatcttcgcattgacgccaagacaggtggagttgatccggaactccagggaactgcagcccggagttaaagccgtgcaggtcgtcctgagaatctgttactcagacaccagctgccctcaggaggaccagtacccgcccaacatcgctgtgaaggtcaaccacagctactgctccgtcccgggctactacccctccaataagcccggggtggagcccaagaggccgtgccgccccatcaacctcactcacctcatgtacctgtcactcgactttcctggtgctcaccacgcagaggggcacgggccagcctcgggcgcagagggaggagtgacctttctttttctttttattgtcgttcgttttgtttttccacccttttgcctggctcctggcacctgtacctctggactctcctatcgggggattaaaaaaaaaagtaaaatgacaaaaaaagataca

SEQ ID NO: 24952 - DNA, 3054 bp, Homo sapiens
cccacgcgtcggaggccaaaaacatggtgatgagttttcgagtctccgaccttcagatgctcctgggtttcgtgggccggagtaagagtggactgaagcacgagctcgtcaccagggccctccagctggtgcagtttgactgtagccctgagctgttcaagaagatcaaggagctgtacgagacccgctacgccaagaagaactcggagcctgccccacagccgcaccggcccctggaccccctgaccatgcactccacctacgaccgggccggcgctgtgcccaggactccgctggcaggccccaatattgactaccccgtgctctacggaaagtacttaaacggactgggacggttgcccgccaagaccctcaagccagaagtccgcctggtgaagctgccgttctttaatatgctggatgagctgctgaagcccaccgaattagtcccacagaacaacgagaagcttcaggagagcccgtgcatcttcgcattgacgccaagacaggtggagttgatccggaactccagggaactgcagcccggagttaaagccgtgcaggtcgtcctgagaatctgttactcagacaccagctgccctcaggaggaccagtacccgcccaacatcgctgtgaaggtcaaccacagctactgctccgtcccgggctactacccctccaataagcccggggtggagcccaagaggccgtgccgccccatcaacctcactcacctcatgtacctgtcctcggccaccaaccgcatcactgtcacctgggggaactacggcaagagctactcggtggccctgtacctggtgcggcagctgacctcatcggagctgctgcagaggctgaagaccattggggtaaagcacccggagctgtgcaaggcactggtcaaggagaagctgcgccttgatcctgacagcgagatcgccaccaccggtgtgcgggtgtccctcatctgtccgctggtgaagatgcggctctccgtgccctgccgggcagagacctgcgcccacctgcagtgcttcgacgccgtcttctacctgcagatgaacgagaagaagcccacctggatgtgccccgtgtgcgacaagccagccccctacgaccagctcatcatcgacgggctcctctcgaagatcctgagcgagtgtgaggacgccgacgagatcgagtacctggtggacggctcgtggtgcccgatccgcgccgaaaaggagcgcagctgcagcccgcagggcgccatcctcgtgctgggcccctcggacgccaatgggctcctgcccgcccccagcgtcaacgggagcggtgccctgggcagcacgggtggcggcggcccggtgggcagcatggagaatgggaagccgggcgccgatgtggtggacctcacgctggacagctcatcgtcctcggaggatgaggaggaggaggaagaggaggaggaagacgaggacgaagaggggccccggcccaagcgccgctgccccttccagaagggcctggtgccggcctgctgaccccggccgcacactcgactttcctggtgctcaccacgcagaggggcacgggccagcctcgggcgcagagggaggagtgacctttctttttctttttattgtcgttcgttttgtttttccacccttttgcctggctcctggcacctgtacctctggactctcctatcgggggattaaaaaaaaaagtaaaatgacaaaaaaagatacaaaaaagaaaaatgaaacaaaaaagtcaaactcttaaaaacaaggccggccacccacacagccgcctccccggctggagtccgagccgggaaggggtagtgggcgggagggaccaggacgccgccccgcgccctcccctccggatgccccgccgcccgccgccctctgcccacgaccattccagccagtgcgcggggacccgggcggcgggcggtggggcgcagcccctctctggcgaccactttgacgtttgtctcttcctttgctttttctctgcaaatgcatcctcgcccagagaccctcacgcgccgagcagcgagcgttttagccgagaagccatggagtgggttggggcggggaggggcagtagggtggggggatgggtgggcaggatgggggtacagtgggcggctggggagggtttagccacagatgtgttgtattttttgaaagtgcaataatttggtattttgaagacccggcgtgtggtcaggaacccccggggaaggcgggggcccagggtgcggcaccgtgtggcgtgggggggtctcagttttctagccagctacctcggtaattccaattcaggttaacttccctacggaacagcacagatgtccacagatgtccacagctgccgccgccgccgccgccaccataccccggtccttggggcatgggttgcggtcgcttcccaaggggcagcagggaccccggccaccccggctctcggtttgggttgattcctctcctttttgctcttggttttccgacgggtacgaggctggcccggcaccctgtcccccgggagcctcactcttccagcaggaccagaccaggggcctccttcctgtccccaggcgttcccggcccctcgcaggccccacccatgcccttggcctcagggtccaacaactgggggagctaccagggctctgccttcaggagcccacagctgggcaccccccttgccccccaggagaccggggcgcaggcggggcaccggcctcacctggttctccaacaccgctgcctgcggtctgttttgcttttgtcctccccagcccagaattttcctttgtataaacagaactcctagtcaggaagcaatatcatttcaggtctaaagaaagggacgtgcatctggccgagggcagttcagtctcactgcagagcccgcagcccgctgcgcagctcggcccctcccgcccgcacgggcagctgaaggccgctgttttctaatatttgtattctaatttaattgtttttaaaaaatgcaaataaaaaaggtcgaggtgaagccaaccaggcgtccgctttt

SEQ ID NO: 24953 - DNA, 443 bp, Homo sapiens
cttaccttaacctagagaattagaagagcgctcaggagctaggccgtattatgagtaaattgtctttgtcttcataattgtactttttcttcagagcttcttttgtgtctttatgggatgtgccaacagagcttatgaagtcaaatcttacagataagaaggaagagtctgggaaaaccaggatgattgattaccctatctacaaaccgattttgaccatttccagggtttgttgtctgtaaccattgcattaattcaatagtaaaaattatcaaccaaagacaatacctaaactaagcatcacacaaaattgtctccacaatagctttatgtagagagaaaccaatgtgcaaggtatcaatggcacctggtgtctatactatgagaatagatatagggaagatcatgcacaggttaaaagcctgatgttttgagctaaaaaa

SEQ ID NO: 24954 - DNA, 533 bp, Homo sapiens
gtgatatatttattcttaacatttatctaaggccaaatagaagctgtatagggacttgacttttcagatcactgctcctttcctgaggcttgtactgtgcagccaaaatcacttcttactggacacctcatcagaaaacatgccaagtgaccaaggagttactttagagggttggagagaaagattttcaaggaaaaattttatttacccttgtttctgcctccttcatttttgcccttttgggttaaaagaaatacctgactcttgattgaaatatatatgtatatattaaatactatcatatataatcatatatttataattttctatatagtattactacatgaaaattagcctgtatttcatgtgtgaccagcagacaaccttaagataaatgtctttaaataagtctggttgaagatttagagcaggagtgtccagtcgtttgtcttccctgggccacactgggagaagaactgtctcgggccacacataaaatacattaacacgaacaacagctgatgacctgaaaa

SEQ ID NO: 24955 - DNA, 338 bp, Homo sapiens
agcctgcctgggtttcatagtggaagagctagacctgtagctagctcttggttgtggaggtcccatctgtttgagagatcatctgctttaagctagatttctttattttgaagccaggcaacacatttatttaggtggttatgctaaagctatgtgttatttttcttccttcccttgcccgtttgacctgctgttgactctgtctgatttttgtccctctaaggagtgaaagcaatggcccatttttgtatttcaattacagaaactatttttcttcctactgaaaagagaacagaatgaatattcaataaaataagcactcttgtgaagttaactaa

SEQ ID NO: 24956 - DNA, 416 bp, Homo sapiens
ccaattttgcccagatgaatctttccgacttcaaggatgcaagggatccaatgtaatcatctgttactgactggctgttggtcttatcaagaagtagcaccattttggggattgagcattgctctgttgctggcagattagttattcagctgtggctaaatgtgccatcccaattcaccatcagtgtgcatattaagagtttcagtgttactgaatgccaagaactattatcacaccatctatttcaagtggtgaggtcctcattgccagctatcatgaagtgatctagtgtctcttttcctggacaacttctgattttaatggttgtttgttcagtacctcggtaatagactctgagatggagatttgcatacaagcaatttattagagtgtgtttccaggaacaattgtaatgg

SEQ ID NO: 24957 - DNA, 511 bp, Homo sapiens
ttccaggagaagaagagcagatgtgtactctgtagaagaaaaattcaaagccctagatattaatcagtatggttactgaacaagaacttaaaataagtatatcagttccatcaagataaagccctctgttgagaataaaagatcacaaaatcttggattcaaaactggggaaaaagctgatttcactattctttctgaggtgcccatgaacaaatcacctgacatctcttctgagggcctcaatttaagtctgtgaaaaatggggttgacagccccatcccttcacacatctcacagttaactaaatgaagtgatatgacagtgaaagcatcagagaactctaagagactgtaaagatggtggggggcagggtcagtgtggtaagaatatcattctaggcaaagtccagcctgtacatgttgaacatcatatctctagagggatggtttaggcctgaaacccttcttctatctctgagagactcaaaatgctcatatgattataaaaaaca

SEQ ID NO: 24958 - DNA, 1367 bp, Homo sapiens
  misc_feature (54)..(54): n is a, c, g, or t
  misc_feature (56)..(56): n is a, c, g, or t
  misc_feature (60)..(62): n is a, c, g, or t
  misc_feature (64)..(64): n is a, c, g, or t
  misc_feature (1334)..(1335): n is a, c, g, or t
  misc_feature (1339)..(1343): n is a, c, g, or t
  misc_feature (1347)..(1347): n is a, c, g, or t
  misc_feature (1352)..(1352): n is a, c, g, or t
  misc_feature (1358)..(1358): n is a, c, g, or t
  misc_feature (1360)..(1360): n is a, c, g, or t
  misc_feature (1362)..(1362): n is a, c, g, or t
  misc_feature (1367)..(1367): n is a, c, g, or t
gcacaattcagaggtaacagcgcctgcgttttctccatgataacatagacaaananttcnnncnagctgcagattggatattgggaagcaaatttgggtgtgaaatcttcagcaaaggagcacgcagagtccatgatggctcagaccaagtgagtgagaggcagagcgaggacgcccctctgctctggcgcgcccggactcggactcgcagactcgcgctggctccagtctctccacgattctctctcccagacttttccccggtcttaagagatcctgtgtccagagggggccttagctgctccagcccgcgatgaggaaaagtccaggtctgtctgactgtctttgggcctggatcctccttctgagcacactgactggaagaagctatggacagccgtcattacaagatgaacttaaagacaataccactgtcttcaccaggattttggacagactcctagatggctatgacaatcgcctgagaccaggattgggagagcgtgtaaccgaagtgaagactgatatcttcgtcaccagtttcggacccgtttcagaccatgatatggaatatacaatagatgtatttttccgtcaaagctggaaggatgaaaggttaaaatttaaaggacctatgacagtcctccggttaaataacctaatggcaagtaaaatccggactccggacacatttatgcccaacaaactcctgcggatcacagaggatggcaccttgctgtacaccatgaggctgacagtgagagctgaatgtccgatgcatttggaggacttccctatggatgcccatgcttgcccactaaaatttggaagttatgcttatacaagagcagaagttgtttatgaatggaccagagagccagcacgctcagtggttgtagcagaagatggatcacgtctaaaccagtatgaccttcttggacaaacagtagactctggaattgtccagtcaagtacaggagaatatgttgttatgaccactcatttccacttgaagagaaagattggctactttgttattcaaacatacctgccatgcataatgacagtgattctctcacaagtctccttctggctcaacagagagtctgtaccagcaagaactgtctttggagtaacaactgtgctcaccatgacaacattgagcatcagtgccagaaactccctccctaaggtggcttatgcaacagctatggattggtttattgccgtgtgctatgcctttgtgttctcagctctgattgagtttgccacagtaaactatttcactaagagaggttatgcatgggatggcaaaagtgtggttccagaaaagnnaaannnnntaanggtcncttatncncnaattn

SEQ ID NO: 24959 - DNA, 2818 bp, Homo sapiens
  misc_feature (54)..(54): n is a, c, g, or t
  misc_feature (56)..(56): n is a, c, g, or t
  misc_feature (60)..(62): n is a, c, g, or t
  misc_feature (64)..(64): n is a, c, g, or t
gcacaattcagaggtaacagcgcctgcgttttctccatgataacatagacaaananttcnnncnagctgcagattggatattgggaagcaaatttgggtgtgaaatcttcagcaaaggagcacgcagagtccatgatggctcagaccaagtgagtgagaggcagagcgaggacgcccctctgctctggcgcgcccggactcggactcgcagactcgcgctggctccagtctctccacgattctctctcccagacttttccccggtcttaagagatcctgtgtccagagggggccttagctgctccagcccgcgatgaggaaaagtccaggtctgtctgactgtctttgggcctggatcctccttctgagcacactgactggaagaagctatggacagccgtcattacaagatgaacttaaagacaataccactgtcttcaccaggattttggacagactcctagatggctatgacaatcgcctgagaccaggattgggagagcgtgtaaccgaagtgaagactgatatcttcgtcaccagtttcggacccgtttcagaccatgatatggaatatacaatagatgtatttttccgtcaaagctggaaggatgaaaggttaaaatttaaaggacctatgacagtcctccggttaaataacctaatggcaagtaaaatccggactccggacacatttttccacaatggaaagaagtcagtggcccacaacatgaccatgcccaacaaactcctgcggatcacagaggatggcaccttgctgtacaccatgaggctgacagtgagagctgaatgtccgatgcatttggaggacttccctatggatgcccatgcttgcccactaaaatttggaagttatgcttatacaagagcagaagttgtttatgaatggaccagagagccagcacgctcagtggttgtagcagaagatggatcacgtctaaaccagtatgaccttcttggacaaacagtagactctggaattgtccagtcaagtacaggagaatatgttgttatgaccactcatttccacttgaagagaaagattggctactttgttattcaaacatacctgccatgcataatgacagtgattctctcacaagtctccttctggctcaacagagagtctgtaccagcaagaactgtctttggagtaacaactgtgctcaccatgacaacattgagcatcagtgccagaaactccctccctaaggtggcttatgcaacagctatggattggtttattgccgtgtgctatgcctttgtgttctcagctctgattgagtttgccacagtaaactatttcactaagagaggttatgcatgggatggcaaaagtgtggttccagaaaagccaaagaaagtaaaggatcctcttattaagaaaaacaacacttacgctccaacagcaaccagctacacccctaatttggccaggggcgacccgggcttagccaccattgctaaaagtgcaaccatagaacctaaagaggtcaagcccgaaacaaaaccaccagaacccaagaaaacctttaacagtgtcagcaaaattgaccgactgtcaagaatagccttcccgctgctatttggaatctttaacttagtctactgggctacgtatttaaacagagagcctcagctaaaagcccccacaccacatcaatagatcttttactcacattctgttgttcagtcctctgcactgggaatttatttatgttctcaacgcagtaattcccatctgctttattgcctctgtcttaaagaatttgaaagtttccttattttcataattcatttaagaacaagagacccctgtctggcagtctggagcaaagcagactatgcagcttggagacaggattctgacagagcaagcgaaagagcaaagtcatgtcagaaggagacagaatgagagagaaaagagggggaagatggttcaaagatacaagaaaaagtagaaaaaaaaataacacttaactaaaacccctaggtcatttgtagatatatatttccaaatattctaaaaaagatactgtatatgtcaaaaatatttttatgtgaaggtgtttcaaagggtaaattataaatgtttcatgaagaaaaaattttaaaaatctacgtctttattacacaaactatggtgtgcttatgtttttgttttgctttttaaactgatgtatagctttaacattttgtttccaaagctgaagatccccattctttctctttgaaaaaaaaaaaggcctaatgcattattttgtcataaaatgctattttaaaattcatggaactttcatacgtaaaggtgcagttgctcattgtagagcacatttagtccaatgaagataaatgctttaaatagtttacttcactttcatctgagcttttaccactagactcaaggaagaataattttaacagacatgtatactccatagaaactaaactaaaatagtttaaaaatattccctttttcaccctattttcagatagcacatgagcccaacactcacttaattctcattatgaagatgtttttagaggggcaaaaatattttgcaagctctggaattgttgaatgtattcttttatataactacattaaaagctttagattgaaatttatgactagcaaacaaaaatagaatatataaacgatatatgtaaatatacagcatgagattgtacattttttacttttttaaaattgtgttcttaaaatattgtgtaagaatcacctggccccccttattcttggggaaagtttggtaaaaggctttggggaaaaaccttttag

SEQ ID NO: 24960 - DNA, 2872 bp, Homo sapiens
  misc_feature (54)..(54): n is a, c, g, or t
  misc_feature (56)..(56): n is a, c, g, or t
  misc_feature (60)..(62): n is a, c, g, or t
  misc_feature (64)..(64): n is a, c, g, or t
gcacaattcagaggtaacagcgcctgcgttttctccatgataacatagacaaananttcnnncnagctgcagattggatattgggaagcaaatttgggtgtgaaatcttcagcaaaggagcacgcagagtccatgatggctcagaccaagtgagtgagaggcagagcgaggacgcccctctgctctggcgcgcccggactcggactcgcagactcgcgctggctccagtctctccacgattctctctcccagacttttccccggtcttaagagatcctgtgtccagagggggccttagctgctccagcccgcgatgaggaaaagtccaggtctgtctgactgtctttgggcctggatcctccttctgagcacactgactggaagaagctatggacagccgtcattacaagatgaacttaaagacaataccactgtcttcaccaggattttggacagactcctagatggctatgacaatcgcctgagaccaggattgggagagcgtgtaaccgaagtgaagactgatatcttcgtcaccagtttcggacccgtttcagaccatgatatggaatatacaatagatgtatttttccgtcaaagctggaaggatgaaaggttaaaatttaaaggacctatgacagtcctccggttaaataacctaatggcaagtaaaatccggactccggacacatttttccacaatggaaagaagtcagtggcccacaacatgaccatgcccaacaaactcctgcggatcacagaggatggcaccttgctgtacaccatgaggctgacagtgagagctgaatgtccgatgcatttggaggacttccctatggatgcccatgcttgcccactaaaatttggaagttatgcttatacaagagcagaagttgtttatgaatggaccagagagccagcacgctcagtggttgtagcagaagatggatcacgtctaaaccagtatgaccttcttggacaaacagtagactctggaattgtccagtcaagtacaggagaatatgttgttatgaccactcatttccacttgaagagaaagattggctactttgttattcaaacatacctgccatgcataatgacagtgattctctcacaagtctccttctggctcaacagagagtctgtaccagcaagaactgtctttggagtaacaactgtgctcaccatgacaacattgagcatcagtgccagaaactccctccctaaggtggcttatgcaacagctatggattggtttattgccgtgtgctatgcctttgtgttctcagctctgattgagtttgccacagtaaactatttcactaagagaggttatgcatgggatggcaaaagtgtggttccagaaaagccaaagaaagtaaaggatcctcttattaagaaaaacaacacttacgctccaacagcaaccagctacacccctaatttggccaggggcgacccgggcttagccaccattgctaaaagtgcaaccatagaacctaaagaggtcaagcccgaaacaaaaccaccagaacccaagaaaacctttaacagtgtcagcaaaattgaccgactgtcaagaatagccttcccgctgctatttggaatctttaacttagtctactgggctacgtatttaaacagagagcctcagctaaaagcccccacaccacatcaatagatcttttactcacattctgttgttcagtcctctgcactgggaatttatttatgttctcaacgcagtaattcccatctgctttattgcctctgtcttaaagaatttgaaagtttccttattttcataattcatttaagaacaagagacccctgtctggcagtctggagcaaagcagactatgcagcttggagacaggattctgacagagcaagcgaaagagcaaagtcatgtcagaaggagacagaatgagagagaaaagagggggaagatggttcaaagatacaagaaaaagtagaaaaaaaaataacacttaactaaaacccctaggtcatttgtagatatatatttccaaatattctaaaaaagatactgtatatgtcaaaaatatttttatgtgaaggtgtttcaaagggtaaattataaatgtttcatgaagaaaaaattttaaaaatctacgtctttattacacaaactatggtgtgcttatgtttttgttttgctttttaaactgatgtatagctttaacattttgtttccaaagctgaagatccccattctttctctttgaaaaaaaaaaaggcctaatgcattattttgtcataaaatgctattttaaaattcatggaactttcatacgtaaaggtgcagttgctcattgtagagcacatttagtccaatgaagataaatgctttaaatagtttacttcactttcatctgagcttttaccactagactcaaggaagaataattttaacagacatgtatactccatagaaactaaactaaaatagtttaaaaatattccctttttcaccctattttcagatagcacatgagcccaacactcacttaattctcattatgaagatgtttttagaggggcaaaaatattttgcaagctctggaattgttgaatgtattcttttatataactacattaaaagctttagattgaaatttatgactagcaaacaaaaatagaatatataaacgatatatgtaaatatacagcatgagattgtacattttttacttttttaaaattgtgttcttaaaatattgtgtaagaatcactgcacttagctgttggaatgttgttaaatgctatggaaatacatttagaacctgcatttaagaacagaacagcaagtatgaaccacatggaacttaaaacatatgggtgtgaa

SEQ ID NO: 24961 - DNA, 457 bp, Homo sapiens
aaccctgtcactagtaaaaatacaaaaatcagcccggcatgctggcaggtgcctgaaatgtaatcccagctactcgggaggctgaggcaggagaatcacttgaacacaggaggcggaggttgcagtgagctgagaccacaccattgtactccagcctggctgacagagtgagacttggtctcaaaaaaaaataaataaataaaaataaaaataaaaatggccaaaggatttgaataaacatttttccaaagctagaacaaaggccaataagcaaatgaaaagatgctcaacatcattactcatcagagaagtgcaaaaaccacactgaagtagaacttattggaatgactatcatttttaaaaacagccaaacagataataagttccaatgaaatgtggagaagctgtaaaactcatacactgctggtgggattgcaaaatggtgcagccttttcgg

SEQ ID NO: 24962 - DNA, 402 bp, Homo sapiens
ttccaaaaatcaaagcctcatacaaagaatgagtatttgttagactcaaaaatattcacaagaatgtgccacatgctttaaaggtaatttttaaaggattccggaaatgtttggggcaatagcaacatcaatggaagcatcaaagagttctatctatcccaaggtcactactttgaagacagcaaaatccatttagactgtgtgtctgacttttttaattcagcagcagcaactaaagtcattcctctcttaactgtcaacattatccaatatcagagtcaaggcactgcactgagaacgccctaggagtggacgttggggccagcattataaattatgccatatccttacaaagagcatgtcattcaacacaaggctcacacggtggttgtaaattactgc

SEQ ID NO: 24963 - DNA, 1037 bp, Homo sapiens
caaaaaagaaaaaggtaatggcaaaaccacagttacttttgcaccgacctaatagtaggattacacttttaaatagtacatttcattccatttttattttacatattttatagattttcttgcttatttaagacaagttgaagcttatgtttctatttactgtgccatttagcatttcttatttctccctaacattattatgctacatataatattgattagtctggcttcaaaccttaccttaattagccttaaaaaaaaaatctagttggccaagcacactggctcacacctgtagcctcaacactttgggaggccaaggcagaaggatcacttgaacccaggaactggagaccagcctgggcaacgtagtgagatcgtctcactaaaaaaagttaaaaattagctgggcatggtggtgctcactgtagtcttagctactttggagactgaggagggaggattgcttgagcccaggaggtcaaggctgcagtgagccaaaatcgtgccactgcaccccagcctgggcaacaaagtgagatcccgtctccaaaaacaaaaagtctagttaatcattgcctttttactcaaaatgtgtttctaccaccctttttggatttttaaaaaatatgtattttatttttatgggtaaatttggcctaattacattttactgatataactcttaacttaaatttctctttattgttgaattgttgatccttttcttttttctaattcacagtatctctgtcctaggctttctgatctatttaaggaagattgagtgaacagcctaattgaccctctgaatgtcccctgagccttctaatccgccctgccttgagcctcctcttgtaactgaaattcactttctgatgcagaaccattgagcccttctgaaaccttttcaaaactatatatttaaattttcttatcaaactgtactgttattagattacatgtctagcatagcagcaaattatacttcattatattaaccttgccacttccctctacaatgagacccgatcttt

SEQ ID NO: 24964 - DNA, 3686 bp, Homo sapiens
gactttagccttcccattttatggagtttgtcatgagtgtgatcgtatttgctgctcgtgagatttcgctcactaataaatttgattcatttaattatgtgttttctcttcctagattttaatttgatttgaaaatgagtaagtgcagaaagacaccagttcagcagctagcaagtcccgcgtcattcagcccagatattcttgctgacatttttgaactctttgccaagaacttttcttatggcaagccacttaataatgagtggcagttaccagatcccagtgagattttcacctgtgaccacactgaatttaatgcatttcttgatttgaagaactccctaaatgaagtaaaaaacctactgagtgataagaaactggatgagtggcatgagcacactgctttcactaataaagcagggaaaatcatttctcatgttagaaaatctgtgaatgctgaactttgtactcaagcatggtgtaagttccatgagattttgtgcagctttccacttattccacaggaagcttttcagaatggaaaactgaattctctacacctttgtgaagctccaggagcttttatagctagtctcaaccactacttaaaatcccatcggtttccttgtcattggagttgggtagcgaatactctgaatccataccatgaagcaaatgacgacctcatgatgattatggatgaccggcttattgcaaataccttgcactggtggtactttggtccagataacactggtgatatcatgaccctgaaattcttgactggacttcagaatttcataagcagcatggctactgttcacttggtcactgcagatgggagttttgattgccaaggaaacccaggtgaacaagaagctttagtttcttctttgcattactgtgaagttgtcactgctctgaccactcttggaaacggtggctcttttgttctaaagatgtttactatgtttgaacattgttccataaacttgatgtacctgctaaactgttgttttgaccaagtccatgttttcaaacctgctactagcaaggcaggaaactccgaagtctatgtggtttgcctccactataaggggagagaggccatccatcctctgttatctaagatgaccttgaattttgggactgaaatgaaaaggaaagccctttttccccatcatgtgattcctgattcttttcttaagagacatgaagaatgttgtgtgttctttcataaatatcagctagagactatttctgaaaacattcgtctatttgagtgcatgggaaaggcggaacaagaaaagctgaataatttaagggattgtgctatacaatattttatgcaaaaatttcaactgaaacatctttccagaagtaattggctagtaaaaaaatctagtattggttgtagtacaaatacaaaatggtttgggcagaggaacaaatattttaaaacttataatgaaaggaagatgctagaagccctttcatggaaagataaagtagccaaaggatactttaatagttgggctgaagaacatggtgtatatcatcctgggcagagttctattttagaaggaacagcttccaatcttgagtgtcacttatggcatattttggagggaaagaaactgccaaaggtaaaatgttctcctttttgcaatggtgaaattttaaaaactcttaatgaagcaattgaaaagtcattaggaggagcttttaatttggattccaagtttaggccaaaacagcagtattcttgttcttgtcatgttttttctgaagaactgatattttccgagttgtgtagccttactgagtgccttcaggatgagcaggttgtagtacccagcaatcaaataaagtgcctgctggtgggcttttcgactctccgtaatatcaaaatgcatataccgttggaagttcgactcctagaatcagctgaactcacaacttttagctgttcattgcttcatgatggagatccaacttaccagcgtttatttttggactgccttctacattcattgcgggagcttcatacaggagatgttatgattttgcctgtactttcttgcttcacaagatttatggctggtttgatctttgtactccacagttgttttagattcatcacttttgtttgtcccacatcctctgatcccctgaggacctgcgcagtcctgctatgtgttggttatcaggaccttccaaatccagttttccgatatttgcagagtgtgaatgaattgttgagcactttgctcaactctgactcaccccagcaggttttacagtttgtgccaatggaggtactccttaagggggccctgcttgattttttgtgggatttgaatgctgccattgctaaaaggcatttgcatttcattattcaaagagagagagaagaaattatcaacagccttcagttacaaaactgaacatatgctttctgagattcaactttatgatttcttataatttgcccagtatttgcatcctgttgctctattaatttaaaaaccttttattttggggaaaggccaacatttgcatcattcaaagtctcattaattctggaaaaccatccattctgatctctagggtatatacacccacaggcatagagctcttccacgtggtggaatctatgcaatgatagatattcacactctaaatatgaggtgtgtgtatgtgtatgggtggccacagccatgcttacctatgccatttagttggtcttacttaatctgcttaagatttgcatctgtgtacctttgttcagattagttttttttttccagccgatttcctcttagtggctaatgctgttagtgaattttccaactaatttcctctcattggttaatgttgttaatgaattgagagaggtaattgaggaaaggaaatgagtaaatcactgttcagcaacactgatttccgttaacacatcagttatgaatttcagggaattcatctcgccagattcttgataacatgccattcattgcccttaggtgattgaccctattttcttacatggctcaaataaaactagtatgctgttgtatgaatcttttactgaccacaccatccaactataaaaatataacgggacagctttaaaccaaagatcatgtttagaacaatgaaaaattatttgttgtatctaatacacgcctgtattgtgaaaagcttcatttagcaatgatgtaataatttttaacttccaggaaataatctgtgaatggaaagattttttaagattttgagatagtgtttagtctcatgttgggaacacatgaatgtgatgaacatagtgaatactaaagaaaacgcttcagactttcagaatgatggttcagaatttaaaatttttaatcttttctaatttctttttttcagtgtgaaaatagcactttaccaaaagattagccatgaaatggttattttgccagttacatttgatttcttttgtatctgcaatgtaatgagttattttatttcttctgtatttgcagtgtaatgagtttttgtggcaaagtgtattaagcaatttttcattatcttgaagttccacaaagtggagaatatttatattctcacatgcattttaggcacttttgatatgtgaaaatagatgtattttctgatgcatttggttaataaatattaatctg

SEQ ID NO: 24965 - DNA, 4185 bp, Homo sapiens
ttcgggacggagccaaagaatgctccgcctgcgcgcgccgcttccgttgccgtagtggccgggggcgggaggctggcgcctcccagcttctgtactccgcgaagcaaaacctagggagctgaggcctaggcgaggcgagagtcgccggcgtgcgtaacgttggcgcacgtgactccggcccggcctacagggcgcgtgcgcagtgggacttgagtgcctcctggtccctgtctgccggcattcgcggctgcggggcccggaggtgggactggcttcccggtgccgcgagggcgggtccggacagccttccccccagtccggcgcaccatctccctgccttgtggctggaggcgccgcggacccaaagggagggaccatcccgggaagcagccccgagagcggaagtgcagaatggcttcctcgagagagtaaagtgcagcctctccagacactggggccccagtgggcgtgggcgaagttgctggtaggaggagttggcggaagcacttggaactcctttataagtgtcagctgtgagattttaatttgatttgaaaatgagtaagtgcagaaagacaccagttcagcagctagcaagtcccgcgtcattcagcccagatattcttgctgacatttttgaactctttgccaagaacttttcttatggcaagccacttaataatgagtggcagttaccagatcccagtgagattttcacctgtgaccacactgaatttaatgcatttcttgatttgaagaactccctaaatgaagtaaaaaacctactgagtgataagaaactggatgagtggcatgagcacactgctttcactaataaagcagggaaaatcatttctcatgttagaaaatctgtgaatgctgaactttgtactcaagcatggtgtaagttccatgagattttgtgcagctttccacttattccacaggaagcttttcagaatggaaaactgaattctctacacctttgtgaagctccaggagcttttatagctagtctcaaccactacttaaaatcccatcggtttccttgtcattggagttgggtagcgaatactctgaatccataccatgaagcaaatgacgacctcatgatgattatggatgaccggcttattgcaaataccttgcactggtggtactttggtccagataacactggtgatatcatgaccctgaaattcttgactggacttcagaatttcataagcagcatggctactgttcacttggtcactgcagatgggagttttgattgccaaggaaacccaggtgaacaagaagctttagtttcttctttgcattactgtgaagttgtcactgctctgaccactcttggaaacggtggctcttttgttctaaagatgtttactatgtttgaacattgttccataaacttgatgtacctgctaaactgttgttttgaccaagtccatgttttcaaacctgctactagcaaggcaggaaactccgaagtctatgtggtttgcctccactataaggggagagaggccatccatcctctgttatctaagatgaccttgaattttgggactgaaatgaaaaggaaagccctttttccccatcatgtgattcctgattcttttcttaagagacatgaagaatgttgtgtgttctttcataaatatcagctagagactatttctgaaaacattcgtctatttgagtgcatgggaaaggcggaacaagaaaagctgaataatttaagggattgtgctatacaatattttatgcaaaaatttcaactgaaacatctttccagaagtaattggctagtaaaaaaatctagtattggttgtagtacaaatacaaaatggtttgggcagaggaacaaatattttaaaacttataatgaaaggaagatgctagaagccctttcatggaaagataaagtagccaaaggatactttaatagttgggctgaagaacatggtgtatatcatcctgggcagagttctattttagaaggaacagcttccaatcttgagtgtcacttatggcatattttggagggaaagaaactgccaaaggtaaaatgttctcctttttgcaatggtgaaattttaaaaactcttaatgaagcaattgaaaagtcattaggaggagcttttaatttggattccaagtttaggccaaaacagcagtattcttgttcttgtcatgttttttctgaagaactgatattttccgagttgtgtagccttactgagtgccttcaggatgagcaggttgtagtacccagcaatcaaataaagtgcctgctggtgggcttttcgactctccgtaatatcaaaatgcatataccgttggaagttcgactcctagaatcagctgaactcacaacttttagctgttcattgcttcatgatggagatccaacttaccagcgtttatttttggactgccttctacattcattgcgggagcttcatacaggagatgttatgattttgcctgtactttcttgcttcacaagatttatggctggtttgatctttgtactccacagttgttttagattcatcacttttgtttgtcccacatcctctgatcccctgaggacctgcgcagtcctgctatgtgttggttatcaggaccttccaaatccagttttccgatatttgcagagtgtgaatgaattgttgagcactttgctcaactctgactcaccccagcaggttttacagtttgtgccaatggaggtactccttaagggggccctgcttgattttttgtgggatttgaatgctgccattgctaaaaggcatttgcatttcattattcaaagagagagagaagaaattatcaacagccttcagttacaaaactgaacatatgctttctgagattcaactttatgatttcttataatttgcccagtatttgcatcctgttgctctattaatttaaaaaccttttattttggggaaaggccaacatttgcatcattcaaagtctcattaattctggaaaaccatccattctgatctctagggtatatacacccacaggcatagagctcttccacgtggtggaatctatgcaatgatagatattcacactctaaatatgaggtgtgtgtatgtgtatgggtggccacagccatgcttacctatgccatttagttggtcttacttaatctgcttaagatttgcatctgtgtacctttgttcagattagttttttttttccagccgatttcctcttagtggctaatgctgttagtgaattttccaactaatttcctctcattggttaatgttgttaatgaattgagagaggtaattgaggaaaggaaatgagtaaatcactgttcagcaacactgatttccgttaacacatcagttatgaatttcagggaattcatctcgccagattcttgataacatgccattcattgcccttaggtgattgaccctattttcttacatggctcaaataaaactagtatgctgttgtatgaatcttttactgaccacaccatccaactataaaaatataacgggacagctttaaaccaaagatcatgtttagaacaatgaaaaattatttgttgtatctaatacacgcctgtattgtgaaaagcttcatttagcaatgatgtaataatttttaacttccaggaaataatctgtgaatggaaagattttttaagattttgagatagtgtttagtctcatgttgggaacacatgaatgtgatgaacatagtgaatactaaagaaaacgcttcagactttcagaatgatggttcagaatttaaaatttttaatcttttctaatttctttttttcagtgtgaaaatagcactttaccaaaagattagccatgaaatggttattttgccagttacatttgatttcttttgtatctgcaatgtaatgagttattttatttcttctgtatttgcagtgtaatgagtttttgtggcaaagtgtattaagcaatttttcattatcttgaagttccacaaagtggagaatatttatattctcacatgcattttaggcacttttgatatgtgaaaatagatgtattttctgatgcatttggttaataaatattaatctgaacattttcatgttctttgctattttgaattccattatagattcatgaataaagtcattactagagaaaaaaaaag

SEQ ID NO: 24966 - DNA, 4235 bp, Homo sapiens
ttcgggacggagccaaagaatgctccgcctgcgcgcgccgcttccgttgccgtagtggccgggggcgggaggctggcgcctcccagcttctgtactccgcgaagcaaaacctagggagctgaggcctaggcgaggcgagagtcgccggcgtgcgtaacgttggcgcacgtgactccggcccggcctacagggcgcgtgcgcagtgggacttgagtgcctcctggtccctgtctgccggcattcgcggctgcggggcccggaggtgggactggcttcccggtgccgcgagggcgggtccggacagccttccccccagtccggcgcaccatctccctgccttgtggctggaggcgccgcggacccaaagggagggaccatcccgggaagcagccccgagagcggaagtgcagaatggcttcctcgagagagtaaagtgcagcctctccagacactggggccccagtgggcgtgggcgaaggtaatccaggcctgggtacgattccgggccctccttcgacttcccagcggttgctggtaggaggagttggcggaagcacttggaactcctttataagtgtcagctgtgagattttaatttgatttgaaaatgagtaagtgcagaaagacaccagttcagcagctagcaagtcccgcgtcattcagcccagatattcttgctgacatttttgaactctttgccaagaacttttcttatggcaagccacttaataatgagtggcagttaccagatcccagtgagattttcacctgtgaccacactgaatttaatgcatttcttgatttgaagaactccctaaatgaagtaaaaaacctactgagtgataagaaactggatgagtggcatgagcacactgctttcactaataaagcagggaaaatcatttctcatgttagaaaatctgtgaatgctgaactttgtactcaagcatggtgtaagttccatgagattttgtgcagctttccacttattccacaggaagcttttcagaatggaaaactgaattctctacacctttgtgaagctccaggagcttttatagctagtctcaaccactacttaaaatcccatcggtttccttgtcattggagttgggtagcgaatactctgaatccataccatgaagcaaatgacgacctcatgatgattatggatgaccggcttattgcaaataccttgcactggtggtactttggtccagataacactggtgatatcatgaccctgaaattcttgactggacttcagaatttcataagcagcatggctactgttcacttggtcactgcagatgggagttttgattgccaaggaaacccaggtgaacaagaagctttagtttcttctttgcattactgtgaagttgtcactgctctgaccactcttggaaacggtggctcttttgttctaaagatgtttactatgtttgaacattgttccataaacttgatgtacctgctaaactgttgttttgaccaagtccatgttttcaaacctgctactagcaaggcaggaaactccgaagtctatgtggtttgcctccactataaggggagagaggccatccatcctctgttatctaagatgaccttgaattttgggactgaaatgaaaaggaaagccctttttccccatcatgtgattcctgattcttttcttaagagacatgaagaatgttgtgtgttctttcataaatatcagctagagactatttctgaaaacattcgtctatttgagtgcatgggaaaggcggaacaagaaaagctgaataatttaagggattgtgctatacaatattttatgcaaaaatttcaactgaaacatctttccagaagtaattggctagtaaaaaaatctagtattggttgtagtacaaatacaaaatggtttgggcagaggaacaaatattttaaaacttataatgaaaggaagatgctagaagccctttcatggaaagataaagtagccaaaggatactttaatagttgggctgaagaacatggtgtatatcatcctgggcagagttctattttagaaggaacagcttccaatcttgagtgtcacttatggcatattttggagggaaagaaactgccaaaggtaaaatgttctcctttttgcaatggtgaaattttaaaaactcttaatgaagcaattgaaaagtcattaggaggagcttttaatttggattccaagtttaggccaaaacagcagtattcttgttcttgtcatgttttttctgaagaactgatattttccgagttgtgtagccttactgagtgccttcaggatgagcaggttgtagtacccagcaatcaaataaagtgcctgctggtgggcttttcgactctccgtaatatcaaaatgcatataccgttggaagttcgactcctagaatcagctgaactcacaacttttagctgttcattgcttcatgatggagatccaacttaccagcgtttatttttggactgccttctacattcattgcgggagcttcatacaggagatgttatgattttgcctgtactttcttgcttcacaagatttatggctggtttgatctttgtactccacagttgttttagattcatcacttttgtttgtcccacatcctctgatcccctgaggacctgcgcagtcctgctatgtgttggttatcaggaccttccaaatccagttttccgatatttgcagagtgtgaatgaattgttgagcactttgctcaactctgactcaccccagcaggttttacagtttgtgccaatggaggtactccttaagggggccctgcttgattttttgtgggatttgaatgctgccattgctaaaaggcatttgcatttcattattcaaagagagagagaagaaattatcaacagccttcagttacaaaactgaacatatgctttctgagattcaactttatgatttcttataatttgcccagtatttgcatcctgttgctctattaatttaaaaaccttttattttggggaaaggccaacatttgcatcattcaaagtctcattaattctggaaaaccatccattctgatctctagggtatatacacccacaggcatagagctcttccacgtggtggaatctatgcaatgatagatattcacactctaaatatgaggtgtgtgtatgtgtatgggtggccacagccatgcttacctatgccatttagttggtcttacttaatctgcttaagatttgcatctgtgtacctttgttcagattagttttttttttccagccgatttcctcttagtggctaatgctgttagtgaattttccaactaatttcctctcattggttaatgttgttaatgaattgagagaggtaattgaggaaaggaaatgagtaaatcactgttcagcaacactgatttccgttaacacatcagttatgaatttcagggaattcatctcgccagattcttgataacatgccattcattgcccttaggtgattgaccctattttcttacatggctcaaataaaactagtatgctgttgtatgaatcttttactgaccacaccatccaactataaaaatataacgggacagctttaaaccaaagatcatgtttagaacaatgaaaaattatttgttgtatctaatacacgcctgtattgtgaaaagcttcatttagcaatgatgtaataatttttaacttccaggaaataatctgtgaatggaaagattttttaagattttgagatagtgtttagtctcatgttgggaacacatgaatgtgatgaacatagtgaatactaaagaaaacgcttcagactttcagaatgatggttcagaatttaaaatttttaatcttttctaatttctttttttcagtgtgaaaatagcactttaccaaaagattagccatgaaatggttattttgccagttacatttgatttcttttgtatctgcaatgtaatgagttattttatttcttctgtatttgcagtgtaatgagtttttgtggcaaagtgtattaagcaatttttcattatcttgaagttccacaaagtggagaatatttatattctcacatgcattttaggcacttttgatatgtgaaaatagatgtattttctgatgcatttggttaataaatattaatctgaacattttcatgttctttgctattttgaattccattatagattcatgaataaagtcattactagagaaaaaaaaag

SEQ ID NO: 24967 - DNA, 3122 bp, Homo sapiens
  misc_feature (3057)..(3058): n is a, c, g, or t
  misc_feature (3090)..(3091): n is a, c, g, or t
gactttagccttcccattttatggagtttgtcatgagtgtgatcgtatttgctgctcgtgagatttcgctcactaataaatttgattcatttaattatgtgttttctcttcctagattttaatttgatttgaaaatgagtaagtgcagaaagacaccagttcagcagctagcaagtcccgcgtcattcagcccagatattcttgctgacatttttgaactctttgccaagaacttttcttatggcaagccacttaataatgagtggcagttaccagatcccagtgagattttcacctgtgaccacactgaatttaatgcatttcttgatttgaagaactccctaaatgaagtaaaaaacctactgagtgataagaaactggatgagtggcatgagcacactgctttcactaataaagcagggaaaatcatttctcatgttagaaaatctgtgaatgctgaactttgtactcaagcatggtgtaagttccatgagattttgtgcagctttccacttattccacaggaagcttttcagaatggaaaactgaattctctacacctttgtgaagctccaggagcttttatagctagtctcaaccactacttaaaatcccatcggtttccttgtcattggagttgggtagcgaatactctgaatccataccatgaagcaaatgacgacctcatgatgattatggatgaccggcttattgcaaataccttgcactggtggtactttggtccagataacactggtgatatcatgaccctgaaattcttgactggacttcagaatttcataagcagcatggctactgttcacttggtcactgcagatgggagttttgattgccaaggaaacccaggtgaacaagaagctttagtttcttctttgcattactgtgaagttgtcactgctctgaccactcttggaaacggtggctcttttgttctaaagatgtttactatgtttgaacattgttccataaacttgatgtacctgctaaactgttgttttgaccaagtccatgttttcaaacctgctactagcaaggcaggaaactccgaagtctatgtggtttgcctccactataaggggagagaggccatccatcctctgttatctaagatgaccttgaattttgggactgaaatgaaaaggaaagccctttttccccatcatgtgattcctgattcttttcttaagagacatgaagaatgttgtgtgttctttcataaatatcagctagagactatttctgaaaacattcgtctatttgagtgcatgggaaaggcggaacaagaaaagctgaataatttaagggattgtgctatacaatattttatgcaaaaatttcaactgaaacatctttccagaagtaattggctagtaaaaaaatctagtattggttgtagtacaaatacaaaatggtttgggcagaggaacaaatattttaaaacttataatgaaaggaagatgctagaagccctttcatggaaagataaagtagccaaaggatactttaatagttgggctgaagaacatggtgtatatcatcctgggcagagttctattttagaaggaacagcttccaatcttgagtgtcacttatggcatattttggagggaaagaaactgccaaaggtaaaatgttctcctttttgcaatggtgaaattttaaaaactcttaatgaagcaattgaaaagtcattaggaggagcttttaatttggattccaagtttaggccaaaacagcagtattcttgttcttgtcatgttttttctgaagaactgatattttccgagttgtgtagccttactgagtgccttcaggatgagcaggttgtagtacccagcaatcaaataaagtgcctgctggtgggcttttcgactctccgtaatatcaaaatgcatataccgttggaagttcgactcctagaatcagctgaactcacaacttttagctgttcattgcttcatgatggagatccaacttaccagcgtttatttttggactgccttctacattcattgcgggagcttcatacaggagatgttatgattttgcctgtactttcttgcttcacaagatttatggctggtttgatctttgtactccacagttgttttagattcatcacttttgtttgtcccacatcctctgatcccctgaggacctgcgcagtcctgctatgtgttggttatcaggaccttccaaatccagttttccgatatttgcagagtgtgaatgaattgttgagcactttgctcaactctgactcaccccagcaggttttacagtttgtgccaatggaggtactccttaagggggccctgcttgattttttgtgggatttgaatgctgccattgctaaaaggcatttgcatttcattattcaaagagagagagaagaaattatcaacagccttcagttacaaaactgaacatatgctttctgagattcaactttatgatttcttataatttgcccagtatttgcatcctgttgctctattaatttaaaaaccttttattttggggaaaggccaacatttgcatcattcaaagtctcattaattctggaaaaccatccattctgatctctagggtatatacacccacaggcatagagctcttccacgtggtggaatctatgcaatgatagatattcacactctaaatatgaggtgtgtgtatgtgtatgggtggccacagccatgcttacctatgccatttagttggtcttacttaatctgcttaagatttgcatctgtgtacctttgttcagattagttttttttttccagccgatttcctcttagtggctaatgctgttagtgaattttccaactaatttcctctcattggttaatgttgttaatgaattgagagaggtaattgaggaaaggaaatgagtaaatcactgttcagcaacactgatttccgttaacacatcagttatgaatttcagggaattcatctcgccagattcttgataacatgccattcattgcccttaggtgattgaccctattttcttaaaagattcatacnncagcatactagttttatttgagccatggtcgnncggccgccaatttagtagtagtaggcgccgc

SEQ ID NO: 24968 - DNA, 3318 bp, Homo sapiens
ggcacgagatgattttccctgctttattagtgaaagcagtgtgctcatgccactcatccagtttctcatgttagaaaatctgtgaatgctgaactttgtactcaagcatggtgtaagttccatgagattttgtgcagctttccacttattccacaggaagcttttcagaatggaaaactgaattctctacacctttgtgaagctccaggagcttttatagctagtctcaaccactacttaaaatcccatcggtttccttgtcattggagttgggtagcgaatactctgaatccataccatgaagcaaatgacgacctcatgatgattatggatgaccggcttattgcaaataccttgcactggtggtactttggtccagataacactggtgatatcatgaccctgaaattcttgactggacttcagaatttcataagcagcatggctactgttcacttggtcactgcagatgggagttttgattgccaaggaaacccaggtgaacaagaagctttagtttcttctttgcattactgtgaagttgtcactgctctgaccactcttggaaacggtggctcttttgttctaaagatgtttactatgtttgaacattgttccataaacttgatgtacctgctaaactgttgttttgaccaagtccatgttttcaaacctgctactagcaaggcaggaaactccgaagtctatgtggtttgcctccactataaggggagagaggccatccatcctctgttatctaagatgaccttgaattttgggactgaaatgaaaaggaaagccctttttccccatcatgtgattcctgattcttttcttaagagacatgaagaatgttgtgtgttctttcataaatatcagctagagactatttctgaaaacattcgtctatttgagtgcatgggaaaggcggaacaagaaaagctgaataatttaagggattgtgctatacaatattttatgcaaaaatttcaactgaaacatctttccagaagtaattggctagtaaaaaaatctagtattggttgtagtacaaatacaaaatggtttgggcagaggaacaaatattttaaaacttataatgaaaggaagatgctagaagccctttcatggaaagataaagtagccaaaggatactttaatagttgggctgaagaacatggtgtatatcatcctgggcagagttctattttagaaggaacagcttccaatcttgagtgtcacttatggcatattttggagggaaagaaactgccaaaggtaaaatgttctcctttttgcaatggtgaaattttaaaaactcttaatgaagcaattgaaaagtcattaggaggagcttttaatttggattccaagtttaggccaaaacagcagtattcttgttcttgtcatgttttttctgaagaactgatattttccgagttgtgtagccttactgagtgccttcaggatgagcaggttgtagtacccagcaatcaaataaagtgcctgctggtgggcttttcgactctccgtaatatcaaaatgcatataccgttggaagttcgactcctagaatcagctgaactcacaacttttagctgttcattgcttcatgatggagatccaacttaccagcgtttatttttggactgccttctacattcattgcgggagcttcatacaggagatgttatgattttgcctgtactttcttgcttcacaagatttatggctggtttgatctttgtactccacagttgttttagattcatcacttttgtttgtcccacatcctctgatcccctgaggacctgcgcagtcctgctatgtgttggttatcaggaccttccaaatccagttttccgatatttgcagagtgtgaatgaattgttgagcactttgctcaactctgactcaccccagcaggttttacagtttgtgccaatggaggtactccttaagggggccctgcttgattttttgtgggatttgaatgctgccattgctaaaaggcatttgcatttcattattcaaagagagagagaagaaattatcaacagccttcagttacaaaactgaacatatgctttctgagattcaactttatgatttcttataatttgcccagtatttgcatcctgttgctctattaatttaaaaaccttttattttggggaaaggccaacatttgcatcattcaaagtctcattaattctggaaaaccatccattctgatctctagggtatatacacccacaggcatagagctcttccacgtggtggaatctatgcaatgatagatattcacactctaaatatgaggtgtgtgtatgtgtatgggtggccacagccatgcttacctatgccatttagttggtcttacttaatctgcttaagatttgcatctgtgtacctttgttcagattagttttttttttccagccgatttcctcttagtggctaatgctgttagtgaattttccaactaatttcctctcattggttaatgttgttaatgaattgagagaggtaattgaggaaaggaaatgagtaaatcactgttcagcaacactgatttccgttaacacatcagttatgaatttcagggaattcatctcgccagattcttgataacatgccattcattgcccttaggtgattgaccctattttcttacatggctcaaataaaactagtatgctgttgtatgaatcttttactgaccacaccatccaactataaaaatataacgggacagctttaaaccaaagatcatgtttagaacaatgaaaaattatttgttgtatctaatacacgcctgtattgtgaaaagcttcatttagcaatgatgtaataatttttaacttccaggaaataatctgtgaatggaaagattttttaagattttgagatagtgtttagtctcatgttgggaacacatgaatgtgatgaacatagtgaatactaaagaaaacgcttcagactttcagaatgatggttcagaatttaaaatttttaatcttttctaatttctttttttcagtgtgaaaatagcactttaccaaaagattagccatgaaatggttattttgccagttacatttgatttcttttgtatctgcaatgtaatgagttattttatttcttctgtatttgcagtgtaatgagtttttgtggcaaagtgtattaagcaatttttcattatcttgaagttccacaaagtggagaatatttatattctcacatgcattttaggcacttttgatatgtgaaaatagatgtattttctgatgcatttggttaataaatattaatctg

SEQ ID NO: 24969 - DNA, 1221 bp, Homo sapiens
catctgtgtactttgttcagatgcaaatcttaagcagattaagtaagaccaactaaatggcataggtaagcatggctgtggccacccatacacatacacaccacctcatatttagagtgtgaatatctatcattgcatagattccaccacgtggaagagctctatgcctgtgggtgtatataccctagagatcagaatggttggtcttacttaatctgcttaagatttgcatctgtgtacctttgttcagattagttttttttttccagccgatttcctcttagtggctaatgctgttagtgaattttccaactaatttcctctcattggttaatgttgttaatgaattgagagaggtaattgaggaaaggaaatgagtaaatcactgttcagcaacactgatttccgttaacacatcagttatgaatttcagggaattcatctcgccagattcttgataacatgccattcattgcccttaggtgattgaccctattttcttacatggctcaaataaaactagtatgctgttgtatgaatcttttactgaccacaccatccaactataaaaatataacgggacagctttaaaccaaagatcatgtttagaacaatgaaaaattatttgttgtatctaatacacgcctgtattgtgaaaagcttcatttagcaatgatgtaataatttttaacttccaggaaataatctgtgaatggaaagattttttaagattttgagatagtgtttagtctcatgttgggaacacatgaatgtgatgaacatagtgaatactaaagaaaacgcttcagactttcagaatgatggttcagaatttaaaatttttaatcttttctaatttctttttttcagtgtgaaaatagcactttaccaaaagattagccatgaaatggttattttgccagttacatttgatttcttttgtatctgcaatgtaatgagttattttatttcttctgtatttgcagtgtaatgagtttttgtggcaaagtgtattaagcaatttttcattatcttgaagttccacaaagtggagaatatttatattctcacatgcattttaggcacttttgatatgtgaaaatagatgtattttctgatgcatttggttaataaatattaatctgaacattttcatgttctttgctattttgaattccattatagattcatgaataaagtcattactagagaaaaaaaaag

SEQ ID NO: 24970 - DNA, 3762 bp, Homo sapiens
gactttagccttcccattttatggagtttgtcatgagtgtgatcgtatttgctgctcgtgagatttcgctcactaataaatttgattcatttaattatgtgttttctcttcctagattttaatttgatttgaaaatgagtaagtgcagaaagacaccagttcagcagctagcaagtcccgcgtcattcagcccagatattcttgctgacatttttgaactctttgccaagaacttttcttatggcaagccacttaataatgagtggcagttaccagatcccagtgagattttcacctgtgaccacactgaatttaatgcatttcttgatttgaagaactccctaaatgaagtaaaaaacctactgagtgataagaaactggatgagtggcatgagcacactgctttcactaataaagcagggaaaatcatttctcatgttagaaaatctgtgaatgctgaactttgtactcaagcatggtgtaagttccatgagattttgtgcagctttccacttattccacaggaagcttttcagaatggaaaactgaattctctacacctttgtgaagctccaggagcttttatagctagtctcaaccactacttaaaatcccatcggtttccttgtcattggagttgggtagcgaatactctgaatccataccatgaagcaaatgacgacctcatgatgattatggatgaccggcttattgcaaataccttgcactggtggtactttggtccagataacactggtgatatcatgaccctgaaattcttgactggacttcagaatttcataagcagcatggctactgttcacttggtcactgcagatgggagttttgattgccaaggaaacccaggtgaacaagaagctttagtttcttctttgcattactgtgaagttgtcactgctctgaccactcttggaaacggtggctcttttgttctaaagatgtttactatgtttgaacattgttccataaacttgatgtacctgctaaactgttgttttgaccaagtccatgttttcaaacctgctactagcaaggcaggaaactccgaagtctatgtggtttgcctccactataaggggagagaggccatccatcctctgttatctaagatgaccttgaattttgggactgaaatgaaaaggaaagccctttttccccatcatgtgattcctgattcttttcttaagagacatgaagaatgttgtgtgttctttcataaatatcagctagagactatttctgaaaacattcgtctatttgagtgcatgggaaaggcggaacaagaaaagctgaataatttaagggattgtgctatacaatattttatgcaaaaatttcaactgaaacatctttccagaagtaattggctagtaaaaaaatctagtattggttgtagtacaaatacaaaatggtttgggcagaggaacaaatattttaaaacttataatgaaaggaagatgctagaagccctttcatggaaagataaagtagccaaaggatactttaatagttgggctgaagaacatggtgtatatcatcctgggcagagttctattttagaaggaacagcttccaatcttgagtgtcacttatggcatattttggagggaaagaaactgccaaaggtaaaatgttctcctttttgcaatggtgaaattttaaaaactcttaatgaagcaattgaaaagtcattaggaggagcttttaatttggattccaagtttaggccaaaacagcagtattcttgttcttgtcatgttttttctgaagaactgatattttccgagttgtgtagccttactgagtgccttcaggatgagcaggttgtagtacccagcaatcaaataaagtgcctgctggtgggcttttcgactctccgtaatatcaaaatgcatataccgttggaagttcgactcctagaatcagctgaactcacaacttttagctgttcattgcttcatgatggagatccaacttaccagcgtttatttttggactgccttctacattcattgcgggagcttcatacaggagatgttatgattttgcctgtactttcttgcttcacaagatttatggctggtttgatctttgtactccacagttgttttagattcatcacttttgtttgtcccacatcctctgatcccctgaggacctgcgcagtcctgctatgtgttggttatcaggaccttccaaatccagttttccgatatttgcagagtgtgaatgaattgttgagcactttgctcaactctgactcaccccagcaggttttacagtttgtgccaatggaggtactccttaagggggccctgcttgattttttgtgggatttgaatgctgccattgctaaaaggcatttgcatttcattattcaaagagagagagaagaaattatcaacagccttcagttacaaaactgaacatatgctttctgagattcaactttatgatttcttataatttgcccagtatttgcatcctgttgctctattaatttaaaaaccttttattttggggaaaggccaacatttgcatcattcaaagtctcattaattctggaaaaccatccattctgatctctagggtatatacacccacaggcatagagctcttccacgtggtggaatctatgcaatgatagatattcacactctaaatatgaggtgtgtgtatgtgtatgggtggccacagccatgcttacctatgccatttagttggtcttacttaatctgcttaagatttgcatctgtgtacctttgttcagattagttttttttttccagccgatttcctcttagtggctaatgctgttagtgaattttccaactaatttcctctcattggttaatgttgttaatgaattgagagaggtaattgaggaaaggaaatgagtaaatcactgttcagcaacactgatttccgttaacacatcagttatgaatttcagggaattcatctcgccagattcttgataacatgccattcattgcccttaggtgattgaccctattttcttacatggctcaaataaaactagtatgctgttgtatgaatcttttactgaccacaccatccaactataaaaatataacgggacagctttaaaccaaagatcatgtttagaacaatgaaaaattatttgttgtatctaatacacgcctgtattgtgaaaagcttcatttagcaatgatgtaataatttttaacttccaggaaataatctgtgaatggaaagattttttaagattttgagatagtgtttagtctcatgttgggaacacatgaatgtgatgaacatagtgaatactaaagaaaacgcttcagactttcagaatgatggttcagaatttaaaatttttaatcttttctaatttctttttttcagtgtgaaaatagcactttaccaaaagattagccatgaaatggttattttgccagttacatttgatttcttttgtatctgcaatgtaatgagttattttatttcttctgtatttgcagtgtaatgagtttttgtggcaaagtgtattaagcaatttttcattatcttgaagttccacaaagtggagaatatttatattctcacatgcattttaggcacttttgatatgtgaaaatagatgtattttctgatgcatttggttaataaatattaatctgaacattttcatgttctttgctattttgaattccattatagattcatgaataaagtcattactagagaaaaaaaaag

SEQ ID NO: 24971 - DNA, 3969 bp, Homo sapiens
ttcgggacggagccaaagaatgctccgcctgcgcgcgccgcttccgttgccgtagtggccgggggcgggaggctggcgcctcccagcttctgtactccgcgaagcaaaacctagggagctgaggcctaggcgaggcgagagtcgccggcgtgcgtaacgttggcgcacgtgactccggcccggcctacagggcgcgtgcgcagtgggacttgagtgcctcctggtccctgtctgccggcattcgcggctgcggggcccggagttgctggtaggaggagttggcggaagcacttggaactcctttataagtgtcagctgtgagattttaatttgatttgaaaatgagtaagtgcagaaagacaccagttcagcagctagcaagtcccgcgtcattcagcccagatattcttgctgacatttttgaactctttgccaagaacttttcttatggcaagccacttaataatgagtggcagttaccagatcccagtgagattttcacctgtgaccacactgaatttaatgcatttcttgatttgaagaactccctaaatgaagtaaaaaacctactgagtgataagaaactggatgagtggcatgagcacactgctttcactaataaagcagggaaaatcatttctcatgttagaaaatctgtgaatgctgaactttgtactcaagcatggtgtaagttccatgagattttgtgcagctttccacttattccacaggaagcttttcagaatggaaaactgaattctctacacctttgtgaagctccaggagcttttatagctagtctcaaccactacttaaaatcccatcggtttccttgtcattggagttgggtagcgaatactctgaatccataccatgaagcaaatgacgacctcatgatgattatggatgaccggcttattgcaaataccttgcactggtggtactttggtccagataacactggtgatatcatgaccctgaaattcttgactggacttcagaatttcataagcagcatggctactgttcacttggtcactgcagatgggagttttgattgccaaggaaacccaggtgaacaagaagctttagtttcttctttgcattactgtgaagttgtcactgctctgaccactcttggaaacggtggctcttttgttctaaagatgtttactatgtttgaacattgttccataaacttgatgtacctgctaaactgttgttttgaccaagtccatgttttcaaacctgctactagcaaggcaggaaactccgaagtctatgtggtttgcctccactataaggggagagaggccatccatcctctgttatctaagatgaccttgaattttgggactgaaatgaaaaggaaagccctttttccccatcatgtgattcctgattcttttcttaagagacatgaagaatgttgtgtgttctttcataaatatcagctagagactatttctgaaaacattcgtctatttgagtgcatgggaaaggcggaacaagaaaagctgaataatttaagggattgtgctatacaatattttatgcaaaaatttcaactgaaacatctttccagaagtaattggctagtaaaaaaatctagtattggttgtagtacaaatacaaaatggtttgggcagaggaacaaatattttaaaacttataatgaaaggaagatgctagaagccctttcatggaaagataaagtagccaaaggatactttaatagttgggctgaagaacatggtgtatatcatcctgggcagagttctattttagaaggaacagcttccaatcttgagtgtcacttatggcatattttggagggaaagaaactgccaaaggtaaaatgttctcctttttgcaatggtgaaattttaaaaactcttaatgaagcaattgaaaagtcattaggaggagcttttaatttggattccaagtttaggccaaaacagcagtattcttgttcttgtcatgttttttctgaagaactgatattttccgagttgtgtagccttactgagtgccttcaggatgagcaggttgtagtacccagcaatcaaataaagtgcctgctggtgggcttttcgactctccgtaatatcaaaatgcatataccgttggaagttcgactcctagaatcagctgaactcacaacttttagctgttcattgcttcatgatggagatccaacttaccagcgtttatttttggactgccttctacattcattgcgggagcttcatacaggagatgttatgattttgcctgtactttcttgcttcacaagatttatggctggtttgatctttgtactccacagttgttttagattcatcacttttgtttgtcccacatcctctgatcccctgaggacctgcgcagtcctgctatgtgttggttatcaggaccttccaaatccagttttccgatatttgcagagtgtgaatgaattgttgagcactttgctcaactctgactcaccccagcaggttttacagtttgtgccaatggaggtactccttaagggggccctgcttgattttttgtgggatttgaatgctgccattgctaaaaggcatttgcatttcattattcaaagagagagagaagaaattatcaacagccttcagttacaaaactgaacatatgctttctgagattcaactttatgatttcttataatttgcccagtatttgcatcctgttgctctattaatttaaaaaccttttattttggggaaaggccaacatttgcatcattcaaagtctcattaattctggaaaaccatccattctgatctctagggtatatacacccacaggcatagagctcttccacgtggtggaatctatgcaatgatagatattcacactctaaatatgaggtgtgtgtatgtgtatgggtggccacagccatgcttacctatgccatttagttggtcttacttaatctgcttaagatttgcatctgtgtacctttgttcagattagttttttttttccagccgatttcctcttagtggctaatgctgttagtgaattttccaactaatttcctctcattggttaatgttgttaatgaattgagagaggtaattgaggaaaggaaatgagtaaatcactgttcagcaacactgatttccgttaacacatcagttatgaatttcagggaattcatctcgccagattcttgataacatgccattcattgcccttaggtgattgaccctattttcttacatggctcaaataaaactagtatgctgttgtatgaatcttttactgaccacaccatccaactataaaaatataacgggacagctttaaaccaaagatcatgtttagaacaatgaaaaattatttgttgtatctaatacacgcctgtattgtgaaaagcttcatttagcaatgatgtaataatttttaacttccaggaaataatctgtgaatggaaagattttttaagattttgagatagtgtttagtctcatgttgggaacacatgaatgtgatgaacatagtgaatactaaagaaaacgcttcagactttcagaatgatggttcagaatttaaaatttttaatcttttctaatttctttttttcagtgtgaaaatagcactttaccaaaagattagccatgaaatggttattttgccagttacatttgatttcttttgtatctgcaatgtaatgagttattttatttcttctgtatttgcagtgtaatgagtttttgtggcaaagtgtattaagcaatttttcattatcttgaagttccacaaagtggagaatatttatattctcacatgcattttaggcacttttgatatgtgaaaatagatgtattttctgatgcatttggttaataaatattaatctgaacattttcatgttctttgctattttgaattccattatagattcatgaataaagtcattactagagaaaaaaaaag

SEQ ID NO: 24972 - DNA, 3159 bp, Homo sapiens
gtaccggacacactgtaacccgatcagctatacctttgtgaagctccaggagcttttatagctagtctcaaccactacttaaaatcccatcggtttccttgtcattggagttgggtagcgaatactctgaatccataccatgaagcaaatgacgacctcatgatgattatggatgaccggcttattgcaaataccttgcactggtggtactttggtccagataacactggtgatatcatgaccctgaaattcttgactggacttcagaatttcataagcagcatggctactgttcacttggtcactgcagatgggagttttgattgccaaggaaacccaggtgaacaagaagctttagtttcttctttgcattactgtgaagttgtcactgctctgaccactcttggaaacggtggctcttttgttctaaagatgtttactatgtttgaacattgttccataaacttgatgtacctgctaaactgttgttttgaccaagtccatgttttcaaacctgctactagcaaggcaggaaactccgaagtctatgtggtttgcctccactataaggggagagaggccatccatcctctgttatctaagatgaccttgaattttgggactgaaatgaaaaggaaagccctttttccccatcatgtgattcctgattcttttcttaagagacatgaagaatgttgtgtgttctttcataaatatcagctagagactatttctgaaaacattcgtctatttgagtgcatgggaaaggcggaacaagaaaagctgaataatttaagggattgtgctatacaatattttatgcaaaaatttcaactgaaacatctttccagaagtaattggctagtaaaaaaatctagtattggttgtagtacaaatacaaaatggtttgggcagaggaacaaatattttaaaacttataatgaaaggaagatgctagaagccctttcatggaaagataaagtagccaaaggatactttaatagttgggctgaagaacatggtgtatatcatcctgggcagagttctattttagaaggaacagcttccaatcttgagtgtcacttatggcatattttggagggaaagaaactgccaaaggtaaaatgttctcctttttgcaatggtgaaattttaaaaactcttaatgaagcaattgaaaagtcattaggaggagcttttaatttggattccaagtttaggccaaaacagcagtattcttgttcttgtcatgttttttctgaagaactgatattttccgagttgtgtagccttactgagtgccttcaggatgagcaggttgtagtacccagcaatcaaataaagtgcctgctggtgggcttttcgactctccgtaatatcaaaatgcatataccgttggaagttcgactcctagaatcagctgaactcacaacttttagctgttcattgcttcatgatggagatccaacttaccagcgtttatttttggactgccttctacattcattgcgggagcttcatacaggagatgttatgattttgcctgtactttcttgcttcacaagatttatggctggtttgatctttgtactccacagttgttttagattcatcacttttgtttgtcccacatcctctgatcccctgaggacctgcgcagtcctgctatgtgttggttatcaggaccttccaaatccagttttccgatatttgcagagtgtgaatgaattgttgagcactttgctcaactctgactcaccccagcaggttttacagtttgtgccaatggaggtactccttaagggggccctgcttgattttttgtgggatttgaatgctgccattgctaaaaggcatttgcatttcattattcaaagagagagagaagaaattatcaacagccttcagttacaaaactgaacatatgctttctgagattcaactttatgatttcttataatttgcccagtatttgcatcctgttgctctattaatttaaaaaccttttattttggggaaaggccaacatttgcatcattcaaagtctcattaattctggaaaaccatccattctgatctctagggtatatacacccacaggcatagagctcttccacgtggtggaatctatgcaatgatagatattcacactctaaatatgaggtgtgtgtatgtgtatgggtggccacagccatgcttacctatgccatttagttggtcttacttaatctgcttaagatttgcatctgtgtacctttgttcagattagttttttttttccagccgatttcctcttagtggctaatgctgttagtgaattttccaactaatttcctctcattggttaatgttgttaatgaattgagagaggtaattgaggaaaggaaatgagtaaatcactgttcagcaacactgatttccgttaacacatcagttatgaatttcagggaattcatctcgccagattcttgataacatgccattcattgcccttaggtgattgaccctattttcttacatggctcaaataaaactagtatgctgttgtatgaatcttttactgaccacaccatccaactataaaaatataacgggacagctttaaaccaaagatcatgtttagaacaatgaaaaattatttgttgtatctaatacacgcctgtattgtgaaaagcttcatttagcaatgatgtaataatttttaacttccaggaaataatctgtgaatggaaagattttttaagattttgagatagtgtttagtctcatgttgggaacacatgaatgtgatgaacatagtgaatactaaagaaaacgcttcagactttcagaatgatggttcagaatttaaaatttttaatcttttctaatttctttttttcagtgtgaaaatagcactttaccaaaagattagccatgaaatggttattttgccagttacatttgatttcttttgtatctgcaatgtaatgagttattttatttcttctgtatttgcagtgtaatgagtttttgtggcaaagtgtattaagcaatttttcattatcttgaagttccacaaagtggagaatatttatattctcacatgcattttaggcacttttgatatgtgaaaatagatgtattttctgatgcatttggttaataaatattaatctg

SEQ ID NO: 24973 - DNA, 601 bp, Homo sapiens
cgatggggcaaatcctgaagcgtacatggctatctctcacagctaaagcatccctcacccctatccagtgcttcttacccctggcgcaagagaatcacctgcggggaggaaaactttcaaaatcccttaaacccaagttgtaaccgcacaactaaatcagaatccttggagctggatctgaaaaaaatacggttgaaagtcgtgcaggtgattacaatgtgtaggcaagccagaaaaccatggctttaacgagcagcttttgttagaaatgatttctccaatgaatgtgaaaacgtttgctgctgaattgtgacctttccattttacctgcttttcctgcaaagtatattttgcagacccaggctgtgcttctccttctgttcctggttcacccagtgccgtgtgtgctcagtgcatcctgtgcacgggtcactgtgtgccctggcctgggtgagcatcattcttcggggagaaccttgatgaaaacaaagctgcattccaaaaagttaaaaccatgctacttactgtgttgaagtaaaaattaaaagacccaggggggctcacccaaaagttaaaacataaataaataacttggaacatt

SEQ ID NO: 24974 - DNA, 1992 bp, Homo sapiens
cgccaacagctgccgtaccgtgccgcgtcgcagccgcacgctagcggggtcaacggcgcggcaggcgcaggggtcctcgccaaggttcggaagaggaccttgaaaatggcttctgggcatgcgccacagcggccgttacgagacgcaaaaccgacgccttggaactgagagcctagagggacggagctcggcgcaccatgaggctcccggggcccaaggccgaccgtgagagcgcacgaggttggcgagccccgcggggaggccgaggcgcgggtgcgggcgccggcgtagccgcggcggtagcgtcacgcagcgaggccgtgcgtgcgcgggcgtcagggcggcgctgagttgaggacgctggcggctccgcgacgagctttgttttttcggttgggcatgctgcttaccgcaggatgatggaagcgacggcccgtacaaagacagaagcgttggtttcactgagtcagtgctgattctctcaaatagagcttgaaggataaatcttcatttttgtttcaacaaaacttcgaaacaaaatggaagaaaataatctacagtgcagtagtgtggttgacggtaattttgaagaagttcccagggagacggcaattcagtttaaacctccactatacagacagcggtaccagttcgttaaaaatttagtggatcaacatgagcctaagaaggttgcagacctgggatgtggtgatacttcactcttaaggctgctaaaagtcaatccatgcattgaattgcttgttggagtagatattaatgaggataaattacgatggagaggggattcgttagctcctttcctgggggattttctgaaacctcgggatctgaatttgaccatcacattgtatcatggctccgttgtggagagagactctcgtttgcttggatttgacttgataacgtgtattgaattaatagaacatttggattcaggtgatctggccagatttcctgaagtggtatttgggtacctgtctccatccatgattgtcatcagcacaccaaactctgaattcaatcccctgtttccatcagtgaccttaagagattcagatcataaatttgagtggaccagaatggagtttcagacctgggctttatatgtggcaaatcgctatgattactctgtggagtttactggtgtcggggaaccaccagctggagctgagaatgttggatactgtacccagataggaatcttccggaaaaatggaggaaaggcaacagaatcatgtctttcagagcagcatgatcagcatgtttataaagctgtttttaccacctcatacccaagcttacagcaggaaaggttctttaaacttgtgttggttaatgaggtgtcccaacaagtggaaagcttaagagtgagccacctgccaaggcggaaagaacaggctggggaacggggtgataagcccaaagacattggtggctcaaaggcccctgtcccatgctttggaccagtcttcacagaggttgagaaggccaagatagagaactctcccacacccttctgtgttggagataaatttttcgtacctctgcagagactccttgcgtatcccaagttgaaccgcttatgtgctaatgaagagatgatgagatcagtcattgctgactcaattcctctgagcagtgatggttctgcagtggtggctgacctgcgtaattattttgatgaacagtttgagttttgaaccatgtttatttcctgaaatttcagggtctcagcgatagttgtgctcacttagaatttagttttttttgtgtaatcctaattcaagtaatgtttttaaagtttcactgcaaaagtctatgttccaagccattggacagacctgcttgagatatggccagactgcagtgagccctgagaaagatatgagggtttaaaacgggtgctttcctttgattttggacttttttgttttctcaagaataaagaagttggatgtggtaatatgttaa

SEQ ID NO: 24975 - DNA, 1291 bp, Homo sapiens
ctttaactcttgaccttgggtgatccatccaccttggcctcccaaagtgttgggattacaggcgtgagccactgtgcctggcccgaataattgttcttaggtcatataagcattattacatattcaaagaagggagaaatcgatacacagatggaaattgtttttgataaatcaattagaaaaataggtgcaagtgaagctagattttattatgtctttctcattaaccattttagaatagaacatttggattcaggtgatctggccagatttcctgaagtggtatttgggtacctgtctccatccatgattgtcatcagcacaccaaactctgaattcaatcccctgtttccatcagtgaccttaagagattcagatcataaatttgagtggaccagaatggagtttcagacctgggctttatatgtggcaaatcgctatgattactctgtggagtttactggtgtcggggaaccaccagctggagctgagaatgttggatactgtacccagataggaatcttccggaaaaatggaggaaaggcaacagaatcatgtctttcagagcagcatgatcagcatgtttataaagctgtttttaccacctcatacccaagcttacagcaggaaaggttctttaaacttgtgttggttaatgaggtgtcccaacaagtggaaagcttaagagtgagccacctgccaaggcggaaagaacaggctggggaacggggtgataagcccaaagacattggtggctcaaaggcccctgtcccatgctttggaccagtcttcacagaggttgagaaggccaagatagagaactctcccacacccttctgtgttggagataaatttttcgtacctctgcagagactccttgcgtatcccaagttgaaccgcttatgtgctaatgaagagatgatgagatcagtcattgctgactcaattcctctgagcagtgatggttctgcagtggtggctgacctgcgtaattattttgatgaacagtttgagttttgaaccatgtttatttcctgaaatttcagggtctcagcgatagttgtgctcacttagaatttagttttttttgtgtaatcctaattcaagtaatgtttttaaagtttcactgcaaaagtctatgttccaagccattggacagacctgcttgagatatggccagactgcagtgagccctgagaaagatatgagggtttaaaacgggtgctttcctttgattttggacttttttgttttctcaagaataaagaagttggatgtggtaatatgttaa

SEQ ID NO: 24976 - DNA, 1771 bp, Homo sapiens
cgccaacagctgccgtaccgtgccgcgtcgcagccgcacgctagcggggtcaacggcgcggcaggcgcaggggtcctcgccaaggttcggaagaggaccttgaaaatggcttctgggcatgcgccacagcggccgttacgagacgcaaaaccgacgccttggaactgagagcctagagggacggagctcggcgcaccatgaggctcccggggcccaaggccgaccgtgagagcgcacgagctgagtcagtgctgattctctcaaatagagcttgaaggataaatcttcatttttgtttcaacaaaacttcgaaacaaaatggaagaaaataatctacagtgcagtagtgtggttgacggtaattttgaagaagttcccagggagacggcaattcagtttaaacctccactatacagacagcggtaccagttcgttaaaaatttagtggatcaacatgagcctaagaaggttgcagacctgggatgtggtgatacttcactcttaaggctgctaaaagtcaatccatgcattgaattgcttgttggagtagatattaatgaggataaattacgatggagaggggattcgttagctcctttcctgggggattttctgaaacctcgggatctgaatttgaccatcacattgtatcatggctccgttgtggagagagactctcgtttgcttggatttgacttgataacgtgtattgaattaatagaacatttggattcaggtgatctggccagatttcctgaagtggtatttgggtacctgtctccatccatgattgtcatcagcacaccaaactctgaattcaatcccctgtttccatcagtgaccttaagagattcagatcataaatttgagtggaccagaatggagtttcagacctgggctttatatgtggcaaatcgctatgattactctgtggagtttactggtgtcggggaaccaccagctggagctgagaatgttggatactgtacccagataggaatcttccggaaaaatggaggaaaggcaacagaatcatgtctttcagagcagcatgatcagcatgtttataaagctgtttttaccacctcatacccaagcttacagcaggaaaggttctttaaacttgtgttggttaatgaggtgtcccaacaagtggaaagcttaagagtgagccacctgccaaggcggaaagaacaggctggggaacggggtgataagcccaaagacattggtggctcaaaggcccctgtcccatgctttggaccagtcttcacagaggttgagaaggccaagatagagaactctcccacacccttctgtgttggagataaatttttcgtacctctgcagagactccttgcgtatcccaagttgaaccgcttatgtgctaatgaagagatgatgagatcagtcattgctgactcaattcctctgagcagtgatggttctgcagtggtggctgacctgcgtaattattttgatgaacagtttgagttttgaaccatgtttatttcctgaaatttcagggtctcagcgatagttgtgctcacttagaatttagttttttttgtgtaatcctaattcaagtaatgtttttaaagtttcactgcaaaagtctatgttccaagccattggacagacctgcttgagatatggccagactgcagtgagccctgagaaagatatgagggtttaaaacgggtgctttcctttgattttggacttttttgttttctcaagaataaagaagttggatgtggtaatatgttaa

SEQ ID NO: 24977 - DNA, 2374 bp, Homo sapiens
cgccaacagctgccgtaccgtgccgcgtcgcagccgcacgctagcggggtcaacggcgcggcaggcgcaggggtcctcgccaaggttcggaagaggaccttgaaaatggcttctgggcatgcgccacagcggccgttacgagacgcaaaaccgacgccttggaactgagagcctagagggacggagctcggcgcaccatgaggctcccggggcccaaggccgaccgtgagagcgcacgaggttggcgagccccgcggggaggccgaggcgcgggtgcgggcgccggcgtagccgcggcggtagcgtcacgcagcgaggccgtgcgtgcgcgggcgtcagggcggcgctgagttgaggacgctggcggctccgcgacgagctttgttttttcggttgggcatgctgcttaccgcaggatgatggaagcgacggcccgtacaaagacagaagcgttggtttcactgagtcagtgctgattctctcaaatagagcttgaaggataaatcttcatttttgtttcaacaaaacttcgaaacaaaatggaagaaaataatctacagtgcagtagtgtggttgacggtaattttgaagaagttcccagggagacggcaattcagtttaaacctccactatacagacagcggtaccagttcgttaaaaatttagtggatcaacatgagcctaagaaggttgcagacctgggatgtggtgatacttcactcttaaggctgctaaaagtcaatccatgcattgaattgcttgttggagtagatattaatgaggataaattacgatggagaggggattcgttagctcctttcctgggggattttctgaaacctcgggatctgaatttgaccatcacattgtatcatggctccgttgtggagagagactctcgtttgcttggatttgacttgataacgtgtattgaattaatagaacatttggattcaggtgatctggccagatttcctgaagtggtatttgggtacctgtctccatccatgattgtcatcagcacaccaaactctgaattcaatcccctgtttccatcagtgaccttaagagattcagatcataaatttgagtggaccagaatggagtttcagacctgggctttatatgtggcaaatcgctatgattactctgtggagtttactggtgtcggggaaccaccagctggagctgagaatgttggatactgtacccagataggaatcttccggaaaaatggaggaaaggcaacagaatcatgtctttcagagcagcatgatcagcatgtttataaagctgtttttaccacctcatacccaagcttacagcaggaaaggttctttaaacttgtgttggttaatgaggtgtcccaacaagtggaaagcttaagagtgagccacctgccaaggcggaaagaacaggctggggaacggggtgataagcccaaagacattggtggctcaaaggcccctgtcccatgctttggaccagtcttcacagaggttgagaaggccaagatagagaactctcccacacccttctgtgttggagataaatttttcgtacctctgcagagactccttgcgtatcccaagttgaaccgcttatgtgctaatgaagagatgatgagatcagtcattgctgactcaattcctctgagcagtgatggttctgcagtggtggctgacctgcgtaattattttgatgaacagtttgagttttgaaccatgtttatttcctgaaatttcagggtctcagcgatagttgtgctcacttagaatttagttttttttgtgtaatcctaattcaagtaatgtttttaaagtttcactgcaaaagtctatgttccaagccattggacagacctgcttgagatatggccagactgcagtgagccctgagaaagatatgagggtttaaaacgggtgctttcctttgattttggacttttttgttttctcaagaataaagaagttggatgtggtaatatgttaaaaaaaaaaaaaaaaaaaaaaaaaaaaaaaaaaaaaaaaaaaaaaaaaaaaacaacaaaaaaaaaaaaaaaaaaaaacaaaaacacaaaaaaaaaacacaaacaataagcagcgcgcgccggcccgcccacgcaccccccggaccggtaacctcggctaactcgccctagtgaactgcagattatttatattacataagcatccgtccacacgtcatagacattaataggtgtatatttatttattaggactcaataatgagccgcttcgtgctccatcaaaaacatcaactctatcgtcggtaaaaaccaccacaagtctcatgactgtctgatactatttttcttaagagctgcactactctactcttgattttggatgaa

SEQ ID NO: 24978 - DNA, 397 bp, Homo sapiens
ccaaaaataggtatattttattatttaaacagtgtctactctgaggtcctcaaaactctttcagggggcccacagatcaaaactattttcataataacaccaagacattgtttgcatctttcattgtcattctcttaggagtgtacagtggagttttccagaaggcatatgccatgtgcatcaccacagcttaaatgcagaaacagacatgaggatctagctgtgtcctactaagccagacattcaggacatctaaaagtgtaaaacaatgccactcttctcactaacttttttgttttggaaaatatatctttcataaaatattgattatgttgatatattacgggtttgttgttattattttaaatgaattaataaataattttctgatttaatt

SEQ ID NO: 24979 - DNA, 10401 bp, Homo sapiens
gtttctctctctggtcggaagcggcggtaatggcggatggtgggttgtggcgccggcggcggctgctgtgagggacgatgagtgcctccttcgtgccgaacggggccagcctggaagattgtcactgtaacctcttctgcctggctgacttgacaggaattaagtggaaaaaatatgtatggcaaggcccaacttctgcccctattctgtttcctgtgacagaagaagaccccattttgagcagttttagtcgctgccttaaggcagatgtacttggtgtttggcggcgagatcaaagacctggaagaagagaattgtggatattttggtggggtgaagaccccagttttgctgaccttattcaccatgacttatcagaagaagaagatggagtgtgggagaatggactttcctatgaatgccgtactctgcttttcaaagcagttcacaatctattggaacggtgtttaatgaacaggaattttgtacgtattggcaagtggtttgtaaagccttatgaaaaagatgaaaaacctataaataaaagtgaacacttgtcctgctccttcacctttttcttgcatggagacagcaatgtttgtaccagtgtggaaattaaccaacatcaacctgtataccttctcagtgaagagcatatcacccttgctcaacagtctaatagcccatttcaagttatcttatgcccatttggactaaatggcactctcacaggacaggcattcaagatgtctgattcagctacaaaaaaattaattggtgaatggaaacagttctatcctatctcatgttgcttgaaggagatgtctgaagaaaaacaggaagatatggattgggaagatgattctttagctgcagtagaagttcttgttgctggtgtccgaatgatctacccagcatgctttgttctagtccctcagtcagacattcctactcctagccctgtgggatccactcactgttcatcttcttgcttgggtgtccaccaagtgcctgcttccacaagagatcctgctatgtcttcggttacgcttacaccacctacgtctcctgaggaagtccaaacagttgatcctcagtctgtccagaagtgggtcaaattttcttcagtatctgatggcttcaactccgatagtactagccaccatggtgggaaaatacccagaaaattagcaaatcatgtggtggatagagtttggcaagaatgcaatatgaacagagcacagaacaagaggaagtattctgcttcatcaggtggtctatgcgaagaagcgacagctgctaaagtggcatcctgggattttgttgaagccacacaaagaacaaattgcagttgtttgaggcacaaaaatctcaagtcaagaaatgctggacaacaaggacaggcaccatctttaggtcagcaacaacaaatacttcctaagcacaagaccaatgagaagcaagaaaagagtgaaaagccacagaaacgccccttgactccttttcaccatcgtgtgtctgttagtgatgatgttggcatggacgcagattcagccagccaaagacttgtgatctctgctccagacagtcaagtgagattttcaaatatccgaactaatgatgtagcaaagactcctcagatgcatggcaccgaaatggcaaattcacctcaaccacccccacttagtcctcacccttgtgatgtggttgatgaaggagtgactaaaacaccttcaactcctcagagtcaacatttttatcaaatgccaacaccagatcccttggttccttctaaaccaatggaagataggatagacagtttgtcccagtctttcccacctcaatatcaggaagctgtagaacctacagtatatgttggtacagcagtaaacttggaagaagatgaagccaatatagcctggaagtattacaagttcccaaagaaaaaagatgtagagtttttaccacctcaacttccaagtgataaattcaaggatgatccagttggaccttttggacaggaaagtgtaacatcagttacagagttaatggtgcaatgtaagaaacctttaaaagtttctgatgaattagtgcagcaatatcaaattaaaaaccagtgtctttcagcaatagcatctgatgcagaacaagaacctaaaattgatccatatgcatttgttgaaggagatgaggaattcctttttcctgataaaaaagatagacaaaatagtgagagagaagctggaaaaaaacacaaggtagaagatgggacatctagtgtaacagtgttatcacatgaagaagatgctatgtcattatttagtccctctatcaagcaagatgctccacgccctactagtcatgcccgtcctccatcaacaagtttgatttatgactcagacctggctgtctcttatactgaccttgataatctcttcaattctgatgaagatgaactaacacctggatctaaaagatcagcaaatggatcagatgataaagccagctgcaaggaatcaaagacaggaaatctggacccgttatcttgcataagcactgcagatcttcataaaatgtatcctacaccaccatcattggaacaacatattatgggattttccccaatgaatatgaataataaagaatatggtagtatggatacaacacctggaggaactgttctagaaggaaatagttctagtataggagcgcagttcaaaattgaggttgatgagggattctgtagccccaaaccttctgaaattaaagatttttcttatgtctataagcctgaaaattgtcaaattctagtgggatgttccatgtttgcacctctaaaaactctaccaagccaatatctgccccttatcaaattgccagaagagtgtatttaccgtcagagttggactgttggaaaattggaattgctttcttcagggccttcaatgccattcatcaaagagggtgatggaagtaatatggatcaagaatatggcactgcttatacacctcaaactcatacttcttgtgggatgcctcctagcagtgcacctcctagtaacagcggagcaggaattcttccttctccatccacccctcggtttccaactccaaggactccaaggactcctcggactcctcgtggagctggtggacctgctagtgctcaaggttcagtcaaatatgaaaattcagacttgtattcaccagcttctaccccatctacatgcagaccccttaattctgttgaacctgcaactgtcccttccatccctgaagcacacagtctttatgtaaacctcatcctttcagaatcagttatgaatttgtttaaagactgtaactctgatagttgttgcatctgtgtttgcaacatgaacatcaagggtgccgatgttggagtttacattccagatccaacgcaggaagcacaatataggtgtacctgtggcttcagtgctgtcatgaacagaaaatttggaaacaattcaggattatttcttgaagatgaactagatatcataggacgcaatacagactgtggcaaagaagcagaaaaacgttttgaagctctcagggctacctctgctgaacatgttaatggaggactaaaggaatctgaaaaattatctgatgatttgatattattgctacaagatcagtgcactaatttattttcaccctttggagcagcagaccaagatccttttcctaaaagtggtgtaattagcaattgggtacgtgttgaagagcgtgactgttgcaatgactgctaccttgcattagaacatgggcgtcagttcatggataacatgtcaggaggaaaagttgatgaagcacttgtgaaaagttcatgcttacacccctggtccaaaagaaacgatgtgagtatgcagtgctcacaggatatacttcgaatgctcctctctcttcagccagttcttcaggatgccattcagaaaaaaagaacagtaagaccttggggtgttcagggtcctctcacttggcaacaatttcataaaatggctggccgaggctcttatggaactgatgaatccccagaaccactgccaatccccacatttttgttgggttatgattatgattatctggtgctttctccatttgctcttccttattgggagagacttatgctggaaccctatggatctcaaagagatatagcctatgttgtactgtgtccagaaaatgaagccttgttaaatggagcaaaaagcttttttagagatcttactgcaatatatgagtcctgtcgattaggtcaacatagacctgtttctcgactgttaacagatgggatcatgagagttggatctactgcatcaaagaaactatcagaaaagttggtagcagaatggttttctcaggcagctgatggtaacaatgaagcattttctaaactcaagctttatgcacaagtctgcagatatgacctaggtccttatcttgcttccctgccattggacagctctctactttcccagccaaatttagttgcccctacaagtcagtctttgattactccacctcagatgacaaatactggaaatgctaatactccatctgccaccttagcatctgcagcgagcagcactatgacagtgacttcaggtgttgccatatctacttcagttgccacagctaattcaactttgaccacagcttcaacttcatcttcatcatcctccaacttgaatagtggagtatcatcaaataaactaccttcgtttccaccctttggcagtatgaacagtaatgctgcaggatccatgtctacacaagcaaatacagttcagagtggtcagctaggagggcaacagacatcagctctacagacagctgggatttctggagaatcatcttcacttcccactcagccgcatcctgatgtgtctgaaagcacgatggatcgggataaagtgggaatccccacagatggtgattcacatgcagtcacgtatccacctgcaattgttgtttatataattgatccttttacatacgaaaatacagacgagagcactaactcttctagtgtgtggacattggggctacttcgatgctttctagaaatggtccagactcttcctcctcatatcaagagtactgtttctgtacagattattccttgtcagtacctgttgcaacctgtgaagcatgaagatagagaaatctatccccagcatttaaaatccctggctttttcggcctttacccagtgtcggaggccacttccaacatcaaccaatgtgaaaacattgactggctttggtccaggtttagccatggaaactgcccttagaagtcctgatagaccagagtgtattcgactttatgcacctccttttattctggctccagtgaaggacaaacagacagagctaggagaaacatttggagaagctggacagaaatataatgttctttttgtgggatactgtttatcacatgatcaaaggtggattcttgcatcttgcacagatctatatggagaacttttagaaacttgtatcattaacatcgatgttccaaatagggctcgtcggaaaaaaagttctgctagaaaatttggtctacagaaactttgggagtggtgcttaggacttgtacaaatgagttcattgccatggagagttgtaattggtcgtctaggaaggattggtcatggagaattgaaagattggagctgtttgctgagtcgtcgaaacttgcagtctctaagtaaaaggctcaaagacatgtgtagaatgtgtggtatatctgctgcagactcccctagcattctcagtgcttgcttggtggcaatggagccgcaaggctcttttgttattatgccagattctgtgtcaactggttctgtatttggaagaagcacgactctaaatatgcagacatctcagctaaataccccacaggatacatcatgtactcatatacttgtgtttcctacttctgcttctgtgcaagtagcttcagctacttataccactgaaaatttggatttagctttcaatcccaacaatgatggagcagatggaatgggtatctttgatttgttagacacaggagatgatcttgaccctgatatcattaatatccttcctgcttctccaactggttctcctgtacattctccaggatctcattacccccatggaggtgatgcgggcaagggtcagagtactgatcggctactatcaacagaacctcatgaggaagtacctaatattcttcagcaaccattggcccttggttactttgtatcaactgccaaagcaggtccattacctgactggttctggtcagcatgtcctcaagcacaatatcagtgtcccctttttcttaaggcctctttgcacctccacgtgccttcagtgcaatctgacgagctgcttcacagtaaacactcccacccacttgactcaaatcagacttcagatgtcctcaggtttgttttggaacagtacaatgcactctcctggctaacctgtgaccctgcaacccaggacagacgctcatgtctcccaattcattttgtggtgctgaatcagttatataactttattatgaatatgctgtgatcttcatttgatggaactgtgcaagaaaagaacaaggaaaaatggatgtttcgctgcaggattaagttacaattatcttctcagtgaaggtcatttgtgatggggtctaattcttattacttcaacaaatattgttttgacttggggggaggggctataaccctgctatttttcattgactctattgaactctttaggatgatgactgatcatacaaaacgtattataacattttcgtagcaaaattaaccttttttttttccagtcacagtatttgtgaaaagtaatgagccatagtacccagtcatgttaaatgaatattaaaagcatggagaggaaacatgaggaacaatgaatttcaacatatggcttcagaacatgaagatgttcttgtatggattatagtatctagtattcaaaaatgcctgcatctcttctcttatttattgtaagtttttaaatgtataaattgtcttatatttcttaacctcttttataaaaattttcctagaaggtttatactgccttcttgctttaaagcaattggtctaaaatatatgtaatcgtcttaattaaaaagttgcagtagggttgcttttagagtattatttttttgtaagggggtgggtgggacagtaaatttgtattgtctcgatgtacagtttaacggggatagagggggaataatgtccataccattgtgtgtggaggatttacagctaagctgtagttgcagagtacatgtacagtaatgaagttcactgtgtttataaattgaaaaggtaccaggtcttacagcattttatatatcacatctttacagaataacatgatggcaatatacaagtggtattgttaggtggtttaacttagaataaaatgagaattcttcagttatattttgtactatggtttagggctatgactaatatttcaggccatttccggtgaaagaaacttagttttacaagaaaaaccatttgctactgaatgcttaaactaattttagtgtttaatgttacatgcttaaatttttttcagttttaacagtggcatatttaggcatggaaatattattatgaaatttattttcaggatctgctataaggttgaaatttagcccagctctaggcattttacaaattatttttcaagcagtcattcttgattgtttgacttttttttttaaattaaagattgggaatgtatgtgagagtatgcatatgtatgggtgtgtgtgtgtgcgcgcaatcaaactgtggtgtaaatagattctcagtgaattctgggtattcagactctattccactagtgaaagaaccattttttaaacttcccttgccttttttatttatttaattttcttggtttggagatgtcagtcccaaacaccagagtctgtacttttctataacacagctcagattaaggtagggcatatgccaaggaggttctcacctccctaaagaagggacttgaattttagggactttaattcacccctccttcaatacaactttcccccttcttgtttgcacatgccaagataactgcttttatgcaggctgtacccccttgaaaaatcctttctacagtgctgctcacaaaagagcccaagttcgcctcctacctgcattgctgacttgaattcacagtcgccgagtctacctagctttcttggaagcagtctagcaaaatttctatttgtacgttcactaattatctacaaggacaaaatcagttgtatttacaaaactctacttcagtgtttgttttagtttttttttttactgaaacttgtttttgtgaatactctgtgcttagaattaaatatcactttcttatgaacaacataacttcttcagattgtgtatatgaaaacattagcaagtcttgttttttctatgaagcaaacacaattggtgacaaaggttgtcaatcatttcttcaaaattataatgcagttctaatggtcagcatattttgatattaaatttaaagatcacctctctgcatttgtttttaaattatgctaatacaccacacattatgttggtatgttttgttctgtactttctttaaaaaaaaaaaaaaaacttgtctgagatttgaaggaaaatgtgcttatttggaatttccataaaaagagtatcctttttatacacttaatagtgactttacaaaataaaagttatattctcagttgtttaaaatcactaacctatgataaccacacctcaatttgaaagtagatttaaaattattccctgacaggttatttaatatggagccataaggagggaacccagtacacaattattttttatttgggaatcagggaatagttcccaaatatacaggatttattgataagattttttttcttcccttcatatatccattcaaactcaatggaaagttattaaataaccattagaaaagctcagtagacttatttgagaaattaagccttgtgcaggatgatggatttgacttactaatgtactgtcacagacaaatatgggtagttttgtttaaataggtaagcaaaatattatactttatagcagtggattaccaacaccttgacttctttgttacagtgctaacatcttttttttgtgcaggtatccatgattattaagcagggtggaagttcagtattttgtcatttaaaaagattagttatataatgtctgcttccagccagtgagaaacatctagccatacctttcttatgcaagccattgagttatcaggactgtgaattaacactgtatgaataaatttctgtacaccttattgtttggccagaaggccaccaagtgtacttatatgtaatccttaaattttaaagtagctgtaatttttaaatatttctaaacttttcttaaaccactaaaattaagctcttactacttagtcaactatcctcagctgtattcgtactcaattgtcagtatggcacagattactgtattaaaatattctcctttcgtcttcatatttaccttctgaggtaattttttaacttaatgtgttactacaaagatttgcagatctttaatcaagcactatgttaatactgtaatatcagaatactatgttgcattatttaaaatgttcaaattgaatagattaaaaagtttttaaatgctattgcatcatataatttgctattcatccactatggcattgcatatcaatcagttaatacacttaatgttgcatgagtgatattttggtctgggtttcctcttaagattttagtttgtctgaattaaggaaaaatgtttttaatatacattcttattttgtcccacccctccagaaataagctggaaatcttaactttttggggggtcttttttggtgttttaatgggcccagaactgtggtttaaatttttatgtatgtattttcttttttgtggagtataaatttaaaaactggatttgggacctaaaatactcctcaggttgatgtattcatgaagttttaaaacatctttagttttcaaagtaaactggatatgtggaccttaaagttattgagtttaagctacaaattgtaacgtcattactggacatgtcagcatcaaccctctcaaaatagcttggtcactttatgaaggggcgttttaaagttgttgtttagcagtgacatttaatatggtccaattgcttttctttttaacgtgacaaaaagagaataaggaacaaacactattgctgccgaatgccataacactgagttgtacaaattgtgattgaggaaatgaaaaggtttatacttttta

SEQ ID NO: 24980 - DNA, 9559 bp, Homo sapiens
gtttctctctctggtcggaagcggcggtaatggcggatggtgggttgtggcgccggcggcggctgctgtgagggacgatgagtgcctccttcgtgccgaacggggccagcctggaagattgtcactgtaacctcttctgcctggctgacttgacaggaattaagtggaaaaaatatgtatggcaaggcccaacttctgcccctattctgtttcctgtgacagaagaagaccccattttgagcagttttagtcgctgccttaaggcagatgtacttggtgtttggcggcgagatcaaagacctggaagaagagaattgtggatattttggtggggtgaagaccccagttttgctgaccttattcaccatgacttatcagaagaagaagatggagtgtgggagaatggactttcctatgaatgccgtactctgcttttcaaagcagttcacaatctattggaacggtgtttaatgaacaggaattttgtacgtattggcaagtggtttgtaaagccttatgaaaaagatgaaaaacctataaataaaagtgaacacttgtcctgctccttcacctttttcttgcatggagacagcaatgtttgtaccagtgtggaaattaaccaacatcaacctgtataccttctcagtgaagagcatatcacccttgctcaacagtctaatagcccatttcaagttatcttatgcccatttggactaaatggcactctcacaggacaggcattcaagatgtctgattcagctacaaaaaaattaattggtgaatggaaacagttctatcctatctcatgttgcttgaaggagatgtctgaagaaaaacaggaagatatggattgggaagatgattctttagctgcagtagaagttcttgttgctggtgtccgaatgatctacccagcatgctttgttctagtccctcagtcagacattcctactcctagccctgtgggatccactcactgttcatcttcttgcttgggtgtccaccaagtgcctgcttccacaagagatcctgctatgtcttcggttacgcttacaccacctacgtctcctgaggaagtccaaacagttgatcctcagtctgtccagaagtgggtcaaattttcttcagtatctgatggcttcaactccgatagtactagccaccatggtgggaaaatacccagaaaattagcaaatcatgtggtggatagagtttggcaagaatgcaatatgaacagagcacagaacaagaggaagtattctgcttcatcaggtggtctatgcgaagaagcgacagctgctaaagtggcatcctgggattttgttgaagccacacaaagaacaaattgcagttgtttgaggcacaaaaatctcaagtcaagaaatgctggacaacaaggacaggcaccatctttaggtcagcaacaacaaatacttcctaagcacaagaccaatgagaagcaagaaaagagtgaaaagccacagaaacgccccttgactccttttcaccatcgtgtgtctgttagtgatgatgttggcatggacgcagattcagccagccaaagacttgtgatctctgctccagacagtcaagtgagattttcaaatatccgaactaatgatgtagcaaagactcctcagatgcatggcaccgaaatggcaaattcacctcaaccacccccacttagtcctcacccttgtgatgtggttgatgaaggagtgactaaaacaccttcaactcctcagagtcaacatttttatcaaatgccaacaccagatcccttggttccttctaaaccaatggaagataggatagacagtttgtcccagtctttcccacctcaatatcaggaagctgtagaacctacagtatatgttggtacagcagtaaacttggaagaagatgaagccaatatagcctggaagtattacaagttcccaaagaaaaaagatgtagagtttttaccacctcaacttccaagtgataaattcaaggatgatccagttggaccttttggacaggaaagtgtaacatcagttacagagttaatggtgcaatgtaagaaacctttaaaagtttctgatgaattagtgcagcaatatcaaattaaaaaccagtgtctttcagcaatagcatctgatgcagaacaagaacctaaaattgatccatatgcatttgttgaaggagatgaggaattcctttttcctgataaaaaagatagacaaaatagtgagagagaagctggaaaaaaacacaaggtagaagatgggacatctagtgtaacagtgttatcacatgaagaagatgctatgtcattatttagtccctctatcaagcaagatgctccacgccctactagtcatgcccgtcctccatcaacaagtttgatttatgactcagacctggctgtctcttatactgaccttgataatctcttcaattctgatgaagatgaactaacacctggatctaaaagatcagcaaatggatcagatgataaagccagctgcaaggaatcaaagacaggaaatctggacccgttatcttgcataagcactgcagatcttcataaaatgtatcctacaccaccatcattggaacaacatattatgggattttccccaatgaatatgaataataaagaatatggtagtatggatacaacacctggaggaactgttctagaaggaaatagttctagtataggagcgcagttcaaaattgaggttgatgagggattctgtagccccaaaccttctgaaattaaagatttttcttatgtctataagcctgaaaattgtcaaattctagtgggatgttccatgtttgcacctctaaaaactctaccaagccaatatctgccccttatcaaattgccagaagagtgtatttaccgtcagagttggactgttggaaaattggaattgctttcttcagggccttcaatgccattcatcaaagagggtgatggaagtaatatggatcaagaatatggcactgcttatacacctcaaactcatacttcttgtgggatgcctcctagcagtgcacctcctagtaacagcggagcaggaattcttccttctccatccacccctcggtttccaactccaaggactccaaggactcctcggactcctcgtggagctggtggacctgctagtgctcaaggttcagtcaaatatgaaaattcagacttgtattcaccagcttctaccccatctacatgcagaccccttaattctgttgaacctgcaactgtcccttccatccctgaagcacacagtctttatgtaaacctcatcctttcagaatcagttatgaatttgtttaaagactgtaactctgatagttgttgcatctgtgtttgcaacatgaacatcaagggtgccgatgttggagtttacattccagatccaacgcaggaagcacaatataggtgtacctgtggcttcagtgctgtcatgaacagaaaatttggaaacaattcaggattatttcttgaagatgaactagatatcataggacgcaatacagactgtggcaaagaagcagaaaaacgttttgaagctctcagggctacctctgctgaacatgttaatggaggactaaaggaatctgaaaaattatctgatgatttgatattattgctacaagatcagtgcactaatttattttcaccctttggagcagcagaccaagatccttttcctaaaagtggtgtaattagcaattgggtacgtgttgaagagcgtgactgttgcaatgactgctaccttgcattagaacatgggcgtcagttcatggataacatgtcaggaggaaaagttgatgaagcacttgtgaaaagttcatgcttacacccctggtccaaaagaaacgatgtgagtatgcagtgctcacaggatatacttcgaatgctcctctctcttcagccagttcttcaggatgccattcagaaaaaaagaacagtaagaccttggggtgttcagggtcctctcacttggcaacaatttcataaaatggctggccgaggctcttatggaactgatgaatccccagaaccactgccaatccccacatttttgttgggttatgattatgattatctggtgctttctccatttgctcttccttattgggagagacttatgctggaaccctatggatctcaaagagatatagcctatgttgtactgtgtccagaaaatgaagccttgttaaatggagcaaaaagcttttttagagatcttactgcaatatatgagtcctgtcgattaggtcaacatagacctgtttctcgactgttaacagatgggatcatgagagttggatctactgcatcaaagaaactatcagaaaagttggtagcagaatggttttctcaggcagctgatggtaacaatgaagcattttctaaactcaagctttatgcacaagtctgcagatatgacctaggtccttatcttgcttccctgccattggacagctctctactttcccagccaaatttagttgcccctacaagtcagtctttgattactccacctcagatgacaaatactggaaatgctaatactccatctgccaccttagcatctgcagcgagcagcactatgacagtgacttcaggtgttgccatatctacttcagttgccacagctaattcaactttgaccacagcttcaacttcatcttcatcatcctccaacttgaatagtggagtatcatcaaataaactaccttcgtttccaccctttggcagtatgaacagtaatgctgcaggatccatgtctacacaagcaaatacagttcagagtggtcagctaggagggcaacagacatcagctctacagacagctgggatttctggagaatcatcttcacttcccactcagccgcatcctgatgtgtctgaaagcacgatggatcgggataaagtgggaatccccacagatggtgattcacatgcagtcacgtatccacctgcaattgttgtttatataattgatccttttacatacgaaaatacagacgagagcactaactcttctagtgtgtggacattggggctacttcgatgctttctagaaatggtccagactcttcctcctcatatcaagagtactgtttctgtacagattattccttgtcagtacctgttgcaacctgtgaagcatgaagatagagaaatctatccccagcatttaaaatccctggctttttcggcctttacccagtgtcggaggccacttccaacatcaaccaatgtgaaaacattgactggctttggtccaggtttagccatggaaactgcccttagaagtcctgatagaccagagtgtattcgactttatgcacctccttttattctggctccagtgaaggacaaacagacagagctaggagaaacatttggagaagctggacagaaatataatgttctttttgtgggatactgtttatcacatgatcaaaggtggattcttgcatcttgcacagatctatatggagaacttttagaaacttgtatcattaacatcgatgttccaaatagggctcgtcggaaaaaaagttctgctagaaaatttggtctacagaaactttgggagtggtgcttaggacttgtacaaatgagttcattgccatggagagttgtaattggtcgtctaggaaggattggtcatggagaattgaaagattggagctgtttgctgagtcgtcgaaacttgcagtctctaagtaaaaggctcaaagacatgtgtagaatgtgtggtatatctgctgcagactcccctagcattctcagtgcttgcttggtggcaatggagccgcaaggctcttttgttattatgccagattctgtgtcaactggttctgtatttggaagaagcacgactctaaatatgcagacatctcagctaaataccccacaggatacatcatgtactcatatacttgtgtttcctacttctgcttctgtgcaagtagcttcagctacttataccactgaaaatttggatttagctttcaatcccaacaatgatggagcagatggaatgggtatctttgatttgttagacacaggagatgatcttgaccctgatatcattaatatccttcctgcttctccaactggttctcctgtacattctccaggatctcattacccccatggaggtgatgcgggcaagggtcagagtactgatcggctactatcaacagaacctcatgaggaagtacctaatattcttcagcaaccattggcccttggttactttgtatcaactgccaaagcaggtccattacctgactggttctggtcagcatgtcctcaagcacaatatcagtgtcccctttttcttaaggcctctttgcacctccacgtgccttcagtgcaatctgacgagctgcttcacagtaaacactcccacccacttgactcaaatcagacttcagatgtcctcaggtttgttttggaacagtacaatgcactctcctggctaacctgtgaccctgcaacccaggacagacgctcatgtctcccaattcattttgtggtgctgaatcagttatataactttattatgaatatgctgtgatcttcatttgatggaactgtgcaagaaaagaacaaggaaaaatggatgtttcgctgcaggattaagttacaattatcttctcagtgaaggtcatttgtgatggggtctaattcttattacttcaacaaatattgttttgacttggggggaggggctataaccctgctatttttcattgactctattgaactctttaggatgatgactgatcatacaaaacgtattataacattttcgtagcaaaattaaccttttttttttccagtcacagtatttgtgaaaagtaatgagccatagtacccagtcatgttaaatgaatattaaaagcatggagaggaaacatgaggaacaatgaatttcaacatatggcttcagaacatgaagatgttcttgtatggattatagtatctagtattcaaaaatgcctgcatctcttctcttatttattgtaagtttttaaatgtataaattgtcttatatttcttaacctcttttataaaaattttcctagaaggtttatactgccttcttgctttaaagcaattggtctaaaatatatgtaatcgtcttaattaaaaagttgcagtagggttgcttttagagtattatttttttgtaagggggtgggtgggacagtaaatttgtattgtctcgatgtacagtttaacggggatagagggggaataatgtccataccattgtgtgtggaggatttacagctaagctgtagttgcagagtacatgtacagtaatgaagttcactgtgtttataaattgaaaaggtaccaggtcttacagcattttatatatcacatctttacagaataacatgatggcaatatacaagtggtattgttaggtggtttaacttagaataaaatgagaattcttcagttatattttgtactatggtttagggctatgactaatatttcaggccatttccggtgaaagaaacttagttttacaagaaaaaccatttgctactgaatgcttaaactaattttagtgtttaatgttacatgcttaaatttttttcagttttaacagtggcatatttaggcatggaaatattattatgaaatttattttcaggatctgctataaggttgaaatttagcccagctctaggcattttacaaattatttttcaagcagtcattcttgattgtttgacttttttttttaaattaaagattgggaatgtatgtgagagtatgcatatgtatgggtgtgtgtgtgtgcgcgcaatcaaactgtggtgtaaatagattctcagtgaattctgggtattcagactctattccactagtgaaagaaccattttttaaacttcccttgccttttttatttatttaattttcttggtttggagatgtcagtcccaaacaccagagtctgtacttttctataacacagctcagattaaggtagggcatatgccaaggaggttctcacctccctaaagaagggacttgaattttagggactttaattcacccctccttcaatacaactttcccccttcttgtttgcacatgccaagataactgcttttatgcaggctgtacccccttgaaaaatcctttctacagtgctgctcacaaaagagcccaagttcgcctcctacctgcattgctgacttgaattcacagtcgccgagtctacctagctttcttggaagcagtctagcaaaatttctatttgtacgttcactaattatctacaaggacaaaatcagttgtatttacaaaactctacttcagtgtttgttttagtttttttttttactgaaacttgtttttgtgaatactctgtgcttagaattaaatatcactttcttatgaacaacataacttcttcagattgtgtatatgaaaacattagcaagtcttgttttttctatgaagcaaacacaattggtgacaaaggttgtcaatcatttcttcaaaattataatgcagttctaatggtcagcatattttgatattaaatttaaagatcacctctctgcatttgtttttaaattatgctaatacaccacacattatgttggtatgttttgttctgtactttctttaaaaaaaaaaaaaaaacttgtctgagatttgaaggaaaatgtgcttatttggaatttccataaaaagagtatcctttttatacacttaatagtgactttacaaaataaaagttatattctcagttgtttaaaatcactaacctatgataaccacacctcaatttgaaagtagatttaaaattattccctgacaggttatttaatatggagccataaggagggaacccagtacacaattattttttatttgggaatcagggaatagttcccaaatatacaggatttattgataagattttttttcttcccttcatatatccattcaaactcaatggaaagttattaaataaccattagaaaagctcagtagacttatttgagaaattaagccttgtgcaggatgatggatttgacttactaatgtactgtcacagacaaatatgggtagttttgtttaaataggtaagcaaaatattatactttatagcagtggattaccaacaccttgacttctttgttacagtgctaacatcttttttttgtgcaggtatccatgattattaagcagggtggaagttcagtattttgtcatttaaaaagattagttatataatgtctgcttccagccagtgagaaacatctagccatacctttcttatgcaagccattgagttatcaggactgtgaattaacactgtatgaataaatttctgtacaccttattgtttggccagaaggccaccaagtgtacttatatgtaatccttaaattttaaagtagctgtaatttttaaatatttctaaacttttcttaaaccactaaaattaagctcttaaaaaaaagtcaaaaatcctctctgcgtttgggggatcggtat

SEQ ID NO: 24981 - DNA, 9635 bp, Homo sapiens
acggaatctcgctctgtcgctgctcaggctggagtgcaatggcgtgatctctgctcactgcaacctccacctcccgggctcaagcagttctcctgcctcaccctcccaagtagctgggattacagctggtgtccgaatgatctacccagcatgctttgttctagtccctcagtcagacattcctactcctagccctgtgggatccactcactgttcatcttcttgcttgggtgtccaccaagtgcctgcttccacaagagatcctgctatgtcttcggttacgcttacaccacctacgtctcctgaggaagtccaaacagttgatcctcagtctgtccagaagtgggtcaaattttcttcagtatctgatggcttcaactccgatagtactagccaccatggtgggaaaatacccagaaaattagcaaatcatgtggtggatagagtttggcaagaatgcaatatgaacagagcacagaacaagaggaagtattctgcttcatcaggtggtctatgcgaagaagcgacagctgctaaagtggcatcctgggattttgttgaagccacacaaagaacaaattgcagttgtttgaggcacaaaaatctcaagtcaagaaatgctggacaacaaggacaggcaccatctttaggtcagcaacaacaaatacttcctaagcacaagaccaatgagaagcaagaaaagagtgaaaagccacagaaacgccccttgactccttttcaccatcgtgtgtctgttagtgatgatgttggcatggacgcagattcagccagccaaagacttgtgatctctgctccagacagtcaagtgagattttcaaatatccgaactaatgatgtagcaaagactcctcagatgcatggcaccgaaatggcaaattcacctcaaccacccccacttagtcctcacccttgtgatgtggttgatgaaggagtgactaaaacaccttcaactcctcagagtcaacatttttatcaaatgccaacaccagatcccttggttccttctaaaccaatggaagataggatagacagtttgtcccagtctttcccacctcaatatcaggaagctgtagaacctacagtatatgttggtacagcagtaaacttggaagaagatgaagccaatatagcctggaagtattacaagttcccaaagaaaaaagatgtagagtttttaccacctcaacttccaagtgataaattcaaggatgatccagttggaccttttggacaggaaagtgtaacatcagttacagagttaatggtgcaatgtaagaaacctttaaaagtttctgatgaattagtgcagcaatatcaaattaaaaaccagtgtctttcagcaatagcatctgatgcagaacaagaacctaaaattgatccatatgcatttgttgaaggagatgaggaattcctttttcctgataaaaaagatagacaaaatagtgagagagaagctggaaaaaaacacaaggtagaagatgggacatctagtgtaacagtgttatcacatgaagaagatgctatgtcattatttagtccctctatcaagcaagatgctccacgccctactagtcatgcccgtcctccatcaacaagtttgatttatgactcagacctggctgtctcttatactgaccttgataatctcttcaattctgatgaagatgaactaacacctggatctaaaagatcagcaaatggatcagatgataaagccagctgcaaggaatcaaagacaggaaatctggacccgttatcttgcataagcactgcagatcttcataaaatgtatcctacaccaccatcattggaacaacatattatgggattttccccaatgaatatgaataataaagaatatggtagtatggatacaacacctggaggaactgttctagaaggaaatagttctagtataggagcgcagttcaaaattgaggttgatgagggattctgtagccccaaaccttctgaaattaaagatttttcttatgtctataagcctgaaaattgtcaaattctagtgggatgttccatgtttgcacctctaaaaactctaccaagccaatatctgccccttatcaaattgccagaagagtgtatttaccgtcagagttggactgttggaaaattggaattgctttcttcagggccttcaatgccattcatcaaagagggtgatggaagtaatatggatcaagaatatggcactgcttatacacctcaaactcatacttcttgtgggatgcctcctagcagtgcacctcctagtaacagcggagcaggaattcttccttctccatccacccctcggtttccaactccaaggactccaaggactcctcggactcctcgtggagctggtggacctgctagtgctcaaggttcagtcaaatatgaaaattcagacttgtattcaccagcttctaccccatctacatgcagaccccttaattctgttgaacctgcaactgtcccttccatccctgaagcacacagtctttatgtaaacctcatcctttcagaatcagttatgaatttgtttaaagactgtaactctgatagttgttgcatctgtgtttgcaacatgaacatcaagggtgccgatgttggagtttacattccagatccaacgcaggaagcacaatataggtgtacctgtggcttcagtgctgtcatgaacagaaaatttggaaacaattcaggattatttcttgaagatgaactagatatcataggacgcaatacagactgtggcaaagaagcagaaaaacgttttgaagctctcagggctacctctgctgaacatgttaatggaggactaaaggaatctgaaaaattatctgatgatttgatattattgctacaagatcagtgcactaatttattttcaccctttggagcagcagaccaagatccttttcctaaaagtggtgtaattagcaattgggtacgtgttgaagagcgtgactgttgcaatgactgctaccttgcattagaacatgggcgtcagttcatggataacatgtcaggaggaaaagttgatgaagcacttgtgaaaagttcatgcttacacccctggtccaaaagaaacgatgtgagtatgcagtgctcacaggatatacttcgaatgctcctctctcttcagccagttcttcaggatgccattcagaaaaaaagaacagtaagaccttggggtgttcagggtcctctcacttggcaacaatttcataaaatggctggccgaggctcttatggaactgatgaatccccagaaccactgccaatccccacatttttgttgggttatgattatgattatctggtgctttctccatttgctcttccttattgggagagacttatgctggaaccctatggatctcaaagagatatagcctatgttgtactgtgtccagaaaatgaagccttgttaaatggagcaaaaagcttttttagagatcttactgcaatatatgagtcctgtcgattaggtcaacatagacctgtttctcgactgttaacagatgggatcatgagagttggatctactgcatcaaagaaactatcagaaaagttggtagcagaatggttttctcaggcagctgatggtaacaatgaagcattttctaaactcaagctttatgcacaagtctgcagatatgacctaggtccttatcttgcttccctgccattggacagctctctactttcccagccaaatttagttgcccctacaagtcagtctttgattactccacctcagatgacaaatactggaaatgctaatactccatctgccaccttagcatctgcagcgagcagcactatgacagtgacttcaggtgttgccatatctacttcagttgccacagctaattcaactttgaccacagcttcaacttcatcttcatcatcctccaacttgaatagtggagtatcatcaaataaactaccttcgtttccaccctttggcagtatgaacagtaatgctgcaggatccatgtctacacaagcaaatacagttcagagtggtcagctaggagggcaacagacatcagctctacagacagctgggatttctggagaatcatcttcacttcccactcagccgcatcctgatgtgtctgaaagcacgatggatcgggataaagtgggaatccccacagatggtgattcacatgcagtcacgtatccacctgcaattgttgtttatataattgatccttttacatacgaaaatacagacgagagcactaactcttctagtgtgtggacattggggctacttcgatgctttctagaaatggtccagactcttcctcctcatatcaagagtactgtttctgtacagattattccttgtcagtacctgttgcaacctgtgaagcatgaagatagagaaatctatccccagcatttaaaatccctggctttttcggcctttacccagtgtcggaggccacttccaacatcaaccaatgtgaaaacattgactggctttggtccaggtttagccatggaaactgcccttagaagtcctgatagaccagagtgtattcgactttatgcacctccttttattctggctccagtgaaggacaaacagacagagctaggagaaacatttggagaagctggacagaaatataatgttctttttgtgggatactgtttatcacatgatcaaaggtggattcttgcatcttgcacagatctatatggagaacttttagaaacttgtatcattaacatcgatgttccaaatagggctcgtcggaaaaaaagttctgctagaaaatttggtctacagaaactttgggagtggtgcttaggacttgtacaaatgagttcattgccatggagagttgtaattggtcgtctaggaaggattggtcatggagaattgaaagattggagctgtttgctgagtcgtcgaaacttgcagtctctaagtaaaaggctcaaagacatgtgtagaatgtgtggtatatctgctgcagactcccctagcattctcagtgcttgcttggtggcaatggagccgcaaggctcttttgttattatgccagattctgtgtcaactggttctgtatttggaagaagcacgactctaaatatgcagacatctcagctaaataccccacaggatacatcatgtactcatatacttgtgtttcctacttctgcttctgtgcaagtagcttcagctacttataccactgaaaatttggatttagctttcaatcccaacaatgatggagcagatggaatgggtatctttgatttgttagacacaggagatgatcttgaccctgatatcattaatatccttcctgcttctccaactggttctcctgtacattctccaggatctcattacccccatggaggtgatgcgggcaagggtcagagtactgatcggctactatcaacagaacctcatgaggaagtacctaatattcttcagcaaccattggcccttggttactttgtatcaactgccaaagcaggtccattacctgactggttctggtcagcatgtcctcaagcacaatatcagtgtcccctttttcttaaggcctctttgcacctccacgtgccttcagtgcaatctgacgagctgcttcacagtaaacactcccacccacttgactcaaatcagacttcagatgtcctcaggtttgttttggaacagtacaatgcactctcctggctaacctgtgaccctgcaacccaggacagacgctcatgtctcccaattcattttgtggtgctgaatcagttatataactttattatgaatatgctgtgatcttcatttgatggaactgtgcaagaaaagaacaaggaaaaatggatgtttcgctgcaggattaagttacaattatcttctcagtgaaggtcatttgtgatggggtctaattcttattacttcaacaaatattgttttgacttggggggaggggctataaccctgctatttttcattgactctattgaactctttaggatgatgactgatcatacaaaacgtattataacattttcgtagcaaaattaaccttttttttttccagtcacagtatttgtgaaaagtaatgagccatagtacccagtcatgttaaatgaatattaaaagcatggagaggaaacatgaggaacaatgaatttcaacatatggcttcagaacatgaagatgttcttgtatggattatagtatctagtattcaaaaatgcctgcatctcttctcttatttattgtaagtttttaaatgtataaattgtcttatatttcttaacctcttttataaaaattttcctagaaggtttatactgccttcttgctttaaagcaattggtctaaaatatatgtaatcgtcttaattaaaaagttgcagtagggttgcttttagagtattatttttttgtaagggggtgggtgggacagtaaatttgtattgtctcgatgtacagtttaacggggatagagggggaataatgtccataccattgtgtgtggaggatttacagctaagctgtagttgcagagtacatgtacagtaatgaagttcactgtgtttataaattgaaaaggtaccaggtcttacagcattttatatatcacatctttacagaataacatgatggcaatatacaagtggtattgttaggtggtttaacttagaataaaatgagaattcttcagttatattttgtactatggtttagggctatgactaatatttcaggccatttccggtgaaagaaacttagttttacaagaaaaaccatttgctactgaatgcttaaactaattttagtgtttaatgttacatgcttaaatttttttcagttttaacagtggcatatttaggcatggaaatattattatgaaatttattttcaggatctgctataaggttgaaatttagcccagctctaggcattttacaaattatttttcaagcagtcattcttgattgtttgacttttttttttaaattaaagattgggaatgtatgtgagagtatgcatatgtatgggtgtgtgtgtgtgcgcgcaatcaaactgtggtgtaaatagattctcagtgaattctgggtattcagactctattccactagtgaaagaaccattttttaaacttcccttgccttttttatttatttaattttcttggtttggagatgtcagtcccaaacaccagagtctgtacttttctataacacagctcagattaaggtagggcatatgccaaggaggttctcacctccctaaagaagggacttgaattttagggactttaattcacccctccttcaatacaactttcccccttcttgtttgcacatgccaagataactgcttttatgcaggctgtacccccttgaaaaatcctttctacagtgctgctcacaaaagagcccaagttcgcctcctacctgcattgctgacttgaattcacagtcgccgagtctacctagctttcttggaagcagtctagcaaaatttctatttgtacgttcactaattatctacaaggacaaaatcagttgtatttacaaaactctacttcagtgtttgttttagtttttttttttactgaaacttgtttttgtgaatactctgtgcttagaattaaatatcactttcttatgaacaacataacttcttcagattgtgtatatgaaaacattagcaagtcttgttttttctatgaagcaaacacaattggtgacaaaggttgtcaatcatttcttcaaaattataatgcagttctaatggtcagcatattttgatattaaatttaaagatcacctctctgcatttgtttttaaattatgctaatacaccacacattatgttggtatgttttgttctgtactttctttaaaaaaaaaaaaaaaacttgtctgagatttgaaggaaaatgtgcttatttggaatttccataaaaagagtatcctttttatacacttaatagtgactttacaaaataaaagttatattctcagttgtttaaaatcactaacctatgataaccacacctcaatttgaaagtagatttaaaattattccctgacaggttatttaatatggagccataaggagggaacccagtacacaattattttttatttgggaatcagggaatagttcccaaatatacaggatttattgataagattttttttcttcccttcatatatccattcaaactcaatggaaagttattaaataaccattagaaaagctcagtagacttatttgagaaattaagccttgtgcaggatgatggatttgacttactaatgtactgtcacagacaaatatgggtagttttgtttaaataggtaagcaaaatattatactttatagcagtggattaccaacaccttgacttctttgttacagtgctaacatcttttttttgtgcaggtatccatgattattaagcagggtggaagttcagtattttgtcatttaaaaagattagttatataatgtctgcttccagccagtgagaaacatctagccatacctttcttatgcaagccattgagttatcaggactgtgaattaacactgtatgaataaatttctgtacaccttattgtttggccagaaggccaccaagtgtacttatatgtaatccttaaattttaaagtagctgtaatttttaaatatttctaaacttttcttaaaccactaaaattaagctcttactacttagtcaactatcctcagctgtattcgtactcaattgtcagtatggcacagattactgtattaaaatattctcctttcgtcttcatatttaccttctgaggtaattttttaacttaatgtgttactacaaagatttgcagatctttaatcaagcactatgttaatactgtaatatcagaatactatgttgcattatttaaaatgttcaaattgaatagattaaaaagtttttaaatgctattgcatcatataatttgctattcatccactatggcattgcatatcaatcagttaatacacttaatgttgcatgagtgatattttggtctgggtttcctcttaagattttagtttgtctgaattaaggaaaaatgtttttaatatacattcttattttgtcccacccctccagaaataagctggaaatcttaactttttggggggtcttttttggtgttttaatgggcccagaactgtggtttaaatttttatgtatgtattttcttttttgtggagtataaatttaaaaactggatttgggacctaaaatactcctcaggttgatgtattcatgaagttttaaaacatctttagttttcaaagtaaactggatatgtggaccttaaagttattgagtttaagctacaaattgtaacgtcattactggacatgtcagcatcaaccctctcaaaatagcttggtcactttatgaaggggcgttttaaagttgttgtttagcagtgacatttaatatggtccaattgcttttctttttaacgtgacaaaaagagaataaggaacaaacactattgctgccgaatgccataacactgagttgtacaaattgtgattgaggaaatgaaaaggtttatacttttta

SEQ ID NO: 24982 - DNA, 9024 bp, Homo sapiens
tccttcaacaatgcatatggatcgattttaggttctgttctgcatcagatgctattgctgaaagacactggtttttaatttgatattgctgcactaattcatcagaaacttttaaaggtttcttacattgcaccattaactctgttagtgatgatgttggcatggacgcagattcagccagccaaagacttgtgatctctgctccagacagtcaagtgagattttcaaatatccgaactaatgatgtagcaaagactcctcagatgcatggcaccgaaatggcaaattcacctcaaccacccccacttagtcctcacccttgtgatgtggttgatgaaggagtgactaaaacaccttcaactcctcagagtcaacatttttatcaaatgccaacaccagatcccttggttccttctaaaccaatggaagataggatagacagtttgtcccagtctttcccacctcaatatcaggaagctgtagaacctacagtatatgttggtacagcagtaaacttggaagaagatgaagccaatatagcctggaagtattacaagttcccaaagaaaaaagatgtagagtttttaccacctcaacttccaagtgataaattcaaggatgatccagttggaccttttggacaggaaagtgtaacatcagttacagagttaatggtgcaatgtaagaaacctttaaaagtttctgatgaattagtgcagcaatatcaaattaaaaaccagtgtctttcagcaatagcatctgatgcagaacaagaacctaaaattgatccatatgcatttgttgaaggagatgaggaattcctttttcctgataaaaaagatagacaaaatagtgagagagaagctggaaaaaaacacaaggtagaagatgggacatctagtgtaacagtgttatcacatgaagaagatgctatgtcattatttagtccctctatcaagcaagatgctccacgccctactagtcatgcccgtcctccatcaacaagtttgatttatgactcagacctggctgtctcttatactgaccttgataatctcttcaattctgatgaagatgaactaacacctggatctaaaagatcagcaaatggatcagatgataaagccagctgcaaggaatcaaagacaggaaatctggacccgttatcttgcataagcactgcagatcttcataaaatgtatcctacaccaccatcattggaacaacatattatgggattttccccaatgaatatgaataataaagaatatggtagtatggatacaacacctggaggaactgttctagaaggaaatagttctagtataggagcgcagttcaaaattgaggttgatgagggattctgtagccccaaaccttctgaaattaaagatttttcttatgtctataagcctgaaaattgtcaaattctagtgggatgttccatgtttgcacctctaaaaactctaccaagccaatatctgccccttatcaaattgccagaagagtgtatttaccgtcagagttggactgttggaaaattggaattgctttcttcagggccttcaatgccattcatcaaagagggtgatggaagtaatatggatcaagaatatggcactgcttatacacctcaaactcatacttcttgtgggatgcctcctagcagtgcacctcctagtaacagcggagcaggaattcttccttctccatccacccctcggtttccaactccaaggactccaaggactcctcggactcctcgtggagctggtggacctgctagtgctcaaggttcagtcaaatatgaaaattcagacttgtattcaccagcttctaccccatctacatgcagaccccttaattctgttgaacctgcaactgtcccttccatccctgaagcacacagtctttatgtaaacctcatcctttcagaatcagttatgaatttgtttaaagactgtaactctgatagttgttgcatctgtgtttgcaacatgaacatcaagggtgccgatgttggagtttacattccagatccaacgcaggaagcacaatataggtgtacctgtggcttcagtgctgtcatgaacagaaaatttggaaacaattcaggattatttcttgaagatgaactagatatcataggacgcaatacagactgtggcaaagaagcagaaaaacgttttgaagctctcagggctacctctgctgaacatgttaatggaggactaaaggaatctgaaaaattatctgatgatttgatattattgctacaagatcagtgcactaatttattttcaccctttggagcagcagaccaagatccttttcctaaaagtggtgtaattagcaattgggtacgtgttgaagagcgtgactgttgcaatgactgctaccttgcattagaacatgggcgtcagttcatggataacatgtcaggaggaaaagttgatgaagcacttgtgaaaagttcatgcttacacccctggtccaaaagaaacgatgtgagtatgcagtgctcacaggatatacttcgaatgctcctctctcttcagccagttcttcaggatgccattcagaaaaaaagaacagtaagaccttggggtgttcagggtcctctcacttggcaacaatttcataaaatggctggccgaggctcttatggaactgatgaatccccagaaccactgccaatccccacatttttgttgggttatgattatgattatctggtgctttctccatttgctcttccttattgggagagacttatgctggaaccctatggatctcaaagagatatagcctatgttgtactgtgtccagaaaatgaagccttgttaaatggagcaaaaagcttttttagagatcttactgcaatatatgagtcctgtcgattaggtcaacatagacctgtttctcgactgttaacagatgggatcatgagagttggatctactgcatcaaagaaactatcagaaaagttggtagcagaatggttttctcaggcagctgatggtaacaatgaagcattttctaaactcaagctttatgcacaagtctgcagatatgacctaggtccttatcttgcttccctgccattggacagctctctactttcccagccaaatttagttgcccctacaagtcagtctttgattactccacctcagatgacaaatactggaaatgctaatactccatctgccaccttagcatctgcagcgagcagcactatgacagtgacttcaggtgttgccatatctacttcagttgccacagctaattcaactttgaccacagcttcaacttcatcttcatcatcctccaacttgaatagtggagtatcatcaaataaactaccttcgtttccaccctttggcagtatgaacagtaatgctgcaggatccatgtctacacaagcaaatacagttcagagtggtcagctaggagggcaacagacatcagctctacagacagctgggatttctggagaatcatcttcacttcccactcagccgcatcctgatgtgtctgaaagcacgatggatcgggataaagtgggaatccccacagatggtgattcacatgcagtcacgtatccacctgcaattgttgtttatataattgatccttttacatacgaaaatacagacgagagcactaactcttctagtgtgtggacattggggctacttcgatgctttctagaaatggtccagactcttcctcctcatatcaagagtactgtttctgtacagattattccttgtcagtacctgttgcaacctgtgaagcatgaagatagagaaatctatccccagcatttaaaatccctggctttttcggcctttacccagtgtcggaggccacttccaacatcaaccaatgtgaaaacattgactggctttggtccaggtttagccatggaaactgcccttagaagtcctgatagaccagagtgtattcgactttatgcacctccttttattctggctccagtgaaggacaaacagacagagctaggagaaacatttggagaagctggacagaaatataatgttctttttgtgggatactgtttatcacatgatcaaaggtggattcttgcatcttgcacagatctatatggagaacttttagaaacttgtatcattaacatcgatgttccaaatagggctcgtcggaaaaaaagttctgctagaaaatttggtctacagaaactttgggagtggtgcttaggacttgtacaaatgagttcattgccatggagagttgtaattggtcgtctaggaaggattggtcatggagaattgaaagattggagctgtttgctgagtcgtcgaaacttgcagtctctaagtaaaaggctcaaagacatgtgtagaatgtgtggtatatctgctgcagactcccctagcattctcagtgcttgcttggtggcaatggagccgcaaggctcttttgttattatgccagattctgtgtcaactggttctgtatttggaagaagcacgactctaaatatgcagacatctcagctaaataccccacaggatacatcatgtactcatatacttgtgtttcctacttctgcttctgtgcaagtagcttcagctacttataccactgaaaatttggatttagctttcaatcccaacaatgatggagcagatggaatgggtatctttgatttgttagacacaggagatgatcttgaccctgatatcattaatatccttcctgcttctccaactggttctcctgtacattctccaggatctcattacccccatggaggtgatgcgggcaagggtcagagtactgatcggctactatcaacagaacctcatgaggaagtacctaatattcttcagcaaccattggcccttggttactttgtatcaactgccaaagcaggtccattacctgactggttctggtcagcatgtcctcaagcacaatatcagtgtcccctttttcttaaggcctctttgcacctccacgtgccttcagtgcaatctgacgagctgcttcacagtaaacactcccacccacttgactcaaatcagacttcagatgtcctcaggtttgttttggaacagtacaatgcactctcctggctaacctgtgaccctgcaacccaggacagacgctcatgtctcccaattcattttgtggtgctgaatcagttatataactttattatgaatatgctgtgatcttcatttgatggaactgtgcaagaaaagaacaaggaaaaatggatgtttcgctgcaggattaagttacaattatcttctcagtgaaggtcatttgtgatggggtctaattcttattacttcaacaaatattgttttgacttggggggaggggctataaccctgctatttttcattgactctattgaactctttaggatgatgactgatcatacaaaacgtattataacattttcgtagcaaaattaaccttttttttttccagtcacagtatttgtgaaaagtaatgagccatagtacccagtcatgttaaatgaatattaaaagcatggagaggaaacatgaggaacaatgaatttcaacatatggcttcagaacatgaagatgttcttgtatggattatagtatctagtattcaaaaatgcctgcatctcttctcttatttattgtaagtttttaaatgtataaattgtcttatatttcttaacctcttttataaaaattttcctagaaggtttatactgccttcttgctttaaagcaattggtctaaaatatatgtaatcgtcttaattaaaaagttgcagtagggttgcttttagagtattatttttttgtaagggggtgggtgggacagtaaatttgtattgtctcgatgtacagtttaacggggatagagggggaataatgtccataccattgtgtgtggaggatttacagctaagctgtagttgcagagtacatgtacagtaatgaagttcactgtgtttataaattgaaaaggtaccaggtcttacagcattttatatatcacatctttacagaataacatgatggcaatatacaagtggtattgttaggtggtttaacttagaataaaatgagaattcttcagttatattttgtactatggtttagggctatgactaatatttcaggccatttccggtgaaagaaacttagttttacaagaaaaaccatttgctactgaatgcttaaactaattttagtgtttaatgttacatgcttaaatttttttcagttttaacagtggcatatttaggcatggaaatattattatgaaatttattttcaggatctgctataaggttgaaatttagcccagctctaggcattttacaaattatttttcaagcagtcattcttgattgtttgacttttttttttaaattaaagattgggaatgtatgtgagagtatgcatatgtatgggtgtgtgtgtgtgcgcgcaatcaaactgtggtgtaaatagattctcagtgaattctgggtattcagactctattccactagtgaaagaaccattttttaaacttcccttgccttttttatttatttaattttcttggtttggagatgtcagtcccaaacaccagagtctgtacttttctataacacagctcagattaaggtagggcatatgccaaggaggttctcacctccctaaagaagggacttgaattttagggactttaattcacccctccttcaatacaactttcccccttcttgtttgcacatgccaagataactgcttttatgcaggctgtacccccttgaaaaatcctttctacagtgctgctcacaaaagagcccaagttcgcctcctacctgcattgctgacttgaattcacagtcgccgagtctacctagctttcttggaagcagtctagcaaaatttctatttgtacgttcactaattatctacaaggacaaaatcagttgtatttacaaaactctacttcagtgtttgttttagtttttttttttactgaaacttgtttttgtgaatactctgtgcttagaattaaatatcactttcttatgaacaacataacttcttcagattgtgtatatgaaaacattagcaagtcttgttttttctatgaagcaaacacaattggtgacaaaggttgtcaatcatttcttcaaaattataatgcagttctaatggtcagcatattttgatattaaatttaaagatcacctctctgcatttgtttttaaattatgctaatacaccacacattatgttggtatgttttgttctgtactttctttaaaaaaaaaaaaaaaacttgtctgagatttgaaggaaaatgtgcttatttggaatttccataaaaagagtatcctttttatacacttaatagtgactttacaaaataaaagttatattctcagttgtttaaaatcactaacctatgataaccacacctcaatttgaaagtagatttaaaattattccctgacaggttatttaatatggagccataaggagggaacccagtacacaattattttttatttgggaatcagggaatagttcccaaatatacaggatttattgataagattttttttcttcccttcatatatccattcaaactcaatggaaagttattaaataaccattagaaaagctcagtagacttatttgagaaattaagccttgtgcaggatgatggatttgacttactaatgtactgtcacagacaaatatgggtagttttgtttaaataggtaagcaaaatattatactttatagcagtggattaccaacaccttgacttctttgttacagtgctaacatcttttttttgtgcaggtatccatgattattaagcagggtggaagttcagtattttgtcatttaaaaagattagttatataatgtctgcttccagccagtgagaaacatctagccatacctttcttatgcaagccattgagttatcaggactgtgaattaacactgtatgaataaatttctgtacaccttattgtttggccagaaggccaccaagtgtacttatatgtaatccttaaattttaaagtagctgtaatttttaaatatttctaaacttttcttaaaccactaaaattaagctcttactacttagtcaactatcctcagctgtattcgtactcaattgtcagtatggcacagattactgtattaaaatattctcctttcgtcttcatatttaccttctgaggtaattttttaacttaatgtgttactacaaagatttgcagatctttaatcaagcactatgttaatactgtaatatcagaatactatgttgcattatttaaaatgttcaaattgaatagattaaaaagtttttaaatgctattgcatcatataatttgctattcatccactatggcattgcatatcaatcagttaatacacttaatgttgcatgagtgatattttggtctgggtttcctcttaagattttagtttgtctgaattaaggaaaaatgtttttaatatacattcttattttgtcccacccctccagaaataagctggaaatcttaactttttggggggtcttttttggtgttttaatgggcccagaactgtggtttaaatttttatgtatgtattttcttttttgtggagtataaatttaaaaactggatttgggacctaaaatactcctcaggttgatgtattcatgaagttttaaaacatctttagttttcaaagtaaactggatatgtggaccttaaagttattgagtttaagctacaaattgtaacgtcattactggacatgtcagcatcaaccctctcaaaatagcttggtcactttatgaaggggcgttttaaagttgttgtttagcagtgacatttaatatggtccaattgcttttctttttaacgtgacaaaaagagaataaggaacaaacactattgctgccgaatgccataacactgagttgtacaaattgtgattgaggaaatgaaaaggtttatacttttta

SEQ ID NO: 24983 - DNA, 8868 bp, Homo sapiens
cgcggccgcgcgacacggctgcgagagacgacgaagggatctctgctccagacagtcaagtgagattttcaaatatccgaactaatgatgtagcaaagactcctcagatgcatggcaccgaaatggcaaattcacctcaaccacccccacttagtcctcacccttgtgatgtggttgatgaaggagtgactaaaacaccttcaactcctcagagtcaacatttttatcaaatgccaacaccagatcccttggttccttctaaaccaatggaagataggatagacagtttgtcccagtctttcccacctcaatatcaggaagctgtagaacctacagtatatgttggtacagcagtaaacttggaagaagatgaagccaatatagcctggaagtattacaagttcccaaagaaaaaagatgtagagtttttaccacctcaacttccaagtgataaattcaaggatgatccagttggaccttttggacaggaaagtgtaacatcagttacagagttaatggtgcaatgtaagaaacctttaaaagtttctgatgaattagtgcagcaatatcaaattaaaaaccagtgtctttcagcaatagcatctgatgcagaacaagaacctaaaattgatccatatgcatttgttgaaggagatgaggaattcctttttcctgataaaaaagatagacaaaatagtgagagagaagctggaaaaaaacacaaggtagaagatgggacatctagtgtaacagtgttatcacatgaagaagatgctatgtcattatttagtccctctatcaagcaagatgctccacgccctactagtcatgcccgtcctccatcaacaagtttgatttatgactcagacctggctgtctcttatactgaccttgataatctcttcaattctgatgaagatgaactaacacctggatctaaaagatcagcaaatggatcagatgataaagccagctgcaaggaatcaaagacaggaaatctggacccgttatcttgcataagcactgcagatcttcataaaatgtatcctacaccaccatcattggaacaacatattatgggattttccccaatgaatatgaataataaagaatatggtagtatggatacaacacctggaggaactgttctagaaggaaatagttctagtataggagcgcagttcaaaattgaggttgatgagggattctgtagccccaaaccttctgaaattaaagatttttcttatgtctataagcctgaaaattgtcaaattctagtgggatgttccatgtttgcacctctaaaaactctaccaagccaatatctgccccttatcaaattgccagaagagtgtatttaccgtcagagttggactgttggaaaattggaattgctttcttcagggccttcaatgccattcatcaaagagggtgatggaagtaatatggatcaagaatatggcactgcttatacacctcaaactcatacttcttgtgggatgcctcctagcagtgcacctcctagtaacagcggagcaggaattcttccttctccatccacccctcggtttccaactccaaggactccaaggactcctcggactcctcgtggagctggtggacctgctagtgctcaaggttcagtcaaatatgaaaattcagacttgtattcaccagcttctaccccatctacatgcagaccccttaattctgttgaacctgcaactgtcccttccatccctgaagcacacagtctttatgtaaacctcatcctttcagaatcagttatgaatttgtttaaagactgtaactctgatagttgttgcatctgtgtttgcaacatgaacatcaagggtgccgatgttggagtttacattccagatccaacgcaggaagcacaatataggtgtacctgtggcttcagtgctgtcatgaacagaaaatttggaaacaattcaggattatttcttgaagatgaactagatatcataggacgcaatacagactgtggcaaagaagcagaaaaacgttttgaagctctcagggctacctctgctgaacatgttaatggaggactaaaggaatctgaaaaattatctgatgatttgatattattgctacaagatcagtgcactaatttattttcaccctttggagcagcagaccaagatccttttcctaaaagtggtgtaattagcaattgggtacgtgttgaagagcgtgactgttgcaatgactgctaccttgcattagaacatgggcgtcagttcatggataacatgtcaggaggaaaagttgatgaagcacttgtgaaaagttcatgcttacacccctggtccaaaagaaacgatgtgagtatgcagtgctcacaggatatacttcgaatgctcctctctcttcagccagttcttcaggatgccattcagaaaaaaagaacagtaagaccttggggtgttcagggtcctctcacttggcaacaatttcataaaatggctggccgaggctcttatggaactgatgaatccccagaaccactgccaatccccacatttttgttgggttatgattatgattatctggtgctttctccatttgctcttccttattgggagagacttatgctggaaccctatggatctcaaagagatatagcctatgttgtactgtgtccagaaaatgaagccttgttaaatggagcaaaaagcttttttagagatcttactgcaatatatgagtcctgtcgattaggtcaacatagacctgtttctcgactgttaacagatgggatcatgagagttggatctactgcatcaaagaaactatcagaaaagttggtagcagaatggttttctcaggcagctgatggtaacaatgaagcattttctaaactcaagctttatgcacaagtctgcagatatgacctaggtccttatcttgcttccctgccattggacagctctctactttcccagccaaatttagttgcccctacaagtcagtctttgattactccacctcagatgacaaatactggaaatgctaatactccatctgccaccttagcatctgcagcgagcagcactatgacagtgacttcaggtgttgccatatctacttcagttgccacagctaattcaactttgaccacagcttcaacttcatcttcatcatcctccaacttgaatagtggagtatcatcaaataaactaccttcgtttccaccctttggcagtatgaacagtaatgctgcaggatccatgtctacacaagcaaatacagttcagagtggtcagctaggagggcaacagacatcagctctacagacagctgggatttctggagaatcatcttcacttcccactcagccgcatcctgatgtgtctgaaagcacgatggatcgggataaagtgggaatccccacagatggtgattcacatgcagtcacgtatccacctgcaattgttgtttatataattgatccttttacatacgaaaatacagacgagagcactaactcttctagtgtgtggacattggggctacttcgatgctttctagaaatggtccagactcttcctcctcatatcaagagtactgtttctgtacagattattccttgtcagtacctgttgcaacctgtgaagcatgaagatagagaaatctatccccagcatttaaaatccctggctttttcggcctttacccagtgtcggaggccacttccaacatcaaccaatgtgaaaacattgactggctttggtccaggtttagccatggaaactgcccttagaagtcctgatagaccagagtgtattcgactttatgcacctccttttattctggctccagtgaaggacaaacagacagagctaggagaaacatttggagaagctggacagaaatataatgttctttttgtgggatactgtttatcacatgatcaaaggtggattcttgcatcttgcacagatctatatggagaacttttagaaacttgtatcattaacatcgatgttccaaatagggctcgtcggaaaaaaagttctgctagaaaatttggtctacagaaactttgggagtggtgcttaggacttgtacaaatgagttcattgccatggagagttgtaattggtcgtctaggaaggattggtcatggagaattgaaagattggagctgtttgctgagtcgtcgaaacttgcagtctctaagtaaaaggctcaaagacatgtgtagaatgtgtggtatatctgctgcagactcccctagcattctcagtgcttgcttggtggcaatggagccgcaaggctcttttgttattatgccagattctgtgtcaactggttctgtatttggaagaagcacgactctaaatatgcagacatctcagctaaataccccacaggatacatcatgtactcatatacttgtgtttcctacttctgcttctgtgcaagtagcttcagctacttataccactgaaaatttggatttagctttcaatcccaacaatgatggagcagatggaatgggtatctttgatttgttagacacaggagatgatcttgaccctgatatcattaatatccttcctgcttctccaactggttctcctgtacattctccaggatctcattacccccatggaggtgatgcgggcaagggtcagagtactgatcggctactatcaacagaacctcatgaggaagtacctaatattcttcagcaaccattggcccttggttactttgtatcaactgccaaagcaggtccattacctgactggttctggtcagcatgtcctcaagcacaatatcagtgtcccctttttcttaaggcctctttgcacctccacgtgccttcagtgcaatctgacgagctgcttcacagtaaacactcccacccacttgactcaaatcagacttcagatgtcctcaggtttgttttggaacagtacaatgcactctcctggctaacctgtgaccctgcaacccaggacagacgctcatgtctcccaattcattttgtggtgctgaatcagttatataactttattatgaatatgctgtgatcttcatttgatggaactgtgcaagaaaagaacaaggaaaaatggatgtttcgctgcaggattaagttacaattatcttctcagtgaaggtcatttgtgatggggtctaattcttattacttcaacaaatattgttttgacttggggggaggggctataaccctgctatttttcattgactctattgaactctttaggatgatgactgatcatacaaaacgtattataacattttcgtagcaaaattaaccttttttttttccagtcacagtatttgtgaaaagtaatgagccatagtacccagtcatgttaaatgaatattaaaagcatggagaggaaacatgaggaacaatgaatttcaacatatggcttcagaacatgaagatgttcttgtatggattatagtatctagtattcaaaaatgcctgcatctcttctcttatttattgtaagtttttaaatgtataaattgtcttatatttcttaacctcttttataaaaattttcctagaaggtttatactgccttcttgctttaaagcaattggtctaaaatatatgtaatcgtcttaattaaaaagttgcagtagggttgcttttagagtattatttttttgtaagggggtgggtgggacagtaaatttgtattgtctcgatgtacagtttaacggggatagagggggaataatgtccataccattgtgtgtggaggatttacagctaagctgtagttgcagagtacatgtacagtaatgaagttcactgtgtttataaattgaaaaggtaccaggtcttacagcattttatatatcacatctttacagaataacatgatggcaatatacaagtggtattgttaggtggtttaacttagaataaaatgagaattcttcagttatattttgtactatggtttagggctatgactaatatttcaggccatttccggtgaaagaaacttagttttacaagaaaaaccatttgctactgaatgcttaaactaattttagtgtttaatgttacatgcttaaatttttttcagttttaacagtggcatatttaggcatggaaatattattatgaaatttattttcaggatctgctataaggttgaaatttagcccagctctaggcattttacaaattatttttcaagcagtcattcttgattgtttgacttttttttttaaattaaagattgggaatgtatgtgagagtatgcatatgtatgggtgtgtgtgtgtgcgcgcaatcaaactgtggtgtaaatagattctcagtgaattctgggtattcagactctattccactagtgaaagaaccattttttaaacttcccttgccttttttatttatttaattttcttggtttggagatgtcagtcccaaacaccagagtctgtacttttctataacacagctcagattaaggtagggcatatgccaaggaggttctcacctccctaaagaagggacttgaattttagggactttaattcacccctccttcaatacaactttcccccttcttgtttgcacatgccaagataactgcttttatgcaggctgtacccccttgaaaaatcctttctacagtgctgctcacaaaagagcccaagttcgcctcctacctgcattgctgacttgaattcacagtcgccgagtctacctagctttcttggaagcagtctagcaaaatttctatttgtacgttcactaattatctacaaggacaaaatcagttgtatttacaaaactctacttcagtgtttgttttagtttttttttttactgaaacttgtttttgtgaatactctgtgcttagaattaaatatcactttcttatgaacaacataacttcttcagattgtgtatatgaaaacattagcaagtcttgttttttctatgaagcaaacacaattggtgacaaaggttgtcaatcatttcttcaaaattataatgcagttctaatggtcagcatattttgatattaaatttaaagatcacctctctgcatttgtttttaaattatgctaatacaccacacattatgttggtatgttttgttctgtactttctttaaaaaaaaaaaaaaaacttgtctgagatttgaaggaaaatgtgcttatttggaatttccataaaaagagtatcctttttatacacttaatagtgactttacaaaataaaagttatattctcagttgtttaaaatcactaacctatgataaccacacctcaatttgaaagtagatttaaaattattccctgacaggttatttaatatggagccataaggagggaacccagtacacaattattttttatttgggaatcagggaatagttcccaaatatacaggatttattgataagattttttttcttcccttcatatatccattcaaactcaatggaaagttattaaataaccattagaaaagctcagtagacttatttgagaaattaagccttgtgcaggatgatggatttgacttactaatgtactgtcacagacaaatatgggtagttttgtttaaataggtaagcaaaatattatactttatagcagtggattaccaacaccttgacttctttgttacagtgctaacatcttttttttgtgcaggtatccatgattattaagcagggtggaagttcagtattttgtcatttaaaaagattagttatataatgtctgcttccagccagtgagaaacatctagccatacctttcttatgcaagccattgagttatcaggactgtgaattaacactgtatgaataaatttctgtacaccttattgtttggccagaaggccaccaagtgtacttatatgtaatccttaaattttaaagtagctgtaatttttaaatatttctaaacttttcttaaaccactaaaattaagctcttactacttagtcaactatcctcagctgtattcgtactcaattgtcagtatggcacagattactgtattaaaatattctcctttcgtcttcatatttaccttctgaggtaattttttaacttaatgtgttactacaaagatttgcagatctttaatcaagcactatgttaatactgtaatatcagaatactatgttgcattatttaaaatgttcaaattgaatagattaaaaagtttttaaatgctattgcatcatataatttgctattcatccactatggcattgcatatcaatcagttaatacacttaatgttgcatgagtgatattttggtctgggtttcctcttaagattttagtttgtctgaattaaggaaaaatgtttttaatatacattcttattttgtcccacccctccagaaataagctggaaatcttaactttttggggggtcttttttggtgttttaatgggcccagaactgtggtttaaatttttatgtatgtattttcttttttgtggagtataaatttaaaaactggatttgggacctaaaatactcctcaggttgatgtattcatgaagttttaaaacatctttagttttcaaagtaaactggatatgtggaccttaaagttattgagtttaagctacaaattgtaacgtcattactggacatgtcagcatcaaccctctcaaaatagcttggtcactttatgaaggggcgttttaaagttgttgtttagcagtgacatttaatatggtccaattgcttttctttttaacgtgacaaaaagagaataaggaacaaacactattgctgccgaatgccataacactgagttgtacaaattgtgattgaggaaatgaaaaggtttatacttttta

SEQ ID NO: 24984 - DNA, 5643 bp, Homo sapiens
tttttttttgagacggagtctcgctcttgttgcccaggctggggtgcagtggcgcaatcttggctcactgcaacctccacctcccaggttcaagcaattctcccgcctcagcctcccaagtaactgggattacaggtgtgagccaccacacctggccagaaagttttataggttttaaatagtcctttaattcagaacccattggtaaaattggctacttattaaaagcctacataatagataagaaaacaatcgttaaattttcatttaaattaggttttgtgtaaattttctagtaaaaagtttttagagttttagacccacagttcctgttattctcttttggaagtttaacatttgtaatatttgcctatacttcttagattattccttgtcagtacctgttgcaacctgtgaagcatgaagatagagaaatctatccccagcatttaaaatccctggctttttcggcctttacccagtgtcggaggccacttccaacatcaaccaatgtgaaaacattgactggctttggtccaggtttagccatggaaactgcccttagaagtcctgatagaccagagtgtattcgactttatgcacctccttttattctggctccagtgaaggacaaacagacagagctaggagaaacatttggagaagctggacagaaatataatgttctttttgtgggatactgtttatcacatgatcaaaggtggattcttgcatcttgcacagatctatatggagaacttttagaaacttgtatcattaacatcgatgttccaaatagggctcgtcggaaaaaaagttctgctagaaaatttggtctacagaaactttgggagtggtgcttaggacttgtacaaatgagttcattgccatggagagttgtaattggtcgtctaggaaggattggtcatggagaattgaaagattggagctgtttgctgagtcgtcgaaacttgcagtctctaagtaaaaggctcaaagacatgtgtagaatgtgtggtatatctgctgcagactcccctagcattctcagtgcttgcttggtggcaatggagccgcaaggctcttttgttattatgccagattctgtgtcaactggttctgtatttggaagaagcacgactctaaatatgcagacatctcagctaaataccccacaggatacatcatgtactcatatacttgtgtttcctacttctgcttctgtgcaagtagcttcagctacttataccactgaaaatttggatttagctttcaatcccaacaatgatggagcagatggaatgggtatctttgatttgttagacacaggagatgatcttgaccctgatatcattaatatccttcctgcttctccaactggttctcctgtacattctccaggatctcattacccccatggaggtgatgcgggcaagggtcagagtactgatcggctactatcaacagaacctcatgaggaagtacctaatattcttcagcaaccattggcccttggttactttgtatcaactgccaaagcaggtccattacctgactggttctggtcagcatgtcctcaagcacaatatcagtgtcccctttttcttaaggcctctttgcacctccacgtgccttcagtgcaatctgacgagctgcttcacagtaaacactcccacccacttgactcaaatcagacttcagatgtcctcaggtttgttttggaacagtacaatgcactctcctggctaacctgtgaccctgcaacccaggacagacgctcatgtctcccaattcattttgtggtgctgaatcagttatataactttattatgaatatgctgtgatcttcatttgatggaactgtgcaagaaaagaacaaggaaaaatggatgtttcgctgcaggattaagttacaattatcttctcagtgaaggtcatttgtgatggggtctaattcttattacttcaacaaatattgttttgacttggggggaggggctataaccctgctatttttcattgactctattgaactctttaggatgatgactgatcatacaaaacgtattataacattttcgtagcaaaattaaccttttttttttccagtcacagtatttgtgaaaagtaatgagccatagtacccagtcatgttaaatgaatattaaaagcatggagaggaaacatgaggaacaatgaatttcaacatatggcttcagaacatgaagatgttcttgtatggattatagtatctagtattcaaaaatgcctgcatctcttctcttatttattgtaagtttttaaatgtataaattgtcttatatttcttaacctcttttataaaaattttcctagaaggtttatactgccttcttgctttaaagcaattggtctaaaatatatgtaatcgtcttaattaaaaagttgcagtagggttgcttttagagtattatttttttgtaagggggtgggtgggacagtaaatttgtattgtctcgatgtacagtttaacggggatagagggggaataatgtccataccattgtgtgtggaggatttacagctaagctgtagttgcagagtacatgtacagtaatgaagttcactgtgtttataaattgaaaaggtaccaggtcttacagcattttatatatcacatctttacagaataacatgatggcaatatacaagtggtattgttaggtggtttaacttagaataaaatgagaattcttcagttatattttgtactatggtttagggctatgactaatatttcaggccatttccggtgaaagaaacttagttttacaagaaaaaccatttgctactgaatgcttaaactaattttagtgtttaatgttacatgcttaaatttttttcagttttaacagtggcatatttaggcatggaaatattattatgaaatttattttcaggatctgctataaggttgaaatttagcccagctctaggcattttacaaattatttttcaagcagtcattcttgattgtttgacttttttttttaaattaaagattgggaatgtatgtgagagtatgcatatgtatgggtgtgtgtgtgtgcgcgcaatcaaactgtggtgtaaatagattctcagtgaattctgggtattcagactctattccactagtgaaagaaccattttttaaacttcccttgccttttttatttatttaattttcttggtttggagatgtcagtcccaaacaccagagtctgtacttttctataacacagctcagattaaggtagggcatatgccaaggaggttctcacctccctaaagaagggacttgaattttagggactttaattcacccctccttcaatacaactttcccccttcttgtttgcacatgccaagataactgcttttatgcaggctgtacccccttgaaaaatcctttctacagtgctgctcacaaaagagcccaagttcgcctcctacctgcattgctgacttgaattcacagtcgccgagtctacctagctttcttggaagcagtctagcaaaatttctatttgtacgttcactaattatctacaaggacaaaatcagttgtatttacaaaactctacttcagtgtttgttttagtttttttttttactgaaacttgtttttgtgaatactctgtgcttagaattaaatatcactttcttatgaacaacataacttcttcagattgtgtatatgaaaacattagcaagtcttgttttttctatgaagcaaacacaattggtgacaaaggttgtcaatcatttcttcaaaattataatgcagttctaatggtcagcatattttgatattaaatttaaagatcacctctctgcatttgtttttaaattatgctaatacaccacacattatgttggtatgttttgttctgtactttctttaaaaaaaaaaaaaaaacttgtctgagatttgaaggaaaatgtgcttatttggaatttccataaaaagagtatcctttttatacacttaatagtgactttacaaaataaaagttatattctcagttgtttaaaatcactaacctatgataaccacacctcaatttgaaagtagatttaaaattattccctgacaggttatttaatatggagccataaggagggaacccagtacacaattattttttatttgggaatcagggaatagttcccaaatatacaggatttattgataagattttttttcttcccttcatatatccattcaaactcaatggaaagttattaaataaccattagaaaagctcagtagacttatttgagaaattaagccttgtgcaggatgatggatttgacttactaatgtactgtcacagacaaatatgggtagttttgtttaaataggtaagcaaaatattatactttatagcagtggattaccaacaccttgacttctttgttacagtgctaacatcttttttttgtgcaggtatccatgattattaagcagggtggaagttcagtattttgtcatttaaaaagattagttatataatgtctgcttccagccagtgagaaacatctagccatacctttcttatgcaagccattgagttatcaggactgtgaattaacactgtatgaataaatttctgtacaccttattgtttggccagaaggccaccaagtgtacttatatgtaatccttaaattttaaagtagctgtaatttttaaatatttctaaacttttcttaaaccactaaaattaagctcttactacttagtcaactatcctcagctgtattcgtactcaattgtcagtatggcacagattactgtattaaaatattctcctttcgtcttcatatttaccttctgaggtaattttttaacttaatgtgttactacaaagatttgcagatctttaatcaagcactatgttaatactgtaatatcagaatactatgttgcattatttaaaatgttcaaattgaatagattaaaaagtttttaaatgctattgcatcatataatttgctattcatccactatggcattgcatatcaatcagttaatacacttaatgttgcatgagtgatattttggtctgggtttcctcttaagattttagtttgtctgaattaaggaaaaatgtttttaatatacattcttattttgtcccacccctccagaaataagctggaaatcttaactttttggggggtcttttttggtgttttaatgggcccagaactgtggtttaaatttttatgtatgtattttcttttttgtggagtataaatttaaaaactggatttgggacctaaaatactcctcaggttgatgtattcatgaagttttaaaacatctttagttttcaaagtaaactggatatgtggaccttaaagttattgagtttaagctacaaattgtaacgtcattactggacatgtcagcatcaaccctctcaaaatagcttggtcactttatgaaggggcgttttaaagttgttgtttagcagtgacatttaatatggtccaattgcttttctttttaacgtgacaaaaagagaataaggaacaaacactattgctgccgaatgccataacactgagttgtacaaattgtgattgaggaaatgaaaaggtttatacttttta

SEQ ID NO: 24985 - DNA, 1466 bp, Homo sapiens
agcagcatagatattaccacatgacacatgtttatctatatagcacctacatgttctgcacttgtatcctttttatacacttaatagtgactttacaaaataaaagttatattctcagttgtttaaaatcactaacctatgataaccacacctcaatttgaaagtagatttaaaattattccctgacaggttatttaatatggagccataaggagggaacccagtacacaattattttttatttgggaatcagggaatagttcccaaatatacaggatttattgataagattttttttcttcccttcatatatccattcaaactcaatggaaagttattaaataaccattagttatataatgtctgcttccagccagtgagaaacatctagccatacctttcttatgcaagccattgagttatcaggactgtgaattaacactgtatgaataaatttctgtacaccttattgtttggccagaaggccaccaagtgtacttatatgtaatccttaaattttaaagtagctgtaatttttaaatatttctaaacttttcttaaaccactaaaattaagctcttactacttagtcaactatcctcagctgtattcgtactcaattgtcagtatggcacagattactgtattaaaatattctcctttcgtcttcatatttaccttctgaggtaattttttaacttaatgtgttactacaaagatttgcagatctttaatcaagcactatgttaatactgtaatatcagaatactatgttgcattatttaaaatgttcaaattgaatagattaaaaagtttttaaatgctattgcatcatataatttgctattcatccactatggcattgcatatcaatcagttaatacacttaatgttgcatgagtgatattttggtctgggtttcctcttaagattttagtttgtctgaattaaggaaaaatgtttttaatatacattcttattttgtcccacccctccagaaataagctggaaatcttaactttttggggggtcttttttggtgttttaatgggcccagaactgtggtttaaatttttatgtatgtattttcttttttgtggagtataaatttaaaaactggatttgggacctaaaatactcctcaggttgatgtattcatgaagttttaaaacatctttagttttcaaagtaaactggatatgtggaccttaaagttattgagtttaagctacaaattgtaacgtcattactggacatgtcagcatcaaccctctcaaaatagcttggtcactttatgaaggggcgttttaaagttgttgtttagcagtgacatttaatatggtccaattgcttttctttttaacgtgacaaaaagagaataaggaacaaacactattgctgccgaatgccataacactgagttgtacaaattgtgattgaggaaatgaaaaggtttatacttttta

SEQ ID NO: 24986 - DNA, 2166 bp, Homo sapiens
gtttctctctctggtcggaagcggcggtaatggcggatggtgggttgtggcgccggcggcggctgctgtgagggacgatgagtgcctccttcgtgccgaacggggccagcctggaagattgtcactgtaacctcttctgcctggctgacttgacaggaattaagtggaaaaaatatgtatggcaaggcccaacttctgcccctattctgtttcctgtgacagaagaagaccccattttgagcagttttagtcgctgccttaaggcagatgtacttggtgtttggcggcgagatcaaagacctggaagaagagaattgtggatattttggtggggtgaagaccccagttttgctgaccttattcaccatgacttatcagaagaagaagatggagtgtgggagaatggactttcctatgaatgccgtactctgcttttcaaagcagttcacaatctattggaacggtgtttaatgaacaggaattttgtacgtattggcaagtggtttgtaaagccttatgaaaaagatgaaaaacctataaataaaagtgaacacttgtcctgctccttcacctttttcttgcatggagacagcaatgtttgtaccagtgtggaaattaaccaacatcaacctgtataccttctcagtgaagagcatatcacccttgctcaacagtctaatagcccatttcaagttatcttatgcccatttggactaaatggcactctcacaggacaggcattcaagatgtctgattcagctacaaaaaaattaattggtgaatggaaacagttctatcctatctcatgttgcttgaaggagatgtctgaagaaaaacaggaagatatggattgggaagatgattctttagctgcagtagaagttcttgttgctggtgtccgaatgatctacccagcatgctttgttctagtccctcagtcagacattcctactcctagccctgtgggatccactcactgttcatcttcttgcttgggtgtccaccaagtgcctgcttccacaagagatcctgctatgtcttcggttacgcttacaccacctacgtctcctgaggaagtccaaacagttgatcctcagtctgtccagaagtgggtcaaattttcttcagtatctgatggcttcaactccgatagtactagccaccatggtgggaaaatacccagaaaattagcaaatcatgtggtggatagagtttggcaagaatgcaatatgaacagagcacagaacaagaggaagtattctgcttcatcaggtggtctatgcgaagaagcgacagctgctaaagtggcatcctgggattttgttgaagccacacaaagaacaaattgcagttgtttgaggcacaaaaatctcaagtcaagaaatgctggacaacaaggacaggcaccatctttaggtcagcaacaacaaatacttcctaagcacaagaccaatgagaagcaagaaaagagtgaaaagccacagaaacgccccttgactccttttcaccatcgtgtgtctgttagtgatgatgttggcatggacgcagattcagccagccaaagacttgtgatctctgctccagacagtcaagtgagattttcaaatatccgaactaatgatgtagcaaagactcctcagatgcatggcaccgaaatggcaaattcacctcaaccacccccacttagtcctcacccttgtgatgtggttgatgaaggagtgactaaaacaccttcaactcctcagagtcaacatttttatcaaatgccaacaccagatcccttggttccttctaaaccaatggaagataggatagacagtttgtcccagtctttcccacctcaatatcaggaagctgtagaacctacagtatatgttggtacagcagtaaacttggaagaagatgaagccaatatagcctggaagtattacaagttcccaaagaaaaaagatgtagagtttttaccacctcaacttccaagtgataaattcaaggatgatccagttggaccttttggacaggaaagtgtaacatcagttacagagtatgtattttttttaatagtcaccattataatttaagggtggaagtgatgcaagttcttaatactaggactcagtattggattcaaggtaggatttacaagaataaattcattgagtatta

SEQ ID NO: 24987 - DNA, 2246 bp, Homo sapiens
gtttctctctctggtcggaagcggcggtaatggcggatggtgggttgtggcgccggcggcggctgctgtgagggacgatgagtgcctccttcgtgccgaacggggccagcctggaagattgtcactgtaacctcttctgcctggctgacttgacaggaattaagtggaaaaaatatgtatggcaaggcccaacttctgcccctattctgtttcctgtgacagaagaagaccccattttgagcagttttagtcgctgccttaaggcagatgtacttggtgtttggcggcgagatcaaagacctggaagaagagaattgtggatattttggtggggtgaagaccccagttttgctgaccttattcaccatgacttatcagaagaagaagatggagtgtgggagaatggactttcctatgaatgccgtactctgcttttcaaagcagttcacaatctattggaacggtgtttaatgaacaggaattttgtacgtattggcaagtggtttgtaaagccttatgaaaaagatgaaaaacctataaataaaagtgaacacttgtcctgctccttcacctttttcttgcatggagacagcaatgtttgtaccagtgtggaaattaaccaacatcaacctgtataccttctcagtgaagagcatatcacccttgctcaacagtctaatagcccatttcaagttatcttatgcccatttggactaaatggcactctcacaggacaggcattcaagatgtctgattcagctacaaaaaaattaattggtgaatggaaacagttctatcctatctcatgttgcttgaaggagatgtctgaagaaaaacaggaagatatggattgggaagatgattctttagctgcagtagaagttcttgttgctggtgtccgaatgatctacccagcatgctttgttctagtccctcagtcagacattcctactcctagccctgtgggatccactcactgttcatcttcttgcttgggtgtccaccaagtgcctgcttccacaagagatcctgctatgtcttcggttacgcttacaccacctacgtctcctgaggaagtccaaacagttgatcctcagtctgtccagaagtgggtcaaattttcttcagtatctgatggcttcaactccgatagtactagccaccatggtgggaaaatacccagaaaattagcaaatcatgtggtggatagagtttggcaagaatgcaatatgaacagagcacagaacaagaggaagtattctgcttcatcaggtggtctatgcgaagaagcgacagctgctaaagtggcatcctgggattttgttgaagccacacaaagaacaaattgcagttgtttgaggcacaaaaatctcaagtcaagaaatgctggacaacaaggacaggcaccatctttaggtcagcaacaacaaatacttcctaagcacaagaccaatgagaagcaagaaaagagtgaaaagccacagaaacgccccttgactccttttcaccatcgtgtgtctgttagtgatgatgttggcatggacgcagattcagccagccaaagacttgtgatctctgctccagacagtcaagtgagattttcaaatatccgaactaatgatgtagcaaagactcctcagatgcatggcaccgaaatggcaaattcacctcaaccacccccacttagtcctcacccttgtgatgtggttgatgaaggagtgactaaaacaccttcaactcctcagagtcaacatttttatcaaatgccaacaccagatcccttggttccttctaaaccaatggaagataggatagacagtttgtcccagtctttcccacctcaatatcaggaagctgtagaacctacagtatatgttggtacagcagtaaacttggaagaagatgaagccaatatagcctggaagtattacaagttcccaaagaaaaaagatgtagagtttttaccacctcaacttccaagtgataaattcaaggatgatccagttggaccttttggacaggaaagtgtaacatcagttacagagtatgtattttttttaatagtcaccattataatttaagggtggaagtgatgcaagttcttaatactaggactcagtattggattcaaggtaggatttacaagaataaattcattgagtattaactttgcattattcctttactgtgttttttcctcagggaacttcttcattatgaaataactttagccacaaaaagtggag

SEQ ID NO: 24988 - DNA, 1897 bp, Homo sapiens
gtttctctctctggtcggaagcggcggtaatggcggatggtgggttgtggcgccggcggcggctgctgtgagggacgatgagtgcctccttcgtgccgaacggggccagcctggaagattgtcactgtaacctcttctgcctggctgacttgacaggaattaagtggaaaaaatatgtatggcaaggcccaacttctgcccctattctgtttcctgtgacagaagaagaccccattttgagcagttttagtcgctgccttaaggcagatgtacttggtgtttggcggcgagatcaaagacctggaagaagagaattgtggatattttggtggggtgaagaccccagttttgctgaccttattcaccatgacttatcagaagaagaagatggagtgtgggagaatggactttcctatgaatgccgtactctgcttttcaaagcagttcacaatctattggaacggtgtttaatgaacaggaattttgtacgtattggcaagtggtttgtaaagccttatgaaaaagatgaaaaacctataaataaaagtgaacacttgtcctgctccttcacctttttcttgcatggagacagcaatgtttgtaccagtgtggaaattaaccaacatcaacctgtataccttctcagtgaagagcatatcacccttgctcaacagtctaatagcccatttcaagttatcttatgcccatttggactaaatggcactctcacaggacaggcattcaagatgtctgattcagctacaaaaaaattaattggtgaatggaaacagttctatcctatctcatgttgcttgaaggagatgtctgaagaaaaacaggaagatatggattgggaagatgattctttagctgcagtagaagttcttgttgctggtgtccgaatgatctacccagcatgctttgttctagtccctcagtcagacattcctactcctagccctgtgggatccactcactgttcatcttcttgcttgggtgtccaccaagtgcctgcttccacaagagatcctgctatgtcttcggttacgcttacaccacctacgtctcctgaggaagtccaaacagttgatcctcagtctgtccagaagtgggtcaaattttcttcagtatctgatggcttcaactccgatagtactagccaccatggtgggaaaatacccagaaaattagcaaatcatgtggtggatagagtttggcaagaatgcaatatgaacagagcacagaacaagaggaagtattctgcttcatcaggtggtctatgcgaagaagcgacagctgctaaagtggcatcctgggattttgttgaagccacacaaagaacaaattgcagttgtttgaggtagattatttcccgatcgattgatgcctatgtgtgatagtttgttacgccactgaatgcttatgcccactttatttgaaacagcttacatgaacatatgtcaggattttttttcaaaagaaaattcaggaaaaatatttcaggaatttgaagctgattatagaagtacatgtaaatataagctttcagttcattcactgttaccagaggcagactctgaaagttttgtttcctagtagctaaataaaagacaattttatatggagctatggtatatatagtatctataagctatacagccatataaatctcttgagaaaagcattccttcctcaatggcactacctgagaaatttatcccaagagttctttctttttttaaaaaatgaagagacagggtcttgctttgttacccaggctggagtgatcatggctcactgcaacctcaaacttctggcctcagtcgatcctcctgccccagcctcccaagtagctagggttataggcatgtgccaccacacctggctaattaaaaga

SEQ ID NO: 24989 - DNA, 469 bp, Homo sapiens
cttatgcccactttatttgaaacagcttacatgaacatatgtcaggattttttttcaaaagaaaattcaggaaaaatatttcaggaatttgaagctgattatagaagtacatgtaaatataagctttcagttcattcactgttaccagaggcagactctgaaagttttgtttcctagtagctaaataaaagacaattttatatggagctatggtatatatagtatctataagctatacagccatataaatctcttgagaaaagcattccttcctcaatggcactacctgagaaatttatcccaagagttctttctttttttaaaaaatgaagagacagggtcttgctttgttacccaggctggagtgatcatggctcactgcaacctcaaacttctggcctcagtcgatcctcctgccccagcctcccaagtagctagggttataggcatgtgccaccacacctggcta

SEQ ID NO: 24990 - DNA, 559 bp, Homo sapiens
ttatgaattttaaagaattttgtaactttaaatcttaggaggaagtattctgcttcatcaggtggtctatgcgaagaagcgacagctgctaaagtggcatcctgggattttgttgaagccacacaaagaacaaattgcagttgtttgaggtagattatttcccgatcgattgatgcctatgtgtgatagtttgttacgccactgaatgcttatgcccactttatttgaaacagcttacatgaacatatgtcaggattttttttcaaaagaaaattcaggaaaaatatttcaggaatttgaagctgattatagaagtacatgtaaatataagctttcagttcattcactgttaccagaggcagactctgaaagttttgtttcctagtagctaaataaaagacaattttatatggagctatggtatatatagtatctataagctatacagccatataaatctcttgagaaaagcattccttcctcaatggcactacctgagaaatttatcccaagagttctttctttttttaaaaaatgaagagacagggtcttgctttgt

SEQ ID NO: 24991 - DNA, 312 bp, Homo sapiens
agcaagtgtaggtcacaccattagcaagcaatttcggggctataattaccaagaaaacatcaactggattatgattctgtttacacagtagaatttaaaaaaaccagtcagtgaaataaagaattaaatttcgtacctgtttttattctttaggtccttatcttgcttccctgccattggacagctctctactttcccagccaaatttagttgcccctacaagtcagtctttgattactccacctcagatgacaaatactggaaatgctaatactccatctgccaccttagcatctgcagcgagcagcacta

SEQ ID NO: 24992 - DNA, 373 bp, Homo sapiens
cttcaggatgccattcagaaaaaaagaacagtaagaccttggggtgttcagggtcctctcacttggcaacaatttcataaaatggctggccgaggctcttatggtaagtaatttatagtgatatataatgactaattttatatcagtcctcagatttctgtgcccaactagaataagcacattagttttctttaaatatatttgtgatatattcttaaggccactgtggtccaatcctagctttttttcccaccatttccaacattcagcttactcaactctccaactccacttcaaaaggagtggcttctcttaggtctgttcttacacatagggggctttccctcaagattttacatgaagaaagggacat

SEQ ID NO: 24993 - DNA, 325 bp, Homo sapiens
gaatagaaaaccagtttgaaggttttatatatattaaaatattaagatgtggggttgtgggtgctttttacttttttctttagtgaatgtttatattgtataactaacataattaaaaataattttgattaatctattatatgaacaaaaaagattaaggtcactaacttctgtgtcataaagcttgaggcaattattttagctgaacatttttgaaagatgtaaaaaaatggtctagtaaagtatctatagaacatttaaacttttctcatgtaccatctaagatatagcccctaataaactgagtaagttaacttcatttact

SEQ ID NO: 24994 - DNA, 10482 bp, Homo sapiens
gtttctctctctggtcggaagcggcggtaatggcggatggtgggttgtggcgccggcggcggctgctgtgagggacgatgagtgcctccttcgtgccgaacggggccagcctggaagattgtcactgtaacctcttctgcctggctgacttgacaggaattaagtggaaaaaatatgtatggcaaggcccaacttctgcccctattctgtttcctgtgacagaagaagaccccattttgagcagttttagtcgctgccttaaggcagatgtacttggtgtttggcggcgagatcaaagacctggaagaagagaattgtggatattttggtggggtgaagaccccagttttgctgaccttattcaccatgacttatcagaagaagaagatggagtgtgggagaatggactttcctatgaatgccgtactctgcttttcaaagcagttcacaatctattggaacggtgtttaatgaacaggaattttgtacgtattggcaagtggtttgtaaagccttatgaaaaagatgaaaaacctataaataaaagtgaacacttgtcctgctccttcacctttttcttgcatggagacagcaatgtttgtaccagtgtggaaattaaccaacatcaacctgtataccttctcagtgaagagcatatcacccttgctcaacagtctaatagcccatttcaagttatcttatgcccatttggactaaatggcactctcacaggacaggcattcaagatgtctgattcagctacaaaaaaattaattggtgaatggaaacagttctatcctatctcatgttgcttgaaggagatgtctgaagaaaaacaggaagatatggattgggaagatgattctttagctgcagtagaagttcttgttgctggtgtccgaatgatctacccagcatgctttgttctagtccctcagtcagacattcctactcctagccctgtgggatccactcactgttcatcttcttgcttgggtgtccaccaagtgcctgcttccacaagagatcctgctatgtcttcggttacgcttacaccacctacgtctcctgaggaagtccaaacagttgatcctcagtctgtccagaagtgggtcaaattttcttcagtatctgatggcttcaactccgatagtactagccaccatggtgggaaaatacccagaaaattagcaaatcatgtggtggatagagtttggcaagaatgcaatatgaacagagcacagaacaagaggaagtattctgcttcatcaggtggtctatgcgaagaagcgacagctgctaaagtggcatcctgggattttgttgaagccacacaaagaacaaattgcagttgtttgaggcacaaaaatctcaagtcaagaaatgctggacaacaaggacaggcaccatctttaggtcagcaacaacaaatacttcctaagcacaagaccaatgagaagcaagaaaagagtgaaaagccacagaaacgccccttgactccttttcaccatcgtgtgtctgttagtgatgatgttggcatggacgcagattcagccagccaaagacttgtgatctctgctccagacagtcaagtgagattttcaaatatccgaactaatgatgtagcaaagactcctcagatgcatggcaccgaaatggcaaattcacctcaaccacccccacttagtcctcacccttgtgatgtggttgatgaaggagtgactaaaacaccttcaactcctcagagtcaacatttttatcaaatgccaacaccagatcccttggttccttctaaaccaatggaagataggatagacagtttgtcccagtctttcccacctcaatatcaggaagctgtagaacctacagtatatgttggtacagcagtaaacttggaagaagatgaagccaatatagcctggaagtattacaagttcccaaagaaaaaagatgtagagtttttaccacctcaacttccaagtgataaattcaaggatgatccagttggaccttttggacaggaaagtgtaacatcagttacagagttaatggtgcaatgtaagaaacctttaaaagtttctgatgaattagtgcagcaatatcaaattaaaaaccagtgtctttcagcaatagcatctgatgcagaacaagaacctaaaattgatccatatgcatttgttgaaggagatgaggaattcctttttcctgataaaaaagatagacaaaatagtgagagagaagctggaaaaaaacacaaggtagaagatgggacatctagtgtaacagtgttatcacatgaagaagatgctatgtcattatttagtccctctatcaagcaagatgctccacgccctactagtcatgcccgtcctccatcaacaagtttgatttatgactcagacctggctgtctcttatactgaccttgataatctcttcaattctgatgaagatgaactaacacctggatctaaaagatcagcaaatggatcagatgataaagccagctgcaaggaatcaaagacaggaaatctggacccgttatcttgcataagcactgcagatcttcataaaatgtatcctacaccaccatcattggaacaacatattatgggattttccccaatgaatatgaataataaagaatatggtagtatggatacaacacctggaggaactgttctagaaggaaatagttctagtataggagcgcagttcaaaattgaggttgatgagggattctgtagccccaaaccttctgaaattaaagatttttcttatgtctataagcctgaaaattgtcaaattctagtgggatgttccatgtttgcacctctaaaaactctaccaagccaatatctgccccttatcaaattgccagaagagtgtatttaccgtcagagttggactgttggaaaattggaattgctttcttcagggccttcaatgccattcatcaaagagggtgatggaagtaatatggatcaagaatatggcactgcttatacacctcaaactcatacttcttgtgggatgcctcctagcagtgcacctcctagtaacagcggagcaggaattcttccttctccatccacccctcggtttccaactccaaggactccaaggactcctcggactcctcgtggagctggtggacctgctagtgctcaaggttcagtcaaatatgaaaattcagacttgtattcaccagcttctaccccatctacatgcagaccccttaattctgttgaacctgcaactgtcccttccatccctgaagcacacagtctttatgtaaacctcatcctttcagaatcagttatgaatttgtttaaagactgtaactctgatagttgttgcatctgtgtttgcaacatgaacatcaagggtgccgatgttggagtttacattccagatccaacgcaggaagcacaatataggtgtacctgtggcttcagtgctgtcatgaacagaaaatttggaaacaattcaggattatttcttgaagatgaactagatatcataggacgcaatacagactgtggcaaagaagcagaaaaacgttttgaagctctcagggctacctctgctgaacatgttaatggaggactaaaggaatctgaaaaattatctgatgatttgatattattgctacaagatcagtgcactaatttattttcaccctttggagcagcagaccaagatccttttcctaaaagtggtgtaattagcaattgggtacgtgttgaagagcgtgactgttgcaatgactgctaccttgcattagaacatgggcgtcagttcatggataacatgtcaggaggaaaagttgatgaagcacttgtgaaaagttcatgcttacacccctggtccaaaagaaacgatgtgagtatgcagtgctcacaggatatacttcgaatgctcctctctcttcagccagttcttcaggatgccattcagaaaaaaagaacagtaagaccttggggtgttcagggtcctctcacttggcaacaatttcataaaatggctggccgaggctcttatggaactgatgaatccccagaaccactgccaatccccacatttttgttgggttatgattatgattatctggtgctttctccatttgctcttccttattgggagagacttatgctggaaccctatggatctcaaagagatatagcctatgttgtactgtgtccagaaaatgaagccttgttaaatggagcaaaaagcttttttagagatcttactgcaatatatgagtcctgtcgattaggtcaacatagacctgtttctcgactgttaacagatgggatcatgagagttggatctactgcatcaaagaaactatcagaaaagttggtagcagaatggttttctcaggcagctgatggtaacaatgaagcattttctaaactcaagctttatgcacaagtctgcagatatgacctaggtccttatcttgcttccctgccattggacagctctctactttcccagccaaatttagttgcccctacaagtcagtctttgattactccacctcagatgacaaatactggaaatgctaatactccatctgccaccttagcatctgcagcgagcagcactatgacagtgacttcaggtgttgccatatctacttcagttgccacagctaattcaactttgaccacagcttcaacttcatcttcatcatcctccaacttgaatagtggagtatcatcaaataaactaccttcgtttccaccctttggcagtatgaacagtaatgctgcaggatccatgtctacacaagcaaatacagttcagagtggtcagctaggagggcaacagacatcagctctacagacagctgggatttctggagaatcatcttcacttcccactcagccgcatcctgatgtgtctgaaagcacgatggatcgggataaagtgggaatccccacagatggtgattcacatgcagtcacgtatccacctgcaattgttgtttatataattgatccttttacatacgaaaatacagacgagagcactaactcttctagtgtgtggacattggggctacttcgatgctttctagaaatggtccagactcttcctcctcatatcaagagtactgtttctgtacagattattccttgtcagtacctgttgcaacctgtgaagcatgaagatagagaaatctatccccagcatttaaaatccctggctttttcggcctttacccagtgtcggaggccacttccaacatcaaccaatgtgaaaacattgactggctttggtccaggtttagccatggaaactgcccttagaagtcctgatagaccagagtgtattcgactttatgcacctccttttattctggctccagtgaaggacaaacagacagagctaggagaaacatttggagaagctggacagaaatataatgttctttttgtgggatactgtttatcacatgatcaaaggtggattcttgcatcttgcacagatctatatggagaacttttagaaacttgtatcattaacatcgatgttccaaatagggctcgtcggaaaaaaagttctgctagaaaatttggtctacagaaactttgggagtggtgcttaggacttgtacaaatgagttcattgccatggagagttgtaattggtcgtctaggaaggattggtcatggagaattgaaagattggagctgtttgctgagtcgtcgaaacttgcagtctctaagtaaaaggctcaaagacatgtgtagaatgtgtggtatatctgctgcagactcccctagcattctcagtgcttgcttggtggcaatggagccgcaaggctcttttgttattatgccagattctgtgtcaactggttctgtatttggaagaagcacgactctaaatatgcagacatctcagctaaataccccacaggatacatcatgtactcatatacttgtgtttcctacttctgcttctgtgcaagtagcttcagctacttataccactgaaaatttggatttagctttcaatcccaacaatgatggagcagatggaatgggtatctttgatttgttagacacaggagatgatcttgaccctgatatcattaatatccttcctgcttctccaactggttctcctgtacattctccaggatctcattacccccatggaggtgatgcgggcaagggtcagagtactgatcggctactatcaacagaacctcatgaggaagtacctaatattcttcagcaaccattggcccttggttactttgtatcaactgccaaagcaggtccattacctgactggttctggtcagcatgtcctcaagcacaatatcagtgtcccctttttcttaaggcctctttgcacctccacgtgccttcagtgcaatctgacgagctgcttcacagtaaacactcccacccacttgactcaaatcagacttcagatgtcctcaggtttgttttggaacagtacaatgcactctcctggctaacctgtgaccctgcaacccaggacagacgctcatgtctcccaattcattttgtggtgctgaatcagttatataactttattatgaatatgctgtgatcttcatttgatggaactgtgcaagaaaagaacaaggaaaaatggatgtttcgctgcaggattaagttacaattatcttctcagtgaaggtcatttgtgatggggtctaattcttattacttcaacaaatattgttttgacttggggggaggggctataaccctgctatttttcattgactctattgaactctttaggatgatgactgatcatacaaaacgtattataacattttcgtagcaaaattaaccttttttttttccagtcacagtatttgtgaaaagtaatgagccatagtacccagtcatgttaaatgaatattaaaagcatggagaggaaacatgaggaacaatgaatttcaacatatggcttcagaacatgaagatgttcttgtatggattatagtatctagtattcaaaaatgcctgcatctcttctcttatttattgtaagtttttaaatgtataaattgtcttatatttcttaacctcttttataaaaattttcctagaaggtttatactgccttcttgctttaaagcaattggtctaaaatatatgtaatcgtcttaattaaaaagttgcagtagggttgcttttagagtattatttttttgtaagggggtgggtgggacagtaaatttgtattgtctcgatgtacagtttaacggggatagagggggaataatgtccataccattgtgtgtggaggatttacagctaagctgtagttgcagagtacatgtacagtaatgaagttcactgtgtttataaattgaaaaggtaccaggtcttacagcattttatatatcacatctttacagaataacatgatggcaatatacaagtggtattgttaggtggtttaacttagaataaaatgagaattcttcagttatattttgtactatggtttagggctatgactaatatttcaggccatttccggtgaaagaaacttagttttacaagaaaaaccatttgctactgaatgcttaaactaattttagtgtttaatgttacatgcttaaatttttttcagttttaacagtggcatatttaggcatggaaatattattatgaaatttattttcaggatctgctataaggttgaaatttagcccagctctaggcattttacaaattatttttcaagcagtcattcttgattgtttgacttttttttttaaattaaagattgggaatgtatgtgagagtatgcatatgtatgggtgtgtgtgtgtgcgcgcaatcaaactgtggtgtaaatagattctcagtgaattctgggtattcagactctattccactagtgaaagaaccattttttaaacttcccttgccttttttatttatttaattttcttggtttggagatgtcagtcccaaacaccagagtctgtacttttctataacacagctcagattaaggtagggcatatgccaaggaggttctcacctccctaaagaagggacttgaattttagggactttaattcacccctccttcaatacaactttcccccttcttgtttgcacatgccaagataactgcttttatgcaggctgtacccccttgaaaaatcctttctacagtgctgctcacaaaagagcccaagttcgcctcctacctgcattgctgacttgaattcacagtcgccgagtctacctagctttcttggaagcagtctagcaaaatttctatttgtacgttcactaattatctacaaggacaaaatcagttgtatttacaaaactctacttcagtgtttgttttagtttttttttttactgaaacttgtttttgtgaatactctgtgcttagaattaaatatcactttcttatgaacaacataacttcttcagattgtgtatatgaaaacattagcaagtcttgttttttctatgaagcaaacacaattggtgacaaaggttgtcaatcatttcttcaaaattataatgcagttctaatggtcagcatattttgatattaaatttaaagatcacctctctgcatttgtttttaaattatgctaatacaccacacattatgttggtatgttttgttctgtactttctttaaaaaaaaaaaaaaaacttgtctgagatttgaaggaaaatgtgcttatttggaatttccataaaaagagtatcctttttatacacttaatagtgactttacaaaataaaagttatattctcagttgtttaaaatcactaacctatgataaccacacctcaatttgaaagtagatttaaaattattccctgacaggttatttaatatggagccataaggagggaacccagtacacaattattttttatttgggaatcagggaatagttcccaaatatacaggatttattgataagattttttttcttcccttcatatatccattcaaactcaatggaaagttattaaataaccattagaaaagctcagtagacttatttgagaaattaagccttgtgcaggatgatggatttgacttactaatgtactgtcacagacaaatatgggtagttttgtttaaataggtaagcaaaatattatactttatagcagtggattaccaacaccttgacttctttgttacagtgctaacatcttttttttgtgcaggtatccatgattattaagcagggtggaagttcagtattttgtcatttaaaaagattagttatataatgtctgcttccagccagtgagaaacatctagccatacctttcttatgcaagccattgagttatcaggactgtgaattaacactgtatgaataaatttctgtacaccttattgtttggccagaaggccaccaagtgtacttatatgtaatccttaaattttaaagtagctgtaatttttaaatatttctaaacttttcttaaaccactaaaattaagctcttactacttagtcaactatcctcagctgtattcgtactcaattgtcagtatggcacagattactgtattaaaatattctcctttcgtcttcatatttaccttctgaggtaattttttaacttaatgtgttactacaaagatttgcagatctttaatcaagcactatgttaatactgtaatatcagaatactatgttgcattatttaaaatgttcaaattgaatagattaaaaagtttttaaatgctattgcatcatataatttgctattcatccactatggcattgcatatcaatcagttaatacacttaatgttgcatgagtgatattttggtctgggtttcctcttaagattttagtttgtctgaattaaggaaaaatgtttttaatatacattcttattttgtcccacccctccagaaataagctggaaatcttaactttttggggggtcttttttggtgttttaatgggcccagaactgtggtttaaatttttatgtatgtattttcttttttgtggagtataaatttaaaaactggatttgggacctaaaatactcctcaggttgatgtattcatgaagttttaaaacatctttagttttcaaagtaaactggatatgtggaccttaaagttattgagtttaagctacaaattgtaacgtcattactggacatgtcagcatcaaccctctcaaaatagcttggtcactttatgaaggggcgttttaaagttgttgtttagcagtgacatttaatatggtccaattgcttttctttttaacgtgacaaaaagagaataaggaacaaacactattgctgccgaatgccataacactgagttgtacaaattgtgattgaggaaatgaaaaggtttatactttttaaaaaaaaaaacaaaaacaacaaacaaaacttcaaatggaataaattattcatgaagccttaacaaaaacacaacacaaaac

SEQ ID NO: 24995 - DNA, 9147 bp, Homo sapiens
gtttctctctctggtcggaagcggcggtaatggcggatggtgggttgtggcgccggcggcggctgctgtgagggacgatgagtgcctccttcgtgccgaacggggccagcctggaagattgtcactgtaacctcttctgcctggctgacttgacaggaattaagtggaaaaaatatgtatggcaaggcccaacttctgcccctattctgtttcctgtgacagaagaagaccccattttgagcagttttagtcgctgccttaaggcagatgtacttggtgtttggcggcgagatcaaagacctggaagaagagaattgtggatattttggtggggtgaagaccccagttttgctgaccttattcaccatgacttatcagaagaagaagatggagtgtgggagaatggactttcctatgaatgccgtactctgcttttcaaagcagttcacaatctattggaacggtgtttaatgaacaggaattttgtacgtattggcaagtggtttgtaaagccttatgaaaaagatgaaaaacctataaataaaagtgaacacttgtcctgctccttcacctttttcttgcatggagacagcaatgtttgtaccagtgtggaaattaaccaacatcaacctgtataccttctcagtgaagagcatatcacccttgctcaacagtctaatagcccatttcaagttatcttatgcccatttggactaaatggcactctcacaggacaggcattcaagatgtctgattcagctacaaaaaaattaattggtgaatggaaacagttctatcctatctcatgttgcttgaaggagatgtctgaagaaaaacaggaagatatggattgggaagatgattctttagctgcagtagaagttcttgttgctggtgtccgaatgatctacccagcatgctttgttctagtccctcagtcagacattcctactcctagccctgtgggatccactcactgttcatcttcttgcttgggtgtccaccaagtgcctgcttccacaagagatcctgctatgtcttcggttacgcttacaccacctacgtctcctgaggaagtccaaacagttgatcctcagtctgtccagaagtgggtcaaattttcttcagtatctgatggcttcaactccgatagtactagccaccatggtgggaaaatacccagaaaattagcaaatcatgtggtggatagagtttggcaagaatgcaatatgaacagagcacagaacaagaggaagtattctgcttcatcaggtggtctatgcgaagaagcgacagctgctaaagtggcatcctgggattttgttgaagccacacaaagaacaaattgcagttgtttgaggcacaaaaatctcaagtcaagaaatgctggacaacaaggacaggcaccatctttaggtcagcaacaacaaatacttcctaagcacaagaccaatgagaagcaagaaaagagtgaaaagccacagaaacgccccttgactccttttcaccatcgtgtgtctgttagtgatgatgttggcatggacgcagattcagccagccaaagacttgtgatctctgctccagacagtcaagtgagattttcaaatatccgaactaatgatgtagcaaagactcctcagatgcatggcaccgaaatggcaaattcacctcaaccacccccacttagtcctcacccttgtgatgtggttgatgaaggagtgactaaaacaccttcaactcctcagagtcaacatttttatcaaatgccaacaccagatcccttggttccttctaaaccaatggaagataggatagacagtttgtcccagtctttcccacctcaatatcaggaagctgtagaacctacagtatatgttggtacagcagtaaacttggaagaagatgaagccaatatagcctggaagtattacaagttcccaaagaaaaaagatgtagagtttttaccacctcaacttccaagtgataaattcaaggatgatccagttggaccttttggacaggaaagtgtaacatcagttacagagttaatggtgcaatgtaagaaacctttaaaagtttctgatgaattagtgcagcaatatcaaattaaaaaccagtgtctttcagcaatagcatctgatgcagaacaagaacctaaaattgatccatatgcatttgttgaaggagatgaggaattcctttttcctgataaaaaagatagacaaaatagtgagagagaagctggaaaaaaacacaaggtagaagatgggacatctagtgtaacagtgttatcacatgaagaagatgctatgtcattatttagtccctctatcaagcaagatgttaatggaggactaaaggaatctgaaaaattatctgatgatttgatattattgctacaagatcagtgcactaatttattttcaccctttggagcagcagaccaagatccttttcctaaaagtggtgtaattagcaattgggtacgtgttgaagagcgtgactgttgcaatgactgctaccttgcattagaacatgggcgtcagttcatggataacatgtcaggaggaaaagttgatgaagcacttgtgaaaagttcatgcttacacccctggtccaaaagaaacgatgtgagtatgcagtgctcacaggatatacttcgaatgctcctctctcttcagccagttcttcaggatgccattcagaaaaaaagaacagtaagaccttggggtgttcagggtcctctcacttggcaacaatttcataaaatggctggccgaggctcttatggaactgatgaatccccagaaccactgccaatccccacatttttgttgggttatgattatgattatctggtgctttctccatttgctcttccttattgggagagacttatgctggaaccctatggatctcaaagagatatagcctatgttgtactgtgtccagaaaatgaagccttgttaaatggagcaaaaagcttttttagagatcttactgcaatatatgagtcctgtcgattaggtcaacatagacctgtttctcgactgttaacagatgggatcatgagagttggatctactgcatcaaagaaactatcagaaaagttggtagcagaatggttttctcaggcagctgatggtaacaatgaagcattttctaaactcaagctttatgcacaagtctgcagatatgacctaggtccttatcttgcttccctgccattggacagctctctactttcccagccaaatttagttgcccctacaagtcagtctttgattactccacctcagatgacaaatactggaaatgctaatactccatctgccaccttagcatctgcagcgagcagcactatgacagtgacttcaggtgttgccatatctacttcagttgccacagctaattcaactttgaccacagcttcaacttcatcttcatcatcctccaacttgaatagtggagtatcatcaaataaactaccttcgtttccaccctttggcagtatgaacagtaatgctgcaggatccatgtctacacaagcaaatacagttcagagtggtcagctaggagggcaacagacatcagctctacagacagctgggatttctggagaatcatcttcacttcccactcagccgcatcctgatgtgtctgaaagcacgatggatcgggataaagtgggaatccccacagatggtgattcacatgcagtcacgtatccacctgcaattgttgtttatataattgatccttttacatacgaaaatacagacgagagcactaactcttctagtgtgtggacattggggctacttcgatgctttctagaaatggtccagactcttcctcctcatatcaagagtactgtttctgtacagattattccttgtcagtacctgttgcaacctgtgaagcatgaagatagagaaatctatccccagcatttaaaatccctggctttttcggcctttacccagtgtcggaggccacttccaacatcaaccaatgtgaaaacattgactggctttggtccaggtttagccatggaaactgcccttagaagtcctgatagaccagagtgtattcgactttatgcacctccttttattctggctccagtgaaggacaaacagacagagctaggagaaacatttggagaagctggacagaaatataatgttctttttgtgggatactgtttatcacatgatcaaaggtggattcttgcatcttgcacagatctatatggagaacttttagaaacttgtatcattaacatcgatgttccaaatagggctcgtcggaaaaaaagttctgctagaaaatttggtctacagaaactttgggagtggtgcttaggacttgtacaaatgagttcattgccatggagagttgtaattggtcgtctaggaaggattggtcatggagaattgaaagattggagctgtttgctgagtcgtcgaaacttgcagtctctaagtaaaaggctcaaagacatgtgtagaatgtgtggtatatctgctgcagactcccctagcattctcagtgcttgcttggtggcaatggagccgcaaggctcttttgttattatgccagattctgtgtcaactggttctgtatttggaagaagcacgactctaaatatgcagacatctcagctaaataccccacaggatacatcatgtactcatatacttgtgtttcctacttctgcttctgtgcaagtagcttcagctacttataccactgaaaatttggatttagctttcaatcccaacaatgatggagcagatggaatgggtatctttgatttgttagacacaggagatgatcttgaccctgatatcattaatatccttcctgcttctccaactggttctcctgtacattctccaggatctcattacccccatggaggtgatgcgggcaagggtcagagtactgatcggctactatcaacagaacctcatgaggaagtacctaatattcttcagcaaccattggcccttggttactttgtatcaactgccaaagcaggtccattacctgactggttctggtcagcatgtcctcaagcacaatatcagtgtcccctttttcttaaggcctctttgcacctccacgtgccttcagtgcaatctgacgagctgcttcacagtaaacactcccacccacttgactcaaatcagacttcagatgtcctcaggtttgttttggaacagtacaatgcactctcctggctaacctgtgaccctgcaacccaggacagacgctcatgtctcccaattcattttgtggtgctgaatcagttatataactttattatgaatatgctgtgatcttcatttgatggaactgtgcaagaaaagaacaaggaaaaatggatgtttcgctgcaggattaagttacaattatcttctcagtgaaggtcatttgtgatggggtctaattcttattacttcaacaaatattgttttgacttggggggaggggctataaccctgctatttttcattgactctattgaactctttaggatgatgactgatcatacaaaacgtattataacattttcgtagcaaaattaaccttttttttttccagtcacagtatttgtgaaaagtaatgagccatagtacccagtcatgttaaatgaatattaaaagcatggagaggaaacatgaggaacaatgaatttcaacatatggcttcagaacatgaagatgttcttgtatggattatagtatctagtattcaaaaatgcctgcatctcttctcttatttattgtaagtttttaaatgtataaattgtcttatatttcttaacctcttttataaaaattttcctagaaggtttatactgccttcttgctttaaagcaattggtctaaaatatatgtaatcgtcttaattaaaaagttgcagtagggttgcttttagagtattatttttttgtaagggggtgggtgggacagtaaatttgtattgtctcgatgtacagtttaacggggatagagggggaataatgtccataccattgtgtgtggaggatttacagctaagctgtagttgcagagtacatgtacagtaatgaagttcactgtgtttataaattgaaaaggtaccaggtcttacagcattttatatatcacatctttacagaataacatgatggcaatatacaagtggtattgttaggtggtttaacttagaataaaatgagaattcttcagttatattttgtactatggtttagggctatgactaatatttcaggccatttccggtgaaagaaacttagttttacaagaaaaaccatttgctactgaatgcttaaactaattttagtgtttaatgttacatgcttaaatttttttcagttttaacagtggcatatttaggcatggaaatattattatgaaatttattttcaggatctgctataaggttgaaatttagcccagctctaggcattttacaaattatttttcaagcagtcattcttgattgtttgacttttttttttaaattaaagattgggaatgtatgtgagagtatgcatatgtatgggtgtgtgtgtgtgcgcgcaatcaaactgtggtgtaaatagattctcagtgaattctgggtattcagactctattccactagtgaaagaaccattttttaaacttcccttgccttttttatttatttaattttcttggtttggagatgtcagtcccaaacaccagagtctgtacttttctataacacagctcagattaaggtagggcatatgccaaggaggttctcacctccctaaagaagggacttgaattttagggactttaattcacccctccttcaatacaactttcccccttcttgtttgcacatgccaagataactgcttttatgcaggctgtacccccttgaaaaatcctttctacagtgctgctcacaaaagagcccaagttcgcctcctacctgcattgctgacttgaattcacagtcgccgagtctacctagctttcttggaagcagtctagcaaaatttctatttgtacgttcactaattatctacaaggacaaaatcagttgtatttacaaaactctacttcagtgtttgttttagtttttttttttactgaaacttgtttttgtgaatactctgtgcttagaattaaatatcactttcttatgaacaacataacttcttcagattgtgtatatgaaaacattagcaagtcttgttttttctatgaagcaaacacaattggtgacaaaggttgtcaatcatttcttcaaaattataatgcagttctaatggtcagcatattttgatattaaatttaaagatcacctctctgcatttgtttttaaattatgctaatacaccacacattatgttggtatgttttgttctgtactttctttaaaaaaaaaaaaaaaacttgtctgagatttgaaggaaaatgtgcttatttggaatttccataaaaagagtatcctttttatacacttaatagtgactttacaaaataaaagttatattctcagttgtttaaaatcactaacctatgataaccacacctcaatttgaaagtagatttaaaattattccctgacaggttatttaatatggagccataaggagggaacccagtacacaattattttttatttgggaatcagggaatagttcccaaatatacaggatttattgataagattttttttcttcccttcatatatccattcaaactcaatggaaagttattaaataaccattagaaaagctcagtagacttatttgagaaattaagccttgtgcaggatgatggatttgacttactaatgtactgtcacagacaaatatgggtagttttgtttaaataggtaagcaaaatattatactttatagcagtggattaccaacaccttgacttctttgttacagtgctaacatcttttttttgtgcaggtatccatgattattaagcagggtggaagttcagtattttgtcatttaaaaagattagttatataatgtctgcttccagccagtgagaaacatctagccatacctttcttatgcaagccattgagttatcaggactgtgaattaacactgtatgaataaatttctgtacaccttattgtttggccagaaggccaccaagtgtacttatatgtaatccttaaattttaaagtagctgtaatttttaaatatttctaaacttttcttaaaccactaaaattaagctcttactacttagtcaactatcctcagctgtattcgtactcaattgtcagtatggcacagattactgtattaaaatattctcctttcgtcttcatatttaccttctgaggtaattttttaacttaatgtgttactacaaagatttgcagatctttaatcaagcactatgttaatactgtaatatcagaatactatgttgcattatttaaaatgttcaaattgaatagattaaaaagtttttaaatgctattgcatcatataatttgctattcatccactatggcattgcatatcaatcagttaatacacttaatgttgcatgagtgatattttggtctgggtttcctcttaagattttagtttgtctgaattaaggaaaaatgtttttaatatacattcttattttgtcccacccctccagaaataagctggaaatcttaactttttggggggtcttttttggtgttttaatgggcccagaactgtggtttaaatttttatgtatgtattttcttttttgtggagtataaatttaaaaactggatttgggacctaaaatactcctcaggttgatgtattcatgaagttttaaaacatctttagttttcaaagtaaactggatatgtggaccttaaagttattgagtttaagctacaaattgtaacgtcattactggacatgtcagcatcaaccctctcaaaatagcttggtcactttatgaaggggcgttttaaagttgttgtttagcagtgacatttaatatggtccaattgcttttctttttaacgtgacaaaaagagaataaggaacaaacactattgctgccgaatgccataacactgagttgtacaaattgtgattgaggaaatgaaaaggtttatacttttta

SEQ ID NO: 24996 - DNA, 9020 bp, Homo sapiens
gcgagcagcatactactactaattccgcggccgctcgacgcaacaacaaatacttcctaagcacaagaccaatgagaagcaagaaaagagtgaaaagccacagaaacgccccttgactccttttcaccatcgtgtgtctgttagtgatgatgttggcatggacgcagattcagccagccaaagacttgtgatctctgctccagacagtcaagtgagattttcaaatatccgaactaatgatgtagcaaagactcctcagatgcatggcaccgaaatggcaaattcacctcaaccacccccacttagtcctcacccttgtgatgtggttgatgaaggagtgactaaaacaccttcaactcctcagagtcaacatttttatcaaatgccaacaccagatcccttggttccttctaaaccaatggaagataggatagacagtttgtcccagtctttcccacctcaatatcaggaagctgtagaacctacagtatatgttggtacagcagtaaacttggaagaagatgaagccaatatagcctggaagtattacaagttcccaaagaaaaaagatgtagagtttttaccacctcaacttccaagtgataaattcaaggatgatccagttggaccttttggacaggaaagtgtaacatcagttacagagttaatggtgcaatgtaagaaacctttaaaagtttctgatgaattagtgcagcaatatcaaattaaaaaccagtgtctttcagcaatagcatctgatgcagaacaagaacctaaaattgatccatatgcatttgttgaaggagatgaggaattcctttttcctgataaaaaagatagacaaaatagtgagagagaagctggaaaaaaacacaaggtagaagatgggacatctagtgtaacagtgttatcacatgaagaagatgctatgtcattatttagtccctctatcaagcaagatgctccacgccctactagtcatgcccgtcctccatcaacaagtttgatttatgactcagacctggctgtctcttatactgaccttgataatctcttcaattctgatgaagatgaactaacacctggatctaaaagatcagcaaatggatcagatgataaagccagctgcaaggaatcaaagacaggaaatctggacccgttatcttgcataagcactgcagatcttcataaaatgtatcctacaccaccatcattggaacaacatattatgggattttccccaatgaatatgaataataaagaatatggtagtatggatacaacacctggaggaactgttctagaaggaaatagttctagtataggagcgcagttcaaaattgaggttgatgagggattctgtagccccaaaccttctgaaattaaagatttttcttatgtctataagcctgaaaattgtcaaattctagtgggatgttccatgtttgcacctctaaaaactctaccaagccaatatctgccccttatcaaattgccagaagagtgtatttaccgtcagagttggactgttggaaaattggaattgctttcttcagggccttcaatgccattcatcaaagagggtgatggaagtaatatggatcaagaatatggcactgcttatacacctcaaactcatacttcttgtgggatgcctcctagcagtgcacctcctagtaacagcggagcaggaattcttccttctccatccacccctcggtttccaactccaaggactccaaggactcctcggactcctcgtggagctggtggacctgctagtgctcaaggttcagtcaaatatgaaaattcagacttgtattcaccagcttctaccccatctacatgcagaccccttaattctgttgaacctgcaactgtcccttccatccctgaagcacacagtctttatgtaaacctcatcctttcagaatcagttatgaatttgtttaaagactgtaactctgatagttgttgcatctgtgtttgcaacatgaacatcaagggtgccgatgttggagtttacattccagatccaacgcaggaagcacaatataggtgtacctgtggcttcagtgctgtcatgaacagaaaatttggaaacaattcaggattatttcttgaagatgaactagatatcataggacgcaatacagactgtggcaaagaagcagaaaaacgttttgaagctctcagggctacctctgctgaacatgttaatggaggactaaaggaatctgaaaaattatctgatgatttgatattattgctacaagatcagtgcactaatttattttcaccctttggagcagcagaccaagatccttttcctaaaagtggtgtaattagcaattgggtacgtgttgaagagcgtgactgttgcaatgactgctaccttgcattagaacatgggcgtcagttcatggataacatgtcaggaggaaaagttgatgaagcacttgtgaaaagttcatgcttacacccctggtccaaaagaaacgatgtgagtatgcagtgctcacaggatatacttcgaatgctcctctctcttcagccagttcttcaggatgccattcagaaaaaaagaacagtaagaccttggggtgttcagggtcctctcacttggcaacaatttcataaaatggctggccgaggctcttatggaactgatgaatccccagaaccactgccaatccccacatttttgttgggttatgattatgattatctggtgctttctccatttgctcttccttattgggagagacttatgctggaaccctatggatctcaaagagatatagcctatgttgtactgtgtccagaaaatgaagccttgttaaatggagcaaaaagcttttttagagatcttactgcaatatatgagtcctgtcgattaggtcaacatagacctgtttctcgactgttaacagatgggatcatgagagttggatctactgcatcaaagaaactatcagaaaagttggtagcagaatggttttctcaggcagctgatggtaacaatgaagcattttctaaactcaagctttatgcacaagtctgcagatatgacctaggtccttatcttgcttccctgccattggacagctctctactttcccagccaaatttagttgcccctacaagtcagtctttgattactccacctcagatgacaaatactggaaatgctaatactccatctgccaccttagcatctgcagcgagcagcactatgacagtgacttcaggtgttgccatatctacttcagttgccacagctaattcaactttgaccacagcttcaacttcatcttcatcatcctccaacttgaatagtggagtatcatcaaataaactaccttcgtttccaccctttggcagtatgaacagtaatgctgcaggatccatgtctacacaagcaaatacagttcagagtggtcagctaggagggcaacagacatcagctctacagacagctgggatttctggagaatcatcttcacttcccactcagccgcatcctgatgtgtctgaaagcacgatggatcgggataaagtgggaatccccacagatggtgattcacatgcagtcacgtatccacctgcaattgttgtttatataattgatccttttacatacgaaaatacagacgagagcactaactcttctagtgtgtggacattggggctacttcgatgctttctagaaatggtccagactcttcctcctcatatcaagagtactgtttctgtacagattattccttgtcagtacctgttgcaacctgtgaagcatgaagatagagaaatctatccccagcatttaaaatccctggctttttcggcctttacccagtgtcggaggccacttccaacatcaaccaatgtgaaaacattgactggctttggtccaggtttagccatggaaactgcccttagaagtcctgatagaccagagtgtattcgactttatgcacctccttttattctggctccagtgaaggacaaacagacagagctaggagaaacatttggagaagctggacagaaatataatgttctttttgtgggatactgtttatcacatgatcaaaggtggattcttgcatcttgcacagatctatatggagaacttttagaaacttgtatcattaacatcgatgttccaaatagggctcgtcggaaaaaaagttctgctagaaaatttggtctacagaaactttgggagtggtgcttaggacttgtacaaatgagttcattgccatggagagttgtaattggtcgtctaggaaggattggtcatggagaattgaaagattggagctgtttgctgagtcgtcgaaacttgcagtctctaagtaaaaggctcaaagacatgtgtagaatgtgtggtatatctgctgcagactcccctagcattctcagtgcttgcttggtggcaatggagccgcaaggctcttttgttattatgccagattctgtgtcaactggttctgtatttggaagaagcacgactctaaatatgcagacatctcagctaaataccccacaggatacatcatgtactcatatacttgtgtttcctacttctgcttctgtgcaagtagcttcagctacttataccactgaaaatttggatttagctttcaatcccaacaatgatggagcagatggaatgggtatctttgatttgttagacacaggagatgatcttgaccctgatatcattaatatccttcctgcttctccaactggttctcctgtacattctccaggatctcattacccccatggaggtgatgcgggcaagggtcagagtactgatcggctactatcaacagaacctcatgaggaagtacctaatattcttcagcaaccattggcccttggttactttgtatcaactgccaaagcaggtccattacctgactggttctggtcagcatgtcctcaagcacaatatcagtgtcccctttttcttaaggcctctttgcacctccacgtgccttcagtgcaatctgacgagctgcttcacagtaaacactcccacccacttgactcaaatcagacttcagatgtcctcaggtttgttttggaacagtacaatgcactctcctggctaacctgtgaccctgcaacccaggacagacgctcatgtctcccaattcattttgtggtgctgaatcagttatataactttattatgaatatgctgtgatcttcatttgatggaactgtgcaagaaaagaacaaggaaaaatggatgtttcgctgcaggattaagttacaattatcttctcagtgaaggtcatttgtgatggggtctaattcttattacttcaacaaatattgttttgacttggggggaggggctataaccctgctatttttcattgactctattgaactctttaggatgatgactgatcatacaaaacgtattataacattttcgtagcaaaattaaccttttttttttccagtcacagtatttgtgaaaagtaatgagccatagtacccagtcatgttaaatgaatattaaaagcatggagaggaaacatgaggaacaatgaatttcaacatatggcttcagaacatgaagatgttcttgtatggattatagtatctagtattcaaaaatgcctgcatctcttctcttatttattgtaagtttttaaatgtataaattgtcttatatttcttaacctcttttataaaaattttcctagaaggtttatactgccttcttgctttaaagcaattggtctaaaatatatgtaatcgtcttaattaaaaagttgcagtagggttgcttttagagtattatttttttgtaagggggtgggtgggacagtaaatttgtattgtctcgatgtacagtttaacggggatagagggggaataatgtccataccattgtgtgtggaggatttacagctaagctgtagttgcagagtacatgtacagtaatgaagttcactgtgtttataaattgaaaaggtaccaggtcttacagcattttatatatcacatctttacagaataacatgatggcaatatacaagtggtattgttaggtggtttaacttagaataaaatgagaattcttcagttatattttgtactatggtttagggctatgactaatatttcaggccatttccggtgaaagaaacttagttttacaagaaaaaccatttgctactgaatgcttaaactaattttagtgtttaatgttacatgcttaaatttttttcagttttaacagtggcatatttaggcatggaaatattattatgaaatttattttcaggatctgctataaggttgaaatttagcccagctctaggcattttacaaattatttttcaagcagtcattcttgattgtttgacttttttttttaaattaaagattgggaatgtatgtgagagtatgcatatgtatgggtgtgtgtgtgtgcgcgcaatcaaactgtggtgtaaatagattctcagtgaattctgggtattcagactctattccactagtgaaagaaccattttttaaacttcccttgccttttttatttatttaattttcttggtttggagatgtcagtcccaaacaccagagtctgtacttttctataacacagctcagattaaggtagggcatatgccaaggaggttctcacctccctaaagaagggacttgaattttagggactttaattcacccctccttcaatacaactttcccccttcttgtttgcacatgccaagataactgcttttatgcaggctgtacccccttgaaaaatcctttctacagtgctgctcacaaaagagcccaagttcgcctcctacctgcattgctgacttgaattcacagtcgccgagtctacctagctttcttggaagcagtctagcaaaatttctatttgtacgttcactaattatctacaaggacaaaatcagttgtatttacaaaactctacttcagtgtttgttttagtttttttttttactgaaacttgtttttgtgaatactctgtgcttagaattaaatatcactttcttatgaacaacataacttcttcagattgtgtatatgaaaacattagcaagtcttgttttttctatgaagcaaacacaattggtgacaaaggttgtcaatcatttcttcaaaattataatgcagttctaatggtcagcatattttgatattaaatttaaagatcacctctctgcatttgtttttaaattatgctaatacaccacacattatgttggtatgttttgttctgtactttctttaaaaaaaaaaaaaaaacttgtctgagatttgaaggaaaatgtgcttatttggaatttccataaaaagagtatcctttttatacacttaatagtgactttacaaaataaaagttatattctcagttgtttaaaatcactaacctatgataaccacacctcaatttgaaagtagatttaaaattattccctgacaggttatttaatatggagccataaggagggaacccagtacacaattattttttatttgggaatcagggaatagttcccaaatatacaggatttattgataagattttttttcttcccttcatatatccattcaaactcaatggaaagttattaaataaccattagaaaagctcagtagacttatttgagaaattaagccttgtgcaggatgatggatttgacttactaatgtactgtcacagacaaatatgggtagttttgtttaaataggtaagcaaaatattatactttatagcagtggattaccaacaccttgacttctttgttacagtgctaacatcttttttttgtgcaggtatccatgattattaagcagggtggaagttcagtattttgtcatttaaaaagattagttatataatgtctgcttccagccagtgagaaacatctagccatacctttcttatgcaagccattgagttatcaggactgtgaattaacactgtatgaataaatttctgtacaccttattgtttggccagaaggccaccaagtgtacttatatgtaatccttaaattttaaagtagctgtaatttttaaatatttctaaacttttcttaaaccactaaaattaagctcttactacttagtcaactatcctcagctgtattcgtactcaattgtcagtatggcacagattactgtattaaaatattctcctttcgtcttcatatttaccttctgaggtaattttttaacttaatgtgttactacaaagatttgcagatctttaatcaagcactatgttaatactgtaatatcagaatactatgttgcattatttaaaatgttcaaattgaatagattaaaaagtttttaaatgctattgcatcatataatttgctattcatccactatggcattgcatatcaatcagttaatacacttaatgttgcatgagtgatattttggtctgggtttcctcttaagattttagtttgtctgaattaaggaaaaatgtttttaatatacattcttattttgtcccacccctccagaaataagctggaaatcttaactttttggggggtcttttttggtgttttaatgggcccagaactgtggtttaaatttttatgtatgtattttcttttttgtggagtataaatttaaaaactggatttgggacctaaaatactcctcaggttgatgtattcatgaagttttaaaacatctttagttttcaaagtaaactggatatgtggaccttaaagttattgagtttaagctacaaattgtaacgtcattactggacatgtcagcatcaaccctctcaaaatagcttggtcactttatgaaggggcgttttaaagttgttgtttagcagtgacatttaatatggtccaattgcttttctttttaacgtgacaaaaagagaataaggaacaaacactattgctgccgaatgccataacactgagttgtacaaattgtgattgaggaaatgaaaaggtttatacttttta

SEQ ID NO: 24997 - DNA, 10459 bp, Homo sapiens
  misc_feature (7058)..(7058): n is a, c, g, or t
  misc_feature (7062)..(7062): n is a, c, g, or t
  misc_feature (7064)..(7064): n is a, c, g, or t
  misc_feature (7067)..(7067): n is a, c, g, or t
  misc_feature (7087)..(7087): n is a, c, g, or t
  misc_feature (7090)..(7090): n is a, c, g, or t
gtttctctctctggtcggaagcggcggtaatggcggatggtgggttgtggcgccggcggcggctgctgtgagggacgatgagtgcctccttcgtgccgaacggggccagcctggaagattgtcactgtaacctcttctgcctggctgacttgacaggaattaagtggaaaaaatatgtatggcaaggcccaacttctgcccctattctgtttcctgtgacagaagaagaccccattttgagcagttttagtcgctgccttaaggcagatgtacttggtgtttggcggcgagatcaaagacctggaagaagagaattgtggatattttggtggggtgaagaccccagttttgctgaccttattcaccatgacttatcagaagaagaagatggagtgtgggagaatggactttcctatgaatgccgtactctgcttttcaaagcagttcacaatctattggaacggtgtttaatgaacaggaattttgtacgtattggcaagtggtttgtaaagccttatgaaaaagatgaaaaacctataaataaaagtgaacacttgtcctgctccttcacctttttcttgcatggagacagcaatgtttgtaccagtgtggaaattaaccaacatcaacctgtataccttctcagtgaagagcatatcacccttgctcaacagtctaatagcccatttcaagttatcttatgcccatttggactaaatggcactctcacaggacaggcattcaagatgtctgattcagctacaaaaaaattaattggtgaatggaaacagttctatcctatctcatgttgcttgaaggagatgtctgaagaaaaacaggaagatatggattgggaagatgattctttagctgcagtagaagttcttgttgctggtgtccgaatgatctacccagcatgctttgttctagtccctcagtcagacattcctactcctagccctgtgggatccactcactgttcatcttcttgcttgggtgtccaccaagtgcctgcttccacaagagatcctgctatgtcttcggttacgcttacaccacctacgtctcctgaggaagtccaaacagttgatcctcagtctgtccagaagtgggtcaaattttcttcagtatctgatggcttcaactccgatagtactagccaccatggtgggaaaatacccagaaaattagcaaatcatgtggtggatagagtttggcaagaatgcaatatgaacagagcacagaacaagaggaagtattctgcttcatcaggtggtctatgcgaagaagcgacagctgctaaagtggcatcctgggattttgttgaagccacacaaagaacaaattgcagttgtttgaggcacaaaaatctcaagtcaagaaatgctggacaacaaggacaggcaccatctttaggtcagcaacaacaaatacttcctaagcacaagaccaatgagaagcaagaaaagagtgaaaagccacagaaacgccccttgactccttttcaccatcgtgtgtctgttagtgatgatgttggcatggacgcagattcagccagccaaagacttgtgatctctgctccagacagtcaagtgagattttcaaatatccgaactaatgatgtagcaaagactcctcagatgcatggcaccgaaatggcaaattcacctcaaccacccccacttagtcctcacccttgtgatgtggttgatgaaggagtgactaaaacaccttcaactcctcagagtcaacatttttatcaaatgccaacaccagatcccttggttccttctaaaccaatggaagataggatagacagtttgtcccagtctttcccacctcaatatcaggaagctgtagaacctacagtatatgttggtacagcagtaaacttggaagaagatgaagccaatatagcctggaagtattacaagttcccaaagaaaaaagatgtagagtttttaccacctcaacttccaagtgataaattcaaggatgatccagttggaccttttggacaggaaagtgtaacatcagttacagagttaatggtgcaatgtaagaaacctttaaaagtttctgatgaattagtgcagcaatatcaaattaaaaaccagtgtctttcagcaatagcatctgatgcagaacaagaacctaaaattgatccatatgcatttgttgaaggagatgaggaattcctttttcctgataaaaaagatagacaaaatagtgagagagaagctggaaaaaaacacaaggtagaagatgggacatctagtgtaacagtgttatcacatgaagaagatgctatgtcattatttagtccctctatcaagcaagatgctccacgccctactagtcatgcccgtcctccatcaacaagtttgatttatgactcagacctggctgtctcttatactgaccttgataatctcttcaattctgatgaagatgaactaacacctggatctaaaagatcagcaaatggatcagatgataaagccagctgcaaggaatcaaagacaggaaatctggacccgttatcttgcataagcactgcagatcttcataaaatgtatcctacaccaccatcattggaacaacatattatgggattttccccaatgaatatgaataataaagaatatggtagtatggatacaacacctggaggaactgttctagaaggaaatagttctagtataggagcgcagttcaaaattgaggttgatgagggattctgtagccccaaaccttctgaaattaaagatttttcttatgtctataagcctgaaaattgtcaaattctagtgggatgttccatgtttgcacctctaaaaactctaccaagccaatatctgccccttatcaaattgccagaagagtgtatttaccgtcagagttggactgttggaaaattggaattgctttcttcagggccttcaatgccattcatcaaagagggtgatggaagtaatatggatcaagaatatggcactgcttatacacctcaaactcatacttcttgtgggatgcctcctagcagtgcacctcctagtaacagcggagcaggaattcttccttctccatccacccctcggtttccaactccaaggactccaaggactcctcggactcctcgtggagctggtggacctgctagtgctcaaggttcagtcaaatatgaaaattcagacttgtattcaccagcttctaccccatctacatgcagaccccttaattctgttgaacctgcaactgtcccttccatccctgaagcacacagtctttatgtaaacctcatcctttcagaatcagttatgaatttgtttaaagactgtaactctgatagttgttgcatctgtgtttgcaacatgaacatcaagggtgccgatgttggagtttacattccagatccaacgcaggaagcacaatataggtgtacctgtggcttcagtgctgtcatgaacagaaaatttggaaacaattcaggattatttcttgaagatgaactagatatcataggacgcaatacagactgtggcaaagaagcagaaaaacgttttgaagctctcagggctacctctgctgaacatgttaatggaggactaaaggaatctgaaaaattatctgatgatttgatattattgctacaagatcagtgcactaatttattttcaccctttggagcagcagaccaagatccttttcctaaaagtggtgtaattagcaattgggtacgtgttgaagagcgtgactgttgcaatgactgctaccttgcattagaacatgggcgtcagttcatggataacatgtcaggaggaaaagttgatgaagcacttgtgaaaagttcatgcttacacccctggtccaaaagaaacgatgtgagtatgcagtgctcacaggatatacttcgaatgctcctctctcttcagccagttcttcaggatgccattcagaaaaaaagaacagtaagaccttggggtgttcagggtcctctcacttggcaacaatttcataaaatggctggccgaggctcttatggaactgatgaatccccagaaccactgccaatccccacatttttgttgggttatgattatgattatctggtgctttctccatttgctcttccttattgggagagacttatgctggaaccctatggatctcaaagagatatagcctatgttgtactgtgtccagaaaatgaagccttgttaaatggagcaaaaagcttttttagagatcttactgcaatatatgagtcctgtcgattaggtcaacatagacctgtttctcgactgttaacagatgggatcatgagagttggatctactgcatcaaagaaactatcagaaaagttggtagcagaatggttttctcaggcagctgatggtaacaatgaagcattttctaaactcaagctttatgcacaagtctgcagatatgacctaggtccttatcttgcttccctgccattggacagctctctactttcccagccaaatttagttgcccctacaagtcagtctttgattactccacctcagatgacaaatactggaaatgctaatactccatctgccaccttagcatctgcagcgagcagcactatgacagtgacttcaggtgttgccatatctacttcagttgccacagctaattcaactttgaccacagcttcaacttcatcttcatcatcctccaacttgaatagtggagtatcatcaaataaactaccttcgtttccaccctttggcagtatgaacagtaatgctgcaggatccatgtctacacaagcaaatacagttcagagtggtcagctaggagggcaacagacatcagctctacagacagctgggatttctggagaatcatcttcacttcccactcagccgcatcctgatgtgtctgaaagcacgatggatcgggataaagtgggaatccccacagatggtgattcacatgcagtcacgtatccacctgcaattgttgtttatataattgatccttttacatacgaaaatacagacgagagcactaactcttctagtgtgtggacattggggctacttcgatgctttctagaaatggtccagactcttcctcctcatatcaagagtactgtttctgtacagattattccttgtcagtacctgttgcaacctgtgaagcatgaagatagagaaatctatccccagcatttaaaatccctggctttttcggcctttacccagtgtcggaggccacttccaacatcaaccaatgtgaaaacattgactggctttggtccaggtttagccatggaaactgcccttagaagtcctgatagaccagagtgtattcgactttatgcacctccttttattctggctccagtgaaggacaaacagacagagctaggagaaacatttggagaagctggacagaaatataatgttctttttgtgggatactgtttatcacatgatcaaaggtggattcttgcatcttgcacagatctatatggagaacttttagaaacttgtatcattaacatcgatgttccaaatagggctcgtcggaaaaaaagttctgctagaaaatttggtctacagaaactttgggagtggtgcttaggacttgtacaaatgagttcattgccatggagagttgtaattggtcgtctaggaaggattggtcatggagaattgaaagattggagctgtttgctgagtcgtcgaaacttgcagtctctaagtaaaaggctcaaagacatgtgtagaatgtgtggtatatctgctgcagactcccctagcattctcagtgcttgcttggtggcaatggagccgcaaggctcttttgttattatgccagattctgtgtcaactggttctgtatttggaagaagcacgactctaaatatgcagacatctcagctaaataccccacaggatacatcatgtactcatatacttgtgtttcctacttctgcttctgtgcaagtagcttcagctacttataccactgaaaatttggatttagctttcaatcccaacaatgatggagcagatggaatgggtatctttgatttgttagacacaggagatgatcttgaccctgatatcattaatatccttcctgcttctccaactggttctcctgtacattctccaggatctcattacccccatggaggtgatgcgggcaagggtcagagtactgatcggctactatcaacagaacctcatgaggaagtacctaatattcttcagcaaccattggcccttggttactttgtatcaactgccaaagcaggtccattacctgactggttctggtcagcatgtcctcaagcacaatatcagtgtcccctttttcttaaggcctctttgcacctccacgtgccttcagtgcaatctgacgagctgcttcacagtaaacactcccacccacttgactcaaatcagacttcagatgtcctcaggtttgttttggaacagtacaatgcactctcctggctaacctgtgaccctgcaacccaggacagacgctcatgtctcccaattcattttgtggtgctgaatcagttatataactttattatgaatatgctgtgatcttcatttgatggaactgtgcaagaaaagaacaaggaaaaatggatgtttcgctgcaggattaagttacaattatcttctcagtgaaggtcatttgtgatggggtctaattcttattacttcaacaaatattgttttgacttggggggaggggctataaccctgctatttttcattgactctattgaactctttaggatgatgactgatcatacaaaacgtattataacattttcgtagcaaaattaaccttttttttttccagtcacagtatttgtgaaaagtaatgagccatagtacccagtcatgttaaatgaatattaaaagcatggagaggaaacatgaggaacaatgaatttcaacatatggcttcagaacatgaagatgttcttgtatggattatagtatctagtattcaaaaatgcctgcatctcttctcttatttataatgtggantaangnttntgtatagagatgtggctatntanagattgtgcgctcttataaattagtctctctgtataaaagcgccgttcgtatgtatatttaaaaaaaatttttccataggaaaggtttatactgccttcttgctttaaagcaattggtctaaaatatatgtaatcgtcttaattaaaaagttgcagtagggttgcttttagagtattatttttttgtaagggggtgggtgggacagtaaatttgtattgtctcgatgtacagtttaacggggatagagggggaataatgtccataccattgtgtgtggaggatttacagctaagctgtagttgcagagtacatgtacagtaatgaagttcactgtgtttataaattgaaaaggtaccaggtcttacagcattttatatatcacatctttacagaataacatgatggcaatatacaagtggtattgttaggtggtttaacttagaataaaatgagaattcttcagttatattttgtactatggtttagggctatgactaatatttcaggccatttccggtgaaagaaacttagttttacaagaaaaaccatttgctactgaatgcttaaactaattttagtgtttaatgttacatgcttaaatttttttcagttttaacagtggcatatttaggcatggaaatattattatgaaatttattttcaggatctgctataaggttgaaatttagcccagctctaggcattttacaaattatttttcaagcagtcattcttgattgtttgacttttttttttaaattaaagattgggaatgtatgtgagagtatgcatatgtatgggtgtgtgtgtgtgcgcgcaatcaaactgtggtgtaaatagattctcagtgaattctgggtattcagactctattccactagtgaaagaaccattttttaaacttcccttgccttttttatttatttaattttcttggtttggagatgtcagtcccaaacaccagagtctgtacttttctataacacagctcagattaaggtagggcatatgccaaggaggttctcacctccctaaagaagggacttgaattttagggactttaattcacccctccttcaatacaactttcccccttcttgtttgcacatgccaagataactgcttttatgcaggctgtacccccttgaaaaatcctttctacagtgctgctcacaaaagagcccaagttcgcctcctacctgcattgctgacttgaattcacagtcgccgagtctacctagctttcttggaagcagtctagcaaaatttctatttgtacgttcactaattatctacaaggacaaaatcagttgtatttacaaaactctacttcagtgtttgttttagtttttttttttactgaaacttgtttttgtgaatactctgtgcttagaattaaatatcactttcttatgaacaacataacttcttcagattgtgtatatgaaaacattagcaagtcttgttttttctatgaagcaaacacaattggtgacaaaggttgtcaatcatttcttcaaaattataatgcagttctaatggtcagcatattttgatattaaatttaaagatcacctctctgcatttgtttttaaattatgctaatacaccacacattatgttggtatgttttgttctgtactttctttaaaaaaaaaaaaaaaacttgtctgagatttgaaggaaaatgtgcttatttggaatttccataaaaagagtatcctttttatacacttaatagtgactttacaaaataaaagttatattctcagttgtttaaaatcactaacctatgataaccacacctcaatttgaaagtagatttaaaattattccctgacaggttatttaatatggagccataaggagggaacccagtacacaattattttttatttgggaatcagggaatagttcccaaatatacaggatttattgataagattttttttcttcccttcatatatccattcaaactcaatggaaagttattaaataaccattagaaaagctcagtagacttatttgagaaattaagccttgtgcaggatgatggatttgacttactaatgtactgtcacagacaaatatgggtagttttgtttaaataggtaagcaaaatattatactttatagcagtggattaccaacaccttgacttctttgttacagtgctaacatcttttttttgtgcaggtatccatgattattaagcagggtggaagttcagtattttgtcatttaaaaagattagttatataatgtctgcttccagccagtgagaaacatctagccatacctttcttatgcaagccattgagttatcaggactgtgaattaacactgtatgaataaatttctgtacaccttattgtttggccagaaggccaccaagtgtacttatatgtaatccttaaattttaaagtagctgtaatttttaaatatttctaaacttttcttaaaccactaaaattaagctcttactacttagtcaactatcctcagctgtattcgtactcaattgtcagtatggcacagattactgtattaaaatattctcctttcgtcttcatatttaccttctgaggtaattttttaacttaatgtgttactacaaagatttgcagatctttaatcaagcactatgttaatactgtaatatcagaatactatgttgcattatttaaaatgttcaaattgaatagattaaaaagtttttaaatgctattgcatcatataatttgctattcatccactatggcattgcatatcaatcagttaatacacttaatgttgcatgagtgatattttggtctgggtttcctcttaagattttagtttgtctgaattaaggaaaaatgtttttaatatacattcttattttgtcccacccctccagaaataagctggaaatcttaactttttggggggtcttttttggtgttttaatgggcccagaactgtggtttaaatttttatgtatgtattttcttttttgtggagtataaatttaaaaactggatttgggacctaaaatactcctcaggttgatgtattcatgaagttttaaaacatctttagttttcaaagtaaactggatatgtggaccttaaagttattgagtttaagctacaaattgtaacgtcattactggacatgtcagcatcaaccctctcaaaatagcttggtcactttatgaaggggcgttttaaagttgttgtttagcagtgacatttaatatggtccaattgcttttctttttaacgtgacaaaaagagaataaggaacaaacactattgctgccgaatgccataacactgagttgtacaaattgtgattgaggaaatgaaaaggtttatacttttta

SEQ ID NO: 24998 - DNA, 6982 bp, Homo sapiens
gtttctctctctggtcggaagcggcggtaatggcggatggtgggttgtggcgccggcggcggctgctgtgagggacgatgagtgcctccttcgtgccgaacggggccagcctggaagattgtcactgtaacctcttctgcctggctgacttgacaggaattaagtggaaaaaatatgtatggcaaggcccaacttctgcccctattctgtttcctgtgacagaagaagaccccattttgagcagttttagtcgctgccttaaggcagatgtacttggtgtttggcggcgagatcaaagacctggaagaagagaattgtggatattttggtggggtgaagaccccagttttgctgaccttattcaccatgacttatcagaagaagaagatggagtgtgggagaatggactttcctatgaatgccgtactctgcttttcaaagcagttcacaatctattggaacggtgtttaatgaacaggaattttgtacgtattggcaagtggtttgtaaagccttatgaaaaagatgaaaaacctataaataaaagtgaacacttgtcctgctccttcacctttttcttgcatggagacagcaatgtttgtaccagtgtggaaattaaccaacatcaacctgtataccttctcagtgaagagcatatcacccttgctcaacagtctaatagcccatttcaagttatcttatgcccatttggactaaatggcactctcacaggacaggcattcaagatgtctgattcagctacaaaaaaattaattggtgaatggaaacagttctatcctatctcatgttgcttgaaggagatgtctgaagaaaaacaggaagatatggattgggaagatgattctttagctgcagtagaagttcttgttgctggtgtccgaatgatctacccagcatgctttgttctagtccctcagtcagacattcctactcctagccctgtgggatccactcactgttcatcttcttgcttgggtgtccaccaagtgcctgcttccacaagagatcctgctatgtcttcggttacgcttacaccacctacgtctcctgaggaagtccaaacagttgatcctcagtctgtccagaagtgggtcaaattttcttcagtatctgatggcttcaactccgatagtactagccaccatggtgggaaaatacccagaaaattagcaaatcatgtggtggatagagtttggcaagaatgcaatatgaacagagcacagaacaagaggaagtattctgcttcatcaggtggtctatgcgaagaagcgacagctgctaaagtggcatcctgggattttgttgaagccacacaaagaacaaattgcagttgtttgaggcacaaaaatctcaagtcaagaaatgctggacaacaaggacaggcaccatctttaggtcagcaacaacaaatacttcctaagcacaagaccaatgagaagcaagaaaagagtgaaaagccacagaaacgccccttgactccttttcaccatcgtgtgtctgttagtgatgatgttggcatggacgcagattcagccagccaaagacttgtgatctctgctccagacagtcaagtgagattttcaaatatccgaactaatgatgtagcaaagactcctcagatgcatggcaccgaaatggcaaattcacctcaaccacccccacttagtcctcacccttgtgatgtggttgatgaaggagtgactaaaacaccttcaactcctcagagtcaacatttttatcaaatgccaacaccagatcccttggttccttctaaaccaatggaagataggatagacagtttgtcccagtctttcccacctcaatatcaggaagctgtagaacctacagtatatgttggtacagcagtaaacttggaagaagatgaagccaatatagcctggaagtattacaagttcccaaagaaaaaagatgtagagtttttaccacctcaacttccaagtgataaattcaaggatgatccagttggaccttttggacaggaaagtgtaacatcagttacagagttaatggtgcaatgtaagaaacctttaaaagtttctgatgaattagtgcagcaatatcaaattaaaaaccagtgtctttcagcaatagcatctgatgcagaacaagaacctaaaattgatccatatgcatttgttgaaggagatgaggaattcctttttcctgataaaaaagatagacaaaatagtgagagagaagctggaaaaaaacacaaggtagaagatgggacatctagtgtaacagtgttatcacatgaagaagatgctatgtcattatttagtccctctatcaagcaagatgctccacgccctactagtcatgcccgtcctccatcaacaagtttgatttatgactcagacctggctgtctcttatactgaccttgataatctcttcaattctgatgaagatgaactaacacctggatctaaaagatcagcaaatggatcagatgataaagccagctgcaaggaatcaaagacaggaaatctggacccgttatcttgcataagcactgcagatcttcataaaatgtatcctacaccaccatcattggaacaacatattatgggattttccccaatgaatatgaataataaagaatatggtagtatggatacaacacctggaggaactgttctagaaggaaatagttctagtataggagcgcagttcaaaattgaggttgatgagggattctgtagccccaaaccttctgaaattaaagatttttcttatgtctataagcctgaaaattgtcaaattctagtgggatgttccatgtttgcacctctaaaaactctaccaagccaatatctgccccttatcaaattgccagaagagtgtatttaccgtcagagttggactgttggaaaattggaattgctttcttcagggccttcaatgccattcatcaaagagggtgatggaagtaatatggatcaagaatatggcactgcttatacacctcaaactcatacttcttgtgggatgcctcctagcagtgcacctcctagtaacagcggagcaggaattcttccttctccatccacccctcggtttccaactccaaggactccaaggactcctcggactcctcgtggagctggtggacctgctagtgctcaaggttcagtcaaatatgaaaattcagacttgtattcaccagcttctaccccatctacatgcagaccccttaattctgttgaacctgcaactgtcccttccatccctgaagcacacagtctttatgtaaacctcatcctttcagaatcagttatgaatttgtttaaagactgtaactctgatagttgttgcatctgtgtttgcaacatgaacatcaagggtgccgatgttggagtttacattccagatccaacgcaggaagcacaatataggtgtacctgtggcttcagtgctgtcatgaacagaaaatttggaaacaattcaggattatttcttgaagatgaactagatatcataggacgcaatacagactgtggcaaagaagcagaaaaacgttttgaagctctcagggctacctctgctgaacatgttaatggaggactaaaggaatctgaaaaattatctgatgatttgatattattgctacaagatcagtgcactaatttattttcaccctttggagcagcagaccaagatccttttcctaaaagtggtgtaattagcaattgggtacgtgttgaagagcgtgactgttgcaatgactgctaccttgcattagaacatgggcgtcagttcatggataacatgtcaggaggaaaagttgatgaagcacttgtgaaaagttcatgcttacacccctggtccaaaagaaacgatgtgagtatgcagtgctcacaggatatacttcgaatgctcctctctcttcagccagttcttcaggatgccattcagaaaaaaagaacagtaagaccttggggtgttcagggtcctctcacttggcaacaatttcataaaatggctggccgaggctcttatggaactgatgaatccccagaaccactgccaatccccacatttttgttgggttatgattatgattatctggtgctttctccatttgctcttccttattgggagagacttatgctggaaccctatggatctcaaagagatatagcctatgttgtactgtgtccagaaaatgaagccttgttaaatggagcaaaaagcttttttagagatcttactgcaatatatgagtcctgtcgattaggtcaacatagacctgtttctcgactgttaacagatgggatcatgagagttggatctactgcatcaaagaaactatcagaaaagttggtagcagaatggttttctcaggcagctgatggtaacaatgaagcattttctaaactcaagctttatgcacaagtctgcagatatgacctaggtccttatcttgcttccctgccattggacagctctctactttcccagccaaatttagttgcccctacaagtcagtctttgattactccacctcagatgacaaatactggaaatgctaatactccatctgccaccttagcatctgcagcgagcagcactatgacagtgacttcaggtgttgccatatctacttcagttgccacagctaattcaactttgaccacagcttcaacttcatcttcatcatcctccaacttgaatagtggagtatcatcaaataaactaccttcgtttccaccctttggcagtatgaacagtaatgctgcaggatccatgtctacacaagcaaatacagttcagagtggtcagctaggagggcaacagacatcagctctacagacagctgggatttctggagaatcatcttcacttcccactcagccgcatcctgatgtgtctgaaagcacgatggatcgggataaagtgggaatccccacagatggtgattcacatgcagtcacgtatccacctgcaattgttgtttatataattgatccttttacatacgaaaatacagacgagagcactaactcttctagtgtgtggacattggggctacttcgatgctttctagaaatggtccagactcttcctcctcatatcaagagtactgtttctgtacagattattccttgtcagtacctgttgcaacctgtgaagcatgaagatagagaaatctatccccagcatttaaaatccctggctttttcggcctttacccagtgtcggaggccacttccaacatcaaccaatgtgaaaacattgactggctttggtccaggtttagccatggaaactgcccttagaagtcctgatagaccagagtgtattcgactttatgcacctccttttattctggctccagtgaaggacaaacagacagagctaggagaaacatttggagaagctggacagaaatataatgttctttttgtgggatactgtttatcacatgatcaaaggtggattcttgcatcttgcacagatctatatggagaacttttagaaacttgtatcattaacatcgatgttccaaataggtatttgtatttccctaaatatatcatatcattccatttgtaacattttgtttcatttttaatgaatagaaaaccagtttgaaggttttatatatattaaaatattaagatgtggggttgtgggtgctttttacttttttctttagtgaatgtttatattgtataactaacataattaaaaataattttgattaatctattatatgaacaaaaaaaaaaaaaaaaaaaaaaaagagtgtgtgtgggtgtgtgctcttccagagaatttgtgtgtggcccatttgagaaaattcttgtgtggcgggaaagaatatctatccgcgcgcccaaggtttttttacacaaaggggggatatatatacctaaaatagggggcttcacaacacggtggtgagacgcccctaaaagtctgaggaggtttaatccaccttataatataaacaccttttgtcaaaagcgccctatgtgagttgtaaacagactctgttgtgaacaaacctgtgttgtttttctccccgagcgggcatcttaacggtgtgaaaccggcggcgctgtggtacaacacaggggaggaaaaaaaacaccgctgcgggaagagacgagcgccgacaaaaattttgccgcgggcagaaaaacacatgtgaccatgtctatagagagagtccttctaaaaaacaaaacgtcgaggcgaggcgataatctctgtgggggccccagacaaacagcgttgtggggagtggcggaccccccacaactgtggtgcttttggtggtgtaaatcattcccgcgacgaagacacatcttgttgtgggggggagaaggagccgtgcctgtgcaaacaaccagaaggggggggcgagatcaatcccacttgttggggagatcattcgcgaggagaagaattcttctgcgaaaggaaaccacacgatagcgcctcgttgtggtgacaccaccaacatgttttggggtggggaaaaaaaaacaccccgcgcgggtatttcttctcactaactacacgaaaagagcgtgtccacaagaaacacagttctagtaaacccgccgtgggggcgacaaacactatagggtggtggggcccccacccaagccagggggctgagcgccaccacacacacgcaggactaatcaacgaccgcggcggggagaagaaacaacctagctggagagggcgccagaaaacaagacggggggccactcacacctctgagttaggagcaaccccccccccgagaggaggagagagcgcctcagagaagaggtacgtagtgcaacaagggaggaagacgcacggctgacgaagattgggtggcgcgcaccccacaagtggtgtgcgctgcaccatttattacaagcaggatggtggggggggagaccacacacccgacgacgtagtcgagaacagaaacc

SEQ ID NO: 24999 - DNA, 6116 bp, Homo sapiens
gtttctctctctggtcggaagcggcggtaatggcggatggtgggttgtggcgccggcggcggctgctgtgagggacgatgagtgcctccttcgtgccgaacggggccagcctggaagattgtcactgtaacctcttctgcctggctgacttgacaggaattaagtggaaaaaatatgtatggcaaggcccaacttctgcccctattctgtttcctgtgacagaagaagaccccattttgagcagttttagtcgctgccttaaggcagatgtacttggtgtttggcggcgagatcaaagacctggaagaagagaattgtggatattttggtggggtgaagaccccagttttgctgaccttattcaccatgacttatcagaagaagaagatggagtgtgggagaatggactttcctatgaatgccgtactctgcttttcaaagcagttcacaatctattggaacggtgtttaatgaacaggaattttgtacgtattggcaagtggtttgtaaagccttatgaaaaagatgaaaaacctataaataaaagtgaacacttgtcctgctccttcacctttttcttgcatggagacagcaatgtttgtaccagtgtggaaattaaccaacatcaacctgtataccttctcagtgaagagcatatcacccttgctcaacagtctaatagcccatttcaagttatcttatgcccatttggactaaatggcactctcacaggacaggcattcaagatgtctgattcagctacaaaaaaattaattggtgaatggaaacagttctatcctatctcatgttgcttgaaggagatgtctgaagaaaaacaggaagatatggattgggaagatgattctttagctgcagtagaagttcttgttgctggtgtccgaatgatctacccagcatgctttgttctagtccctcagtcagacattcctactcctagccctgtgggatccactcactgttcatcttcttgcttgggtgtccaccaagtgcctgcttccacaagagatcctgctatgtcttcggttacgcttacaccacctacgtctcctgaggaagtccaaacagttgatcctcagtctgtccagaagtgggtcaaattttcttcagtatctgatggcttcaactccgatagtactagccaccatggtgggaaaatacccagaaaattagcaaatcatgtggtggatagagtttggcaagaatgcaatatgaacagagcacagaacaagaggaagtattctgcttcatcaggtggtctatgcgaagaagcgacagctgctaaagtggcatcctgggattttgttgaagccacacaaagaacaaattgcagttgtttgaggcacaaaaatctcaagtcaagaaatgctggacaacaaggacaggcaccatctttaggtcagcaacaacaaatacttcctaagcacaagaccaatgagaagcaagaaaagagtgaaaagccacagaaacgccccttgactccttttcaccatcgtgtgtctgttagtgatgatgttggcatggacgcagattcagccagccaaagacttgtgatctctgctccagacagtcaagtgagattttcaaatatccgaactaatgatgtagcaaagactcctcagatgcatggcaccgaaatggcaaattcacctcaaccacccccacttagtcctcacccttgtgatgtggttgatgaaggagtgactaaaacaccttcaactcctcagagtcaacatttttatcaaatgccaacaccagatcccttggttccttctaaaccaatggaagataggatagacagtttgtcccagtctttcccacctcaatatcaggaagctgtagaacctacagtatatgttggtacagcagtaaacttggaagaagatgaagccaatatagcctggaagtattacaagttcccaaagaaaaaagatgtagagtttttaccacctcaacttccaagtgataaattcaaggatgatccagttggaccttttggacaggaaagtgtaacatcagttacagagttaatggtgcaatgtaagaaacctttaaaagtttctgatgaattagtgcagcaatatcaaattaaaaaccagtgtctttcagcaatagcatctgatgcagaacaagaacctaaaattgatccatatgcatttgttgaaggagatgaggaattcctttttcctgataaaaaagatagacaaaatagtgagagagaagctggaaaaaaacacaaggtagaagatgggacatctagtgtaacagtgttatcacatgaagaagatgctatgtcattatttagtccctctatcaagcaagatgctccacgccctactagtcatgcccgtcctccatcaacaagtttgatttatgactcagacctggctgtctcttatactgaccttgataatctcttcaattctgatgaagatgaactaacacctggatctaaaagatcagcaaatggatcagatgataaagccagctgcaaggaatcaaagacaggaaatctggacccgttatcttgcataagcactgcagatcttcataaaatgtatcctacaccaccatcattggaacaacatattatgggattttccccaatgaatatgaataataaagaatatggtagtatggatacaacacctggaggaactgttctagaaggaaatagttctagtataggagcgcagttcaaaattgaggttgatgagggattctgtagccccaaaccttctgaaattaaagatttttcttatgtctataagcctgaaaattgtcaaattctagtgggatgttccatgtttgcacctctaaaaactctaccaagccaatatctgccccttatcaaattgccagaagagtgtatttaccgtcagagttggactgttggaaaattggaattgctttcttcagggccttcaatgccattcatcaaagagggtgatggaagtaatatggatcaagaatatggcactgcttatacacctcaaactcatacttcttgtgggatgcctcctagcagtgcacctcctagtaacagcggagcaggaattcttccttctccatccacccctcggtttccaactccaaggactccaaggactcctcggactcctcgtggagctggtggacctgctagtgctcaaggttcagtcaaatatgaaaattcagacttgtattcaccagcttctaccccatctacatgcagaccccttaattctgttgaacctgcaactgtcccttccatccctgaagcacacagtctttatgtaaacctcatcctttcagaatcagttatgaatttgtttaaagactgtaactctgatagttgttgcatctgtgtttgcaacatgaacatcaagggtgccgatgttggagtttacattccagatccaacgcaggaagcacaatataggtgtacctgtggcttcagtgctgtcatgaacagaaaatttggaaacaattcaggattatttcttgaagatgaactagatatcataggacgcaatacagactgtggcaaagaagcagaaaaacgttttgaagctctcagggctacctctgctgaacatgttaatggaggactaaaggaatctgaaaaattatctgatgatttgatattattgctacaagatcagtgcactaatttattttcaccctttggagcagcagaccaagatccttttcctaaaagtggtgtaattagcaattgggtacgtgttgaagagcgtgactgttgcaatgactgctaccttgcattagaacatgggcgtcagttcatggataacatgtcaggaggaaaagttgatgaagcacttgtgaaaagttcatgcttacacccctggtccaaaagaaacgatgtgagtatgcagtgctcacaggatatacttcgaatgctcctctctcttcagccagttcttcaggatgccattcagaaaaaaagaacagtaagaccttggggtgttcagggtcctctcacttggcaacaatttcataaaatggctggccgaggctcttatggaactgatgaatccccagaaccactgccaatccccacatttttgttgggttatgattatgattatctggtgctttctccatttgctcttccttattgggagagacttatgctggaaccctatggatctcaaagagatatagcctatgttgtactgtgtccagaaaatgaagccttgttaaatggagcaaaaagcttttttagagatcttactgcaatatatgagtcctgtcgattaggtcaacatagacctgtttctcgactgttaacagatgggatcatgagagttggatctactgcatcaaagaaactatcagaaaagttggtagcagaatggttttctcaggcagctgatggtaacaatgaagcattttctaaactcaagctttatgcacaagtctgcagatatgacctaggtccttatcttgcttccctgccattggacagctctctactttcccagccaaatttagttgcccctacaagtcagtctttgattactccacctcagatgacaaatactggaaatgctaatactccatctgccaccttagcatctgcagcgagcagcactatgacagtgacttcaggtgttgccatatctacttcagttgccacagctaattcaactttgaccacagcttcaacttcatcttcatcatcctccaacttgaatagtggagtatcatcaaataaactaccttcgtttccaccctttggcagtatgaacagtaatgctgcaggatccatgtctacacaagcaaatacagttcagagtggtcagctaggagggcaacagacatcagctctacagacagctgggatttctggagaatcatcttcacttcccactcagccgcatcctgatgtgtctgaaagcacgatggatcgggataaagtgggaatccccacagatggtgattcacatgcagtcacgtatccacctgcaattgttgtttatataattgatccttttacatacgaaaatacagacgagagcactaactcttctagtgtgtggacattggggctacttcgatgctttctagaaatggtccagactcttcctcctcatatcaagagtactgtttctgtacagattattccttgtcagtacctgttgcaacctgtgaagcatgaagatagagaaatctatccccagcatttaaaatccctggctttttcggcctttacccagtgtcggaggccacttccaacatcaaccaatgtgaaaacattgactggctttggtccaggtttagccatggaaactgcccttagaagtcctgatagaccagagtgtattcgactttatgcacctccttttattctggctccagtgaaggacaaacagacagagctaggagaaacatttggagaagctggacagaaatataatgttctttttgtgggatactgtttatcacatgatcaaaggtggattcttgcatcttgcacagatctatatggagaacttttagaaacttgtatcattaacatcgatgttccaaatagggctcgtcggaaaaaaagttctgctagaaaatttggtctacagaaactttgggagtggtgcttaggacttgtacaaatgagttcattgccatggagagttgtaattggtcgtctaggaaggattggtcatggagaattgaaagattggagctgtttgctgagtcgtcgaaacttgcagtctctaagtaaaaggctcaaagacatgtgtagaatgtgtggtatatctgctgcagactcccctagcattctcagtgcttgcttggtggcaatggagccgcaaggctcttttgttattatgccagattctgtgtcaactggttctgtatttggaagaagcacgactctaaatatgcagacatctcagctaaataccccacaggatacatcatgtactcatatacttgtgtttcctacttctgcttctgtgcaagtagcttcagctacttataccactgaaaatttggatttagctttcaatcccaacaatggtacgtaatttgttccattttggtagtctgaagaataccccccaaaataaattcatgtccaatacctgaaa

SEQ ID NO: 25000 - DNA, 1429 bp, Homo sapiens
gtttctctctctggtcggaagcggcggtaatggcggatggtgggttgtggcgccggcggcggctgctgtgagggacgatgagtgcctccttcgtgccgaacggggccagcctggaagattgtcactgtaacctcttctgcctggctgacttgacaggaattaagtggaaaaaatatgtatggcaaggcccaacttctgcccctattctgtttcctgtgacagaagaagaccccattttgagcagttttagtcgctgccttaaggcagatgtacttggtgtttggcggcgagatcaaagacctggaagaagagaattgtggatattttggtggggtgaagaccccagttttgctgaccttattcaccatgacttatcagaagaagaagatggagtgtgggagaatggactttcctatgaatgccgtactctgcttttcaaagcagttcacaatctattggaacggtgtttaatgaacaggaattttgtacgtattggcaagtggtttgtaaagccttatgaaaaagatgaaaaacctataaataaaagtgaacacttgtcctgctccttcacctttttcttgcatggagacagcaatgtttgtaccagtgtggaaattaaccaacatcaacctgtataccttctcagtgaagagcatatcacccttgctcaacagtctaatagcccatttcaagttatcttatgcccatttggactaaatggcactctcacaggacaggcattcaagatgtctgattcagctacaaaaaaattaattggtgaatggaaacagttctatcctatctcatgttgcttgaaggagatgtctgaagaaaaacaggaagatatggattgggaagatgattctttagctgcagtagaagttcttgttgctggtgtccgaatgatctacccagcatgctttgttctagtccctcagtcagacattcctactcctagccctgtgggatccactcactgttcatcttcttgcttgggtgtccaccaagtgcctgcttccacaagagatcctgctatgtcttcggttacgcttacaccacctacgtctcctgaggaagtccaaacagttgatcctcagtctgtccagaagtgggtcaaattttcttcagtatctgatggcttcaactccgatagtactagccaccatggtgggaaaatacccagaaaattagcaaatcatgtggtggatagagtttggcaagaatgcaatatgaacagagcacagaacaagaggaagtattctgcttcatcaggtggtctatgcgaagaagcgacagctgctaaagtggcatcctgggattttgttgaagccacacaaagaacaaattgcagttgtttgaggcacaaaactctcaagtcaaaaaatgttgtactgcaaagacaggcttcctcttttagggtccgccgtca

SEQ ID NO: 25001 - DNA, 392 bp, Homo sapiens
ggaattttgccttctattatgcacaggatcccaggttctgttgggttgtcctggggtgatcatcaggtatggaaaaagataaaagagatatgaaagctgggtaagaatcacaacatttacatctaaattgaattttgtgcaagttccattgactaatggcagagagctgtgcttcaaatacagctgtggtctgagcaaacttggctgctctaaatactgaatgccagttcctttgccaattccatgggcaagcattccaggaggcttgagttaaaatgtgcagataaatactcagttctggagttttttggtgccaaagcatacaaaatacttatgttctgctatggaaatactggaagaacagaacttctgtttttaatatctctgaggat

SEQ ID NO: 25002 - DNA, 408 bp, Homo sapiens
ctatggtaagctgtgggctctgtgtttcccattccaacagcatgataaaagatattaattaaaaactgcatttgagaagtaatattgagaaattttaatagttttcttttcctcagggcttctcagcacctttaatttattaatgtaatatagaaaacaccctgtcacatggcaagagtaatgccatcttgaagcagaaccaagatgggtttggctactggatagtagccaatgatgactgatgtttggcgactggattctgtgttcctgcagcaaggtcaagaaacaatgcctatagcatagaaaaatccctcataaaaatgtttatctaacttccccagtggtcacaagttttgcaagacagtctgacacaggactagctgcacatgtttcaccaaaaaaaacaaa

SEQ ID NO: 25003 - DNA, 458 bp, Homo sapiens
ggcttatgatttcttctcgggtttgaaacatgcccccagatgagcaagacggggctgccacattgacggagcagctgcgggacacacccaagaaacctcctggagaacacaggggacattcacggctggaggcttcatctatggccgggggcttcatccatgagctgggggcttcatccatgactgggggcttcatccacgggctgggggcttcatccatgggctgggggcttcatccatgactgggggcttcatccacgggctgggggcttcatccatgactggggacttcatccacgactggagacttcatccataggctgggggcttcatctacagctggagacttcatccacagcaggggcttcatccttggttggtttgcctgatctgtatctgagccacagatacagattattaaacagataataattttattgacttccacttttatcttt

SEQ ID NO: 25004 - DNA, 341 bp, Homo sapiens
agctacttaaaaaatttttttttcatggagatggtgtctcagtatgttgcccaggctggtcttgaatacctggtctcaagcaatcctgccaccccagcctcccagaatgctggaataacaggcatgatatcagcacctggcttcttttttactgattgtttagaaactgtcaaatatgctttattacttactaagattttattttatgatgtatttaaatttttttgtgtttatgtttagccacttctatttattttgagagtttttatattagtttttaatattttttatttgtagttaaagtaatacatttatatgaaaattaagttacagaaatgtaa

SEQ ID NO: 25005 - DNA, 294 bp, Homo sapiens
atcattcattcaacagatgtttactgagcatgtcctttgtgctgagcacaatgtttggtcaaatccttggtaaaggcctggtgcggtggctcacgcctgtaatctcagtactttgggaggccgagaaggatcacctgaggtcaggagttcgagaccagcctggccagcatggcaaaaccctgactctactaaaaatacaaaaattagccaggcgtggtggtgggcacctgtagtcccagctaagtgggaggctgaggcagggagaattgcttgaacctgggaggtggaggttgc

SEQ ID NO: 25006 - DNA, 484 bp, Homo sapiens
tttctcctactttagcagtaaactgaggaggaaccagctacgggcattttgatgtcatttgccagatgctgctgcttagactgctctttggcctaactttgtgatagggatgctacccaattgggtacttgtgagtgcttcatccaaattgacattccgtctgtggccatttacatcctatttaatcaagtatgaagcttattcattcaaccaatatgttctcagttcctatatgcaaagcaaaaggagtcttactgagtgacacaaataaaaacaaaatctagtcttgtgtctctgcattcatggctgagtctctgtcctctagtaggagacagaatgtattcaggtattcactaaattgttgtctctttagaacaccagaggcacatggtggtgttatagagtatttgttgtggggaatgagttccagggtgaaacaaacgggggaaacacgaaattacacttggaaaatcactgggaagtt

SEQ ID NO: 25007 - DNA, 252 bp, Homo sapiens
gtcacagaaaagggacagacatagtgactctaaggttgaggcctgagcaaatggaagaaggcattgtcaccctcccatcattcctcccagtgttcatcagagagccctgaggacagctgagtgtaggcgtgggtgtggctgagtgggacagtgaataatttgttcatctttctatccttagaccctacagagtgggttcatcagaaagacttttgaatgcataaatacttataatttgggataaattaaatg

SEQ ID NO: 25008 - DNA, 278 bp, Homo sapiens
taaaacataactaccaagaataatgagtattgactatacttcattttctctgtattcttaaatattacagcttgaaacaatgctctattaagaatgtgggctgggcgtggtggctcacacctgcagtcccagcattttgggaggccaaggcgggtggatcacttgagcccaggagttcaagaccagcttgggcaccatggtgaaaccctatctctaccaaaaatacaaagattagccaggtatggtggtttgtgcctatagtcctagctgtaagagtt

SEQ ID NO: 25009 - DNA, 754 bp, Homo sapiens
tggaaattgcagtgagccaagatcacaccgctgcactccagcctggtgacagagtgagacttcctctcaaaaaaaaaaaaacaaaaaacaaacaaacaaaaaaaccctcttctatagtaggtgtgttataagtaataaatttattttaaatattagttcgagattatggcttggtaacgtcttgtttgaagtgtgacatttaaaatgaattttcataatttgtgggagtcagtgcctttttaaattcctcagcttacacagtcttcttaaaacactttttgtattgagcttttgagatcatggtttattaaccaacatttatcatttcagaaacagtggggtattgtgtgttgcaataatttttgcccataagttggtgagcatggatttttttgttgatccctcccttctccagatatcatttccatttccattttgctctcatcccctttcttcctaagaagctataaaatggttgaaacatttatttcaggtacaattttttggaaaagatctgcaacttaggtttctattgtataaagtttagaattggttatatgttttcaattttcttttcataaagcctacttcagtaataacttataataaccatattactataagctcgttattttaactcttggctgggcaaggtggctcatgcctgtaatcccagcatttagggaggcagactgaggaggatcactggagcctaggagtttgaggccagcctgggcaacatagggagacccca

SEQ ID NO: 25010 - DNA, 363 bp, Homo sapiens
ggcagatttgagatatgagcccaggctgtctgactctagatcctgtgctctgagatgctaggccagacttcctcctccagatttcctttagcccagcactcttcagccttatcccatggcagcctccctctccacctgcatgctgcctatggatctgcgattccccaaacccatggctttggttcagcctgcctgcctagggttatgaagcttatgtctcctatgaagggtataacaaataggattggtacagacactttcaatgcctctaacagtattgcctccttccaggcttttcataaagaaagggaaaaccccctttgaggatggggaggtggggaccatatcttgtgcttcctggat

SEQ ID NO: 25011 - DNA, 453 bp, Homo sapiens
aaagacacagttgtgcatgtctggcacaacctctggcctgcaactgtgtttagtgataatgatgaactgtgtgtgtgtgactttgaaggattctgtatgtcaagtgaaaaaaaatgatgtctgacctccttacatatgtaaaaaatataccttcagagttcagcagtaagctggaagaagtagatgtcaaagaagttttgaactttgataataatgcttcagttattcattcattgactggtggtaaaatagtcgaaatggttttgaatcagggttatgatagtgatgaagaaggtcaagataacaccacagaaaaggtgcttatagaagaagacatggtgaaaatgtatggtgggcatattgaaggattacggcagcgtgcattaacaacagaatgaaaaaccatgtcagtttttaaaattgaagagagacttctgagctaaaaaccatgtt

SEQ ID NO: 25012 - DNA, 231 bp, Homo sapiens
acagtgttcctggggaatattgtgttgctttgggagctgctgaacatacaggagtttcactgttcttagttctcgaattctctagactctcttgacagcccaattttaaatattgggaatataggtaagacacattcatggttaaaaattcttaagtgaagatgtaggaagaaatttaaagtaatcaatttaggttatgaaaatttagttatggtgaactgtgatgtctgt

SEQ ID NO: 25013 - DNA, 837 bp, Homo sapiens
acttgttagatttttagagacaacttttacaaaacatggaattatctacataccctttctacaaaacagacaaattaaatactcagtagttgaaccaaaaaaagcagttcaaataaaatacttgaaaatgaagaaatcatttgaacagagttaaagttaatcgtaaaataatgtctgtaaaaattattgccaatcaaatataaagttcaaaaatagtgcttgaaaaaggaagaatcatatgaaaagggactactcattttaaaaatgttagatatcaggaaaagccaagaagtgagtatggtaagagtgctgtcaagtgaaaccctgctaatctcactgaacatgtaaaaatctgtagatgcctttattttattcactcacacacatatgtagaaagagaaatatatggtaaacattaaaaaaaccaaattagaatgtaaaattaatactttaaaaaatgggctgtatacttttcttatcaccggagataagaatttattatttttaaaataaagttattttctctgtgactgtttccatgactttgctacttagaagttagagatgccaaagtttatctaagaaaatgtttatggaaatattatttcaataatgaatgtttagaagactgaatttcctgactgggcgcagtggctcatgcctgtaatcccagcactttgagaggctgaagaaggaggatcgcttgagtccgggagttcaagagcatcctgggcaacacagcgagaccctgcagcaaagtaaaaagaaaaaagaattgaaaaaggaagactgaatttcctttgggcaagtcatgtgacattcctgtgcctcagtttc

SEQ ID NO: 25014 - DNA, 409 bp, Homo sapiens
ttttaaatagagacaagatcttggccatgttgcccagactgctcttgaactcctgagaactcctgagctccagctatttgcccacctcagcctcccaaagtgctgggattacaggcttgaaccaccatgcccagccaaaaatgtgttttttaaaaacatgaagagctatgtacaactgaccctggaacaattcaggggttgggactgaggacagcccgcccagtcgaaaagctgaatgtaatttttgactccccataaaattaactggtaatagcctactgttgaccggaagtcttaacaatgacataaagtcaattaacaaatattttgtatgtctattatatactgtattcttacagtaaagtaagctagagaagttattatgagcaagagaaaatacatttacagt

SEQ ID NO: 25015 - DNA, 424 bp, Homo sapiens
gtctctactaaaaatacaaaaaaaaattagccgggcgtggtggcgggtgcctgtagtcccagctactcgggaggctgaggaaggagaatggcatgaacctgggaggcggagcttgcagtgagccgagatcgtgccactgcactccagcctgggcaacagcgtgagactcgtctcaaaaaaaaaaaaaaatccatatttcattccagctttacaagatggggaaatggaggttcagggaagcatgtaagctagattgttgtttaaccagtattgggggttaaaggggtagctgtctggtcgtgtttacaccacttcatgtagacctgttggccctctttccttgccactatccatttctggattcagtcttccccagaacctcaccctttgcctgccctcagctgactgctcattcatttgccaa

SEQ ID NO: 25016 - DNA, 317 bp, Homo sapiens
gttactcaagaaagctttcaaagttcagatattaacactgatgtgcaataccaaattgttagccccacaggacagatggaaacaggaaaagtcagatggttggcactcaaaagcaaaagcaattaagcagttgaaagtgggttggattgtcggtttatttttgttccatttgaacgaatcaagtgagagacatagactcttgcaaggaggaaatcaagtcaaacttgacgcttcctctctctgacagcccaagctggactggttgtctactccccttattcagtttaattgctttatgtgctctgattttcgcagag

SEQ ID NO: 25017 - DNA, 379 bp, Homo sapiens
tgaaattgaggccattttggttgaagttgacagaaaccactatcagggatccccaagactaccccaggcttttctagaaagactctcagctaagatgtgttatggtaaaagcacacaaaacaaaatcagcaaagaaaattagcaagggcagaggcccatggggcgatgtcccgaggacaccaggcttgagcttccagaatcctctcccagcggggtcgtgcaggacgcacttaactccccgcacagtgagccgtgacagcgcgtgtgcagtgtcgtcgccaggaaagcacactagagactcggtgccagggtttttactgggggctgggcacatgggcaccctctgcctgcctcgtgcccagactctggactcccggag

SEQ ID NO: 25018 - DNA, 286 bp, Homo sapiens
  misc_feature (19)..(19): n is a, c, g, or t
aaacagaaggaagcagtanaactttggaggaaagagtgggattataggcgtgagccacaatgcctggccacatttatgtatttttttatattctgtatcagttagcctgtttattcacgtaaaagttttccaccatgtcttattatccatggtccataggtcatctataacacatataataaagtacatcattgctgaaaatgtgtcatcacaccaagagtaggttaactgtgcgttgttgaccaaatgctaactatccagcaggcgactgtctgaaagtaccaat

SEQ ID NO: 25019 - DNA, 547 bp, Homo sapiens
ttgtctgtaagcctaggttaatggctcaaagcccttatgcaaactagaattgtcctatgactatttacttcataatttccctttttaaactgtgtatccattacttttttttcaaaagtacaactcctaacagaataatactagtacagcactttgagatgataacaaaagactacagaacagacaaaatcgaacttaataatgaactccaggtagacttagcctgaaaactactcccttcaaatttcccttgtttctccaaatatgcctaaaaggattttgacactgactcttaggtgccaattaccccctgcctcaatgtgggatgagaacaaaaaccaaaataggtccatcctagcaccaagggccatcaaaaccaaacttaaagatgattgatcagtgatgcttttggaaaaagatctgaagcacaaaagggaaacgtgaaagttgtctgaatcaaaatggagtcactagtaataagaaaactctgacagctcgagctggggaaggacatgaagagagcattctcatgcatgtatgcctgatg

SEQ ID NO: 25020 - DNA, 404 bp, Homo sapiens
aaccttcaaagtgtttgttattttgattagtgtttatacattcagacagattagtgaggcaataaataggagtaaatgctaaaggacagctaatcaagtgagtgagaagcaaatagccacttactatagactacggttataattcaaaagcatgtgaagcattatcattttgatgtagtgtttttagaccaaacgttgtaactagaacaaacaaatagttacacactagcacactggaggatatggtcattaagaaccaaagattttctaataagagacggtaatctttctcagaggccacaggcagttttagtgcccatttattgaaaatgtagtgcaacattttaaaaagtcaagcacaaacattttattgtactgggttcttagggtctgagaacctgaag

SEQ ID NO: 25021 - DNA, 248 bp, Homo sapiens
caaaaataaataaataggatctaattaaattttaaaaattcttcacaacaaaagaaataatcagaagagtaaacagacaacccacagtgtaggagacaatattcacaaatcatcatcttacaaaggactaatatccagaatctacaaggaactcaaatcagcaagaaaaaaacaatctcctccaaaagtgggtaggacatgaatagataattctcaaaagaagatgtacaaacagccaacaaacatat

SEQ ID NO: 25022 - DNA, 553 bp, Homo sapiens
tgaccatacaaaatctaaatctttattgggaaagataagtgacagctttggccagattagtacaggaacatactgctggactgattctcacagacgtatagtattaaaggtgcaccttcaaactgtgagttgagaaaaaaataaaaatatttaaaacatccattataaaagtcctacgcatttaacaaaatcttacgtatttattacaattttacaatctgcctagtattgtgctacagtaccagacaaaatcactttagggttttggggattttgtttttttaaacaaactggtatgtaatataaacttaggaaccaccaccaccatctcgagtatcaatgtttcagaatggaggcatagttcagtgaaaaaaatgccggcattggttttagttttgattcttgtttcaccagaaagcatggtggttgggggagctgtcaaagtactccggatagactcagcgccattaaataagctcaggcatatacggccaggagcaagggaggagaggaaacactgaaacaactcggcagaaagctggcccttgctatt

SEQ ID NO: 25023 - DNA, 358 bp, Homo sapiens
ttcacccaagagtctctttcctggggtcctctgtggtctacaatttccttgggaagtttccatcctgtctttctcatcttgccatcttcaatctgtttctcttctgctgctcccagccctactttcaacaatctaattcacagagtatggaccctcatttcagcacctgcccttggctctgttcaccactttttttaatctcatgcctttcctaccatgttgagcatttttgcctcatctctcctacccctccctagacattggctgggctttttcatcttctactgtgaaagcacctgatctggtcaccaccgtgtggcacctaggcagtagcctctggtttgccctgaaatgtcat

SEQ ID NO: 25024 - DNA, 353 bp, Homo sapiens
ggtaaaaggataaaaataatagcataagtactttgatacttgactcactgtgatgtctgctttggaaatatagactcaaggcacatagatgaaatattttactgggattttaaattttgaaagcaacaagcattatattctttttgtgactatgtagtataatagcactgataactagtgttccacatctcttggcattttgtaactcataaaaaaatatttaaaaatatttgggcctggtgcggtggctcacactgttaatctccgtgctttgggaggccaaggcgggcaaatcacttgaggttaggagtttgataccagcctggccaacatggtggaaccctgcctttact

SEQ ID NO: 25025 - DNA, 946 bp, Homo sapiens
accataatgaaaaggaattgaaccaatgcaaatttatagcataaggatgggaactaattttagaagtcctactttggatagattttcaccttttgtacagttaccacttgaaaattttccttacgtataccagaagagatacactagttattttcttgttatttctatttgcattgtcttgttttataaaaatatttttctgtatatttttctaaaagttgttatttcacagggtttcatctgccccttatgtatgaaaagatgtataactgctattgatttattggagcattaccagaaagtgcacgatgaaaatgaaacaagaggacaggaacttcttaatgactccagtgttactgtgggtcctgtatattttgttttagcagcttggttttgggttgctcaaaatagctggtttttccttgcctcggtgttgcttaactttttatgctacaagggaatatggattgctttaattatgcatgcttaaaggaagtttcaataaggaaaagaggctcttgggaagtctgcgtggtttctcttcctgtttgcagctgtctttttgtgaatttgtaaataaatacagaaatttaagttaatattttgtatcaattttgccatgaaatcaaaatattaagtgaatattattccaacattggtaagttatatttttattattttgttaatgtttcattaatggatgtattaaaatgctttagtataaaatactttgctcttacttagaaaaaggactttgaggctgggcactgtggctcacgcctgtaatcctagcactttgggaggctgaggtgggcagatcacttgaggtcaggagtttgagaccagcctgaccactgaggtcaggagtttgagaccagcctggccaacatggtgaaaccctgtctctactaaaaatacaaaaactagctgggtgtggtggcatgtg

SEQ ID NO: 25026 - DNA, 393 bp, Homo sapiens
tgcctttattagtgcaacatcccagaatgcatgcgtcttacaacccttgtggatatgaaacccagctgggtagacactgcaaagtcttctcatttgattcttccacttggtttctagtgtccctcagggacaaaggaaagccatggtccagtctaagatgaaaaccaattagacctctggcaggcctttgaccaccctgagggccacccccaaggcacggccacactcgcatctgctgccaggaggccctatcttaggctcagctcccaaaccttgaacatcttggaggatccacaaataggaggtacactcagctcaggctcagtcttccttaaaaagcgccttgctaaagctatcaagttcactggaatacttctgcgaaggacacagctt

SEQ ID NO: 25027 - DNA, 428 bp, Homo sapiens
taggcacaaaggttatgagagaaacaaatgaacaattcactggtatggctttcttctttaatgcacacaactcacagcatgaagctgtgcacttcagtacacagggcctctaattcagtgggcctgtgagcgtcacctgggagctcttctaaagcatactttcttgtgtcccaatcctagatatttaatttagtaaaggaggaatgatgcctggaagattaggtaaaatgtcctccaagtgttcacaccaactgaggcctactgctcactctcatccagttgaattacacacattgttatgacggtcaaaatccagttccatattgtctaggtgaagaaggtgaagtcgcggcagcagtgtttctcaagccacagaacatggccacctgtaggtactgatgtaactggggaatcctgggcttgtgtta

SEQ ID NO: 25028 - DNA, 897 bp, Homo sapiens
ggccaggctggtcttgaactcctgacctcagatgatccgcccacctcggcctcccaaactgctgggattacaggcgtgagccaccgcacttggcgaccattatcaatttttaaaaagcctgtttacataccaaataaaatcatcatgttggatgacacactagaagtgtttctttacaattttgaaataatctattttatagactaggtagttttcattagaatttgacattgacctagttgaattcatatgttagcatttcacacataaccatcttggattaatgagatccttgtttctgagctggtgtgtagtcctaccactcagtttatttcagctgtattcatagtttgatgcccgccatcctactttaacttcataatgttctgtttagattattaagtaatcaaagtggtcatattgagaaaactgaatacaattaataggtgtgaccccagtctcataaggggtcattaaaataatgcatgacattatgccttcatttattccattcagtacatttatcaaactactatgtgaagttgtttctcaacccattcagaataagatataaactgtactcacccagaaaatacaaactcaacagtctgtacataatttggccctaacagcctattatctcacctttgctcactacactctggccaagttagtctgttcagtttctcaaacatgccattcttggccttggcttagagcttttacactggttgtttcctttgtttgaaatggtcgccaatccgcggattggcgaccatttcaaccaatttggacatcaggagaactgtcagaatgaggagatcctgaacagtctcacgtatgtccgtcctgggggtggatcccagcccacttcaccttgtccaaaatgtgagggac

SEQ ID NO: 25029 - DNA, 389 bp, Homo sapiens
tcaaacatgccattcttggccttggcttagagcttttacactggttgtttcctttgtttgaaatggtgttttcccagatgttttttagcctggccctttacctttccaatctcagcttaaatatcacctcctgcttcctcaccactcagttaaaaataggtcctccccatcactgttttaatttcttcatgccatttgtgagtccttgaaattatgtgttttttaaaattaatttttatgacagtagggacttcctttgtcttattccttgctgtctacaatgcccgaaacaatactggcaccaaaaggtgttcagtaaaaaaaagtgttgagaggataaagccaggtaccaatttcatctattccccccactttttttttgaaatgga

SEQ ID NO: 25030 - DNA, 703 bp, Homo sapiens
ggacttcaatcttttgaatacatctaccctaacattttcatctctgtacctgcaatatccttgtaggctgcctttcaaggaagtgtatgaagagaaagagaaggcgtgggggagaaaggcagcatgggtgaataaagatgcattctttccagatgctcagttgcactgcctctctttgtgcagtgttcactgaaggatttaaggatgaagcataggaatctgctgtgtgaactaattccctggcttttcctaatggtgtgtaaatttctcattccctaaggcacagtattatttccagagttttctttggttttcataactagtttttctgagttctgtcctcagaatatagtaaatggaagaaatgagatgaatctacaaaaatgctttttaaaacctcctcaaaaaattatttacacataaaataattaaatattttggctcttctgcaacctattggttaaagtacatctttaatgtacaactataactaagttataactaattgtgtccttatatttcaaagacaggtacttgtctgtcttctctcaccccaaaggaatgactacaaagtaaaggaaattggtttaaaacaaaaagcttgagatttcagagaaaggaacatttacataatagcatatctcagcctatttcttgaaatgcattgtttctctgtagctctctttccttttttttttttttt

SEQ ID NO: 25031 - DNA, 427 bp, Homo sapiens
agtaaaggttccatccttctctccatactggagtagagaaatactttgtctatatccctttgctgctgaggcctactggtggctgagatcatttacatggtgaataccttcacagaaagctttctagaaacactattcagggcaccagaatcactccctcccaactgttgatgaatcctgagcacaaaaagacctgccatcacaagtcacaagaattctactagcagagtaaatcatatgggaaaatatatcatatttcactcttaaacaggtaactaaaactcctgaaaacttttagctttatcaacctaaaaaacaggaataaaatgtgaaaaacagccttttaaataaatagggaagcttccaaagggggggaaaatttgtgatggaagaaaggaggtgggagctgttatcagggaggtgagtg

SEQ ID NO: 25032 - DNA, 169 bp, Homo sapiens
gtgcgtggtgcaggcttttcttagcagtgcaccctccttaggcttcacaccacataagtcggcagtcctccaggagtggctatgcctatctcctctgagggcttttgagactaactgttgctgtgcaagatggatgagctgtctgaccaatgatgttctctcctgcctc

SEQ ID NO: 25033 - DNA, 1473 bp, Homo sapiens
ctaattttcaccaccaacatcccctcaataaaaccagcttttaatgtaaatcacatagcatgctgctttagaaaggcttgaaggtagtaattataaactattattaagcatccaaaatgaaggtctccttttgctaatatcattcagattttcttattactacaattattatgaataaattctgtgaagagtgctttaaaataagagagaaatggaagaccaaacttgtacatttaaaatcaggctggaattgaacttgttattgtgtcttaaatccttttttgtgccaaagcaggtatgtatacattaatagtaagatgtacattatttttaaagtacttataacatgtaagattatcaatatgtatagtttttattgagagatcaaagtaggattaaacttcttgttttgaaagcaggcattactttttaagttcaagtattgttgattcttatttacacatatcggataccctctattgctatttcttttagattattgtgataacttgtcagtacattcatctaatgtctctatactcttaataatgtctaggcatttgtcctggtaatacacttggtgaatttatagttcttagattataattacatcttcaaggtggcagtcaacaacataagtttctaaccatcaacatatttggtttgtaagatgatcaatatgcagtttaagaagccatattataattatcttaattaaagtagcaaagttagaaaataccttttacatcttctaaatttaatcctatgaagaataagatctctgtcctgggaatgagcactttgtaattcatagatcttggactgggaacccagttaatgtaaactcttaaaagactgacttgggaagatctttgagggcattgagtgagaacttgcaccagttcagtaacaacccctcctcaacattagaatctatattggttaaaaagtcatttccacaacctagcttgccatatgacaagagagttagaaggttgtgggaaatttattttttaaagcccacatatgttatataataagatattttaagaggtatttcagttcagtgctatttcttttggacatggtggcatatgtaaaagggctatcacagggaacctagaggtgggaatacagatccagcaatgtgaggtagctctcaacggtcatacttcttgctacatctatgtaaacatgtgttttatgtctatttttatgacatatgcagatatcttcatggttaggttatatcgctgtagtcacctttattcaacacttaaatctcaaccacaaagagatgaaataatgttagtataaatttaaattttaaaactcgacatatcttgaaaatcttctggaattaggaagtagtgatgattgcacaactttgtgaatatactaaaatcattacattgcacattttaaaaacatgaattttatggtatgtgaattacatctccaaagaaaaaaaaa

SEQ ID NO: 25034 - DNA, 304 bp, Homo sapiens
acaatggccctgccatcagacaaccccttgaatgtgctcttcttggcccttccataaacctggaacaactgctctccacaacatgcctcggtggctaccttctgaaaatctcggcttgtgttcacactggctccctatccaaacttcttcagacccttttgcagctcctctgatgggagatggaaaatttgaggaaggttatcttggactgaaatgtgtgggattctcaggcaggctagtaattcagcactttcccaacaggtattatctaaatatttggtcaatgctcatctagtgagcgtgt

SEQ ID NO: 25035 - DNA, 457 bp, Homo sapiens
gatgccatctaccacatacaaccatttctttctaatcgtgcatgccgaccccctgaacactcccttcctttggccctgctttctctagtgcctccatctcccagagtcctcacattaaaaaaataggacaggaatggccaagtaaaccttaagccttatctgattaattgtataaatgacccttctacccagaacccactggaaaatctttaaatctgaatttgccactccaaagagaaaaatgatagcatgcatcactgcctgttttagtccgtttaggctactataagaaaataccctaagctgggtaacttataaaaaacagaaactgccgggcgcagtggctcacgcctgtaatcgtaacgctttggaggccaaggcaggcggatcacgaggtcaggagatcgacagcatcctggctaacacggtgaaaccccatctttactaaaaatgcaaa

SEQ ID NO: 25036 - DNA, 286 bp, Homo sapiens
cgttgatactggcctgggaaaattaatttcattgctgaaaaatcctatccaggtgtgtttgtagctttaggttttcaaatactagttatttaagaatctcttttgctttttacttaaagaatgagaagattaggagataatgctatttaatgagttttatttaatggatacttgaatttaatgtccttgactcttatttttttatattttattttatttttgagacagggtcttgctccattgctcaggctagagtgtagtgatgccattatggctcactgcagcc

SEQ ID NO: 25037 - DNA, 454 bp, Homo sapiens
gtggaaattttcctggatataggtatgaggtttatttccttttacaatgttagtgatgggagccatatctttagattcaccaaaaattttattagaaaaccactctgttcgttttttgctcataaatgtgaagctcaagaggatcagagcttcctgattatctgtcctgtgattaatacaggtactccagtcccacagtttattctggggaaggtaaataaacatgtgaatgcaatcatctatcagaagtttctctgtgcccatagccagagctaagaacttttctgctagatacacatattgtacaaagggatagaagggaaatatcggtcattttgtaaaccatgaacagaaagtaattatattagtttgggggaaaattgcattttccatataaagtgatctgttgcctacaagaaacatacctcacctataaagacacacatgtactgaa

SEQ ID NO: 25038 - DNA, 373 bp, Homo sapiens
ggacactctccaatactaataatgttacttaacacagttttaatgttacctttgtaaggaatattaccactcaatttacagtttgtgtttttctaagaaggtaaatgtcattcttggatatgggtccctgtcaatctgtctgaaccttgggctgctgccctggctttacactttgtgaaactccttctcactcagctcactcatcatgctcctagagtcttgggtatggtaatttttgctattgtttccttagtcacactaataacctctgttgtggtgtcctcagtagcactgcacagctctgtttaaacagcccaatatatggaaaattggatgtgcacagccgaccaggcatggatgcttcaaaatcaaa

SEQ ID NO: 25039 - DNA, 432 bp, Homo sapiens
tcccttcttcctcttcttctctgtccatttaatgtctgagtaggttaattcctgtcttgatttgctcactttctcattcactcatttagtgatctactattgccaagcactgtcctgggtttggggaacacggtaacgaacacagtgaagtccctgctctcatggatctcacggggtgaagagaagagaatcaaacacataatgtgtcaaacagataatacaaataaggatagaattacaatctgtgataagggccactaaagagacctacaaggtaatgtgaaagaataaagaggggaacctgctttagatttgaggtgaggaaagttctctttggggaagtaacttttaggctgtaactttctgccttgtgacaggcagagttccaggacggtccccaagattcccagcctctggtatgcagctgctctg

SEQ ID NO: 25040 - DNA, 550 bp, Homo sapiens
tataccctaagttgccaccctcttcccaaaaagtgaaataaaagaactggcaagtgtgaaaaagctagctttaaagttttatggaaaggcatattaacatctagaaattttctcttagtacatagttaagaatatgtgtaaacatttagcttcaaacctagccaccaagcattcttttctagtatcaaaatgatggaaaccacctcactgtgtagcaataggagactgggcaagctgataccaagcaaactctcaaaaagaaattcagttcattgaagggaattcaaagaaataaaatgtagaagtatatcatggaaagatgttcatggtttacaaaagagtatgtggaatacaatctcgtttttacgttaaaacacagaacaataaaagaacttggtgattagaacccagagcattcattggctgtgacccactctgggtagagggatgagattgtagatgatttttttctatttgcttatctaatttttctatgacgaacaaatactacatttaaaattgtttttaagcttttgaaacaaaaagaata

SEQ ID NO: 25041 - DNA, 758 bp, Homo sapiens
  misc_feature (734)..(734): n is a, c, g, or t
  misc_feature (741)..(741): n is a, c, g, or t
taaaactcccgtctctaccaaaaatacaaaaattagccgggtgtggtaacatgctcctgtagtcccagctactagggaggctgagatgggagaatcgcttgaacccgggaggcggaggttgcagtgcgccgagaccacatcattgaactccagcctgggtgacagagtgagactctgtctcaaaaaaaaaaaaaagttgtggtcataaaacttggttcagatgccgtcagcggcatgccttgcctagggtcttgccctccttgtggcctctgcacaccctgcctagtctttccttccctcctgacctttctgaatctgattcatccttttgccccaagcagaatcccaccttctccaggaaggtgttagcctttgtaggacccactctgggacactggtacctgctgcctgtagccgtggcctttccccttccagagggcagggcggtctcagcaccctcttggtccacagctgatcttttttagctgctgaagggtctggggctgtgccctggggaagccatgacgctcccctgcgtagggtcactgggtggctcctgcagccagacttggacaccctccctttgcagatttctgtctcctccccaggaaccagctgccttccttctggggcgaattcattcttatcccacagccccagcataatgggatctggctcaggtaccggctcgaatagcaataggtttgccttccctgtgagcaagcccttactgncctctgncttcccgttgagctgca

SEQ ID NO: 25042 - DNA, 781 bp, Homo sapiens
acatcttgaaagtaaaggtgacttagagaaaagagacattttgacagatacttttaatttgtggttgtctccatcatgaaatagaaacgtgtttggcacttgtgggtggctattttgatttggcatgactacttaattttttaaaaaaattgtggtttgtgaattgcacctttgtccatgtttctgaatctggttttcaaatccagtggagcctttcagtgaaataggtgactattaaaaaagtaatagtattacagaaaaatgagcgattaaatagtaatggatacaattaaggagcaactattttatatgactgttctgtacaaacaaaaagtatgtaatacccattttaaaaaaccatttgaaagtagacaacttattccaaaatagcaaatgcagaatctctgctcagtgagcttggatgagtggcttaacttctctgggcctttgttcctatctgtaaatgagaaagtttgtagatattgccaagatttcccaggctcaatacagtgtaattattttatgttttaaagatatgaaatctgtttactcaaccaattttttaaatgtcatattgtgataatgctctgcttttgcaaattgtgtttgcatgtcattagttatatcaaatagttttgtggcatggggtagtggagcttccctccccacccccatatgtatcagtgaagcctttgaaattacttaaggcagtctttcatggaatgttttgattgagcaatgaaataaacagtcctccattttgtttctgcttgagtggtga

SEQ ID NO: 25043 - DNA, 791 bp, Homo sapiens
aagtaaagaagctgaataaataatttaaattcttcccacagagactatcccggggtcacatttgatgaattcgatcaaatatttaaggaaaaagtaatgttaattatttacaaactcttcttctaaaaaatagaaaaggagggaacactctccaatttattttttcaggtcataagtactgtcctttcaaagtcaggcaaagacatctcaagaaaataaaacaagatgaatatccatcttgaatataaatataaaattattaataaaatatgagcaaaccaaatccagcaataaataagagggattatataccctgagtaagtgggatttgtccaaggaatgcaatgatggtttaacatcagaaaattagttaatggcatgaattatattaatagaataaaggacataaattacataatcacctaagtagagtcagatgaaacatttgacaatattcaacagtcattcatgattaaaaaaaaaaatcaacaaactgggaacagaagaaaactttcttcatctgataaactgcatttatgaaaaacctacagattactcatattaaatgataaaacagaatgcttttctcctaaggaacaaggcaaggatgtccactgtcatcttgtcaccacttttattcattactgtacaggagattctagccagtgcagtcaggcaagaaaacaaaaagacattcggattgtaaaggaagcagtgcaacttcctttattcaccgaagacataatcctatatgtaaaaactcctatggaatgtacaaatatattattata

SEQ ID NO: 25044 - DNA, 373 bp, Homo sapiens
aaatatatatatatatatatactaagcaaatattagttttagtatgattttttcatttcttctttcataactgacagagagtttttaatattttgacaaaacttcttaaaagttgcagaataatcataattcttcccactgagtattaagattgctttgcagtattcacgatagacaagatatggaatcaatctgtaaccatcaacaaatgaataaagacgctgtgatgtatacacaaaatggaatactctacagcagtccattgtgaaagagaaggaattcctgtcatttatcacaacatgggtgaatctataggacacgtaagtgaaataagccaggcacagaaacggaaattctttcaaacgtggaaaaa

SEQ ID NO: 25045 - DNA, 512 bp, Homo sapiens
aacccgagtgtctcctagcacagccactatgtgagcgtcaggcttaccttcctcccaggcttaccttcaaatacctcccaaccatacatctagcatctctagcacagcctctgctggccaggccacctcctgcctgaacatttgtaactggtgccttcctgagctctctgacttcaccctggctgtcacccaatctgttctccacccagtggccataatgaccatctcaaaacccaatctgatcatgctgtcccctggcttaacttcttcaggggcattccagggctgctgggatttggccccaagagctcagcctgtccagcaagcctgcgggacctggggagggcaaggtgggcaccctcagctcctgctgctgctgctgtggtctccccagcatcagacgctgctgggcatcacagaacctgggggctctgcctcaagccaagcagggggtggtttccatgagtcagagccatgggtgatacaggggagagggctcacggaagccaaac

SEQ ID NO: 25046 - DNA, 524 bp, Homo sapiens
gactttgtaatagccatgggctgggctcagtgactcacgcctgtaatcctagcactgggggaggctgaggtgggcggatcacttgaggtcaggagttcgagaccagcctggccaacatggtgaaaccccatctctactaaaaatactaaaattacctgtgcatggtggcaggtgcctgtgatcccagctgctcgggagtctgaggcagtagaatcacttgaacccaggaggtggaggttgcagtgagcggagattgtgccactgcacttggacctggctgacacagcaagactatgtttaaaaaaaaagagagagaaaaaaaaaatagaaggtggaaaaagtatttggtaaactaagaagtaaaccacaacctagtaaagggcatattttaagaattcacaactagaacctggtgccgtggctgtaatcccagcacttggggaagccaaagcaggattacttgaggccagaagtctgagatcagcctaggcaatataaggatactctgtatcttaaaaaaaaaa

SEQ ID NO: 25047 - DNA, 353 bp, Homo sapiens
gcctatatcaaaaaaaagatttcaaataaacaatgtaatgatgtactttaagaaactagaaaagcaagaacaaagccaaaattagaagaagaaaagaaataataaagatcagagtagaactaaacaaaatagagactaaaaaaaaaaatacaaaagatcagagaaatgaaaaactggtgctttgaaaagatcaataaatcgctagctagactaaccaagaaaaaagaagacatacataaaattagacatgaaaaaggagacattacaatttatataacaaatagagaggatcatcagagactatcatgaacaactatatgtgaacaagttgggaaacctagagggaatgtgta

SEQ ID NO: 25048 - DNA, 1041 bp, Homo sapiens
aaagaatacatcttaggacttaagaaatagaatatcataggccagttacattgtaactgtagaactgccagcagccttaccaagaaaatgcattgacaataggagagcataaggttacccctggagagaagcagatatgacaggaagattaatggtacacaagcccagttagtacctgttaggaccagttagtccctgagaatcaaaacatcactgtttactctgtttttgtaatacttcctaatataaagcaagtctgtctttaaactttttttactcaagacactttctgaaagaaaatatttagaatcatctctcttcctgccccttttaaataggatatttgaggattatgactgggtttggtattaaggatcaggaaccctgtagggtggaactgattcaccgaggtggcctgagtcattgggaggccaggtggcaaagccccatgactggggactcaggcttcacctgctgtcccttagcagagggcggcccacaggatacctttccatacaatacatcaccaactggagaccatggtctgtgctctagtcatgtatgctccctctccttgcctggttgatctccttagcaactcatggtcttttactctagcagatggatgcctcatctagagactctggaggagctgattttctgtctgcccacccactaagggccttcaagctaataaagatagaaaacaaggcaggaatttttgtctgttttattcacagtgtatctcaaacacatgaagcagtccctcttcgtattaggcactcagaaatacttgctgaaggtacagttatcaaactgaaatctgagcatttttccttttgatgttccaagttatcttttgggtgattattataaataggtaaaatattgctataagttccctattcacgggtattttataaatttttaaaacttgttcttaatcttcagaagtgtacagaactgttcttcagatctttgtcaaccaaaacatgtattttcaataaattgagattcccagttcaaagttatgtctacaca

SEQ ID NO: 25049 - DNA, 2141 bp, Homo sapiens
agcggggattacaggcacgcaccaccacgcctggctaatttttttgtatttttagtagagacggggtttcaccgtgttagccaggatggtctcaatctcctgaccttgtgatctgcccacttcacctcccaaagtgctgggattacaggccaatgttttcttaatcttagaatgtgaataactgaaaatcatagtctgtggaaaggtgttgaattgagtataatcttcttctgtttatttttgtgttttgttttttaacagatgggtatcttgctatgttgcccaggatggagtgcagtagctattcacaggtatgatcatagcacactgcagcctcaagctcctgggctcaagcgatccccctccctcagcctcccaagtatctggggttactggtgtgcaccaccgtgcttggctccaataattttttttctaattcaaaagttacagtttcactgtgaaaaaggccttgaacacactatttatgacatcttttgaggcagctccagtgccttgacttcaatcccagtttccggttgcagcatccttgttgtcttagcaacacagtgaactattctgaagcatagagtaacacgaaactgggagtccgagaaataatcatctctgcatcacattatgggagacgaagtctgctttatccattttatctttattcagttgtctatgattaattgattacagagtagtagattagaatagtgcatggatatacatttgtgttgaaaaaaggggaagttgatatatatcaatcttagttttcatttatcagtttgatattcatgcatttacactaaacgcttccatttatcccgaaaaagtatatgcaactgtattctgtaggttgatttttggaaaaggggagaagcacactgaattcataaggtcacatgtagtcttaaggtcttacttgcttacagccaattaaatttgaagcaccttatttatacttgttaaaggtaaaacccaaaagaacaagcagaggacattttaaggtcataaaaggtaaataagcttaccttcttaatgttttcattctctttttgtataaatcagaaaatgatctaaactgctgtaacaaagagaccccaaaatatgatggctcatgtaagataatttatttttttctcacatagcaatccagaagtggcttcatttcacaaggtattcaagggatataggagtcatctaccttgttagttctcttaatacccaagggtattgttctttccatggtcaaagctggctcaagacttcctagcctgtgaaaaaagaagaaggtggagcaagccatttcctttttaggaaattacagccatcacttctgcccaccgtccattcatgaatacttactatatagctatacctagcttcaagaaagcctgggacgtgtctctaactagatggacatgtgccctactaaaactccagggaaagggttctattactaaagctaaaaagaggggaatgaatactagagttaaagacaaaaatgatagcagccaatggcccatgccgtgataatctgctgagcaggcatgatggagatcccttgcccagcagaaagtgttccttggtgaaatcatgaatctgctatctaggagaaactcccttgtccattgtcttctgtggccactagtttgacctctaggaaagtcttgctcgtcagcttctgtggccccgtctgaaacttttgagggacatcgcagcttttgcagcccctgcttgctggtgcagacttttagacctagattgccttagagactgaaaaatatacgcttttataggccggggttttagttcatttgactgtaataaagacttcaatgccgtttttaatgtttgactgctgacatctttcaagactcacctttcccttctcccttatgctgcacatctgggcaagctgatggaagcatgggtgcctcctcctttggccccagcaggaagttcaaatcacgcaagccctggcatgcatgcaggaagcttcaccccagcctcacactctaagacggataaaagccaaaccaattaagccgtttctcgaccctcctgggagcctgccctatctccctggaaagtctcagtatgtgagtaataaacctttttatacccatttcttg

SEQ ID NO: 25050 - DNA, 1717 bp, Homo sapiens
agcggggattacaggcacgcaccaccacgcctggctaatttttttgtatttttagtagagacggggtttcaccgtgttagccaggatggtctcaatctcctgaccttgtgatctgcccacttcacctcccaaagtgctgggattacaggccaatgttttcttaatcttagaatgtgaataactgaaaatcatagtctgtggaaaggtgttgaattgagtataatcttcttctgtttatttttgtgttttgttttttaacagatgggtatcttgctatgttgcccaggatggagtgcagtagctattcacaggtatgatcatagcacactgcagcctcaagctcctgggctcaagcgatccccctccctcagcctcccaagtatctggggttactggtgtgcaccaccgtgcttggctccaataattttttttctaattcaaaagttacagtttcactgtgaaaaaggccttgaacacactatttatgacatcttttgaggcagctccagtgccttgacttcaatcccagtttccggttgcagcatccttgttgtcttagcaacacagtgaactattctgaagcatagagtaacacgaaactgggagtccgagaaataatcatctctgcatcacattatgggagacgaagtctgctttatccattttatctttattcagttgtctatgattaattgattacagagtagtagattagaatagtgcatggatatacatttgtgttgaaaaaaggggaagttgatatatatcaatcttagttttcatttatcagtttgatattcatgcatttacactaaacgcttccatttatcccgaaaaagtatatgcaactgtattctgtaggttgatttttggaaaaggggagaagcacactgaattcataaggtcacatgtagtcttaaggtcttacttgcttacagccaattaaatttgaagcaccttatttatacttgttaaaggtaaaacccaaaagaacaagcagaggacattttaaggtcataaaaggtaaataagcttaccttcttaatgttttcattctctttttgtataaatcagaaaatgatctaaactgctgtaacaaagagaccccaaaatatgatggctcatgtaagataatttatttttttctcacatagcaatccagaagtggcttcatttcacaaggtattcaagggatataggagtcatctaccttgttagttctcttaatacccaagggtattgttctttccatggtcaaagctggctcaagacttcctagcctgtgaaaaaagaagaaggtggagcaagccatttcctttttaggaaattacagccatcacttctgcccaccgtccattcatgaatacttactatatagctatacctagcttcaagaaagcctgggacgtgtctctaactagatggacatgtgccctactaaaactccagggaaagggttctattactaaagctaaaaagaggggaatgaatactagagttaaagacaaaaatgatagcagccaatggcccatgccgtgataatctgctgagcaggcatgatggagatcccttgcccagcagaaagtgttccttggtgaaatcatgaatctgctatctaggagaaactcccttgtccattgtcttctgtggccactagtttgacctctaggaaagttctcagtatgtgagtaataaacctttttatacccatttcttg

SEQ ID NO: 25051 - DNA, 443 bp, Homo sapiens
cttcacaatgcctgcaaagacaaactcctatgacagcagaatgtcctgatgtccccatatcacataacaatgtatgcttttatgatggttatagtcaagctttgatgtacttacgcactaaaatgccaaggatagttttctttaaatcagcaacataataaatgtcatgctgtcagtcccccacatgtagacataacttagcttttacatggataagaaacctatataagaaaaccttaggccaggtgtggtggctcatgcctgtaatcccagcactttgggaggccgaggcgggtggatcacttgaggtcagtagtttgagaccagcctggccgacatggcgaaaccccgtctctactaaaaatacaaaaattagcccggcatggtggcacatgcctgtaatcccagctacttgggaggctgaggcaggagaattgcttgaa

SEQ ID NO: 25052 - DNA, 498 bp, Homo sapiens
tattaagtaacagcataccacctcagtcttcaacataccgctcagctcaagagtctgcaccccatcttttacaacctcaatttagtttgttgccttcagcacttgggggatcccagcagactcctcaagcctacagttcaactctctttactagttctactgcttccattgaaagagctcttcttcgagaatgtagtgttattaaacaccatcagcggccttcaggtacccagtcaattcaggcacaactgactggttcacagcactccttacatagttatctatcaaattcaagtgtagttaattttcaggaaacaaccagggcagtcatctttatcctgtagcccaattggagattccactcaggtgaggcaacggaggattacaacagaagacctcccagggtcttcagtgggaacttgctcagtcttactcatctgcgattccatcatcagggtatcctccttctactacaaaaataaaaagctgttctacaga

SEQ ID NO: 25053 - DNA, 577 bp, Homo sapiens
gttcacttagggatacagactttttggtgacagtaactgttactttctgcttattaattcagatacttgcataatgctaacctggtagatattgtcagatgacaagccttcctcctacatgttctctataaaagaactgctagtgacaagcattttattatattaaaaattctacttcatactgttttaagttaaaatgtatttattatgaagccaatattgtgaaatgtttttttctttttccagaatgtggtttttttttcttgtaatggacctaagatgcaggccttattgtgtagaatgaggagctattgccccagatggaccttagtgaaagtaacttaaataagcaagtagattttgcttctgtttgggaaaatgatctaagacggatgctggtattttgggcaggtggagactaatgttttatctcaatgtttgcaacttaagttcagcctacttaagggctgtcccttaagggtgtccaattgtttggcttccctggccacactggaagaattgtgttgggccacatataaaaatacactaacactaacaaatagctgatgagctaaaa

SEQ ID NO: 25054 - DNA, 149 bp, Homo sapiens
agaatataggaggaaaactacaaccaatttaatagatgtgaaagggcatttgacaaaatttgtcacccattcataataagtcagcaaacaagaactaaaagggaatttcctaatctgataaagagtgtctagaaaaacaccacagacat

SEQ ID NO: 25055 - DNA, 837 bp, Homo sapiens
ctaaatctaacccaccaaattagtaacttcccttccccctctgcccatgcaggagtttgtggcttgagtttgtggaagagagactgggagagttttctgtaatacctaatacagtaaccaccctgcctccaccctgccctctactgtgggaaagagaagggaagtctcattctttataatgggagattagtgtaagagtgccccctactttgaaaaagtaaatttcacttatgttcagtgtttttgtaggcccatagaataaatacagtagaagagccctgcagaaatgaaaagccatgctaggaatcaaagtaaatgttggtttaaggaagtaaattgtgtctttatttattttttgagacagggtcgcactctgtcacccaggctgaagtgcagtggtgcgatcactgcagccttgacctcccaggatcaggtgatacccccatctcagattcccgagtggctggcaccacaggcacgcaccaccactcctggctaattttcgtattgttttgtagagatggggttttgccatattcccaggctggtctccaactgtgagggctcaagtgatccgcttgcctcagcctcccaaaatactgggtttacacgcatgagccaccacgccccatcttttaaacttgttaatagaaaaattgatgttggtaaagaaaaagaaccccccaaaaagatagatataggcaataaaaatcacaagtcatctattggcaggaggtgataagagttctgtttgcaaagatatatttaagacacctgcttaaatactagattttttttaaatgaaaatatcagtaaatccaaaacaatagtcttcag

SEQ ID NO: 25056 - DNA, 417 bp, Homo sapiens
gcatgatctcagcttactccaacctccgcctcccgggttcaagcaattcttgtgcctaagcctcccgagtagctgggattacagatgtgcaccaccatgcccagctaatttttgtatttttagaagagttgaggtttcaccatgttggccaagctgatcttgaactcctggcctcaagtgatccgcctgccttggcctcccaaagtgatggaattacgggcatgagtcactgtgcctggcctatttcttaaattattttttctattccctccatcttttgggaaatacaactgtatgtacaataacctgcttgaaattgtcctgtagctcactgatattctggtaattttcttcagtttttcccccgtgcatttcattttggaaagctgctgttgctatgcttttaagttcactaac

SEQ ID NO: 25057 - DNA, 434 bp, Homo sapiens
tccagtgattgatctgttagttaaatccaataattcatatatatgtaattggatttaacatatgtgtgtataacatatatgtataacatatatatacacacacatatatatgtatatatgtgtatatatatatgtatttcttttttgagatggagtctcaccctgtcacccagactgtagtgcagtggcatgatctcagcttactgcagcctctgtctcccgagtttaagcaattctcctgcctcagcctcccgagtagctgggatgacaggtgcccgccaccacacctggccaatttttgtatttttagtagagatggggttttgccatgttggccaggctggtcttgaactcctgacttcaagtgatctgcccacctcggcctcccaaattgttgggattacaggcgtgatccaccacaaccggcccagtaa

SEQ ID NO: 25058 - DNA, 993 bp, Homo sapiens
agattactcaatttaggttggagctgcctatggtaacaaagcatccttttttctttttttactttttttcttttgcggaacaggctatatagaatataaatgcaaacacttgaaaatttcacgtttattcttatttctctctagggaagcaaaaaaagaactgttaacactaattattcttccttgaaataaagatggaaggagggaaggaaaaagggagacagaacagaagaaaggggagaaggattttggtggggaggagggagagagctatttaatgtttttatatgagagaaatggaatgttattcaactggaaacagagaagtgcttccaaaacactgaatttatacagaccaattcctccagatttcaaaaatattaccaacacaggtcagcctgcaaatcaaatacgtgtttttcatttgttccccaattctacccctccagctttccgaagtaacctgcatgtaaatgactgtagatgagccttaagcagctgcttgtctattttcttaacatggcttggccaggagttgtgaacattggcttggaagacctggtttagcagtgaccgtcaaaacacctcacaactttgcactgggcatacactttgctgagtagggcagtaagcaaaattgggctttggctcactgcagaaaaaaagttatcctaaatatctacagtaaaaggaagtggggaggttctgttctcatcaagtaagtgaagttcgctaaaatgtatcatttgctaagcctctcacaatgaaaatagcaactataaatgtgaggatactgaagacattccccgaaagaaacctgtattacttttaatctgctgtagaacttggctttgcatcagtcatcccaacaaattctaagaacttcaaaatgcattaatccttagtgaactggatctgtgtaacatactcattctgagtgttttggcaaagtagccctatgtcactcgcttaattggtggcaggttattttcc

SEQ ID NO: 25059 - DNA, 173 bp, Homo sapiens
tgtgggtcagcatcccacaaaccaagtgtaaattcctcttctctgacacagctggagcctggtgttctgagtcttgcagccctcgggtcacctatggtgtttctgagtagtgtgcaatggacagtaggtgtttatgcacatatattatgtgactgttttataaatttcatggt

SEQ ID NO: 25060 - DNA, 310 bp, Homo sapiens
caccacatagacacacacgtgcacacacacaccacatgcacacacaacatgtgcacacacaccatgcatgcaatgatgggacaggcatgggaaaaccattctggatgatcctgttcaaaaaggtggaaaatggtaccccacaggagtcactggtccatagtattaataattctgagatccaaccaggcatatgtcaccagttccttgttcagggctcagtcctacagcccaggaattgttcaccaagcctctcagctccaccctcttggctctttttgtcctctgaatcttttcttccttttccataaaa

SEQ ID NO: 25061 - DNA, 304 bp, Homo sapiens
cataattaacactcagcatttgttaagggctgaacatgtgcctagagctttatatccagtcctcacagtcatgatcagagtggctggggaagtctccatggaagaggtgctcaggtgtttgaaagttttattgacatcaaatacaaggaaattgtaagcaaaggctttggtttaaatttgcatgtgatcttaccatgtacttcctagcctttttcagtttatataagcataaatccacttacttaccagatgtaataattttattgaatggaaacaacttgatagggtgaacaaaaaaaaaaga

SEQ ID NO: 25062 - DNA, 593 bp, Homo sapiens
gaaagcaattgacttttgtttattaaccttctatcctgcaactttgctatcatcactttttttgagaggggttttggtgtttcttttgaattttctacatagacaatcatgtcatctgcaaacaaagacagttatatttcttccttcccagtctgtataccttgtgttttctttccttgtcttattgcattagctagaacttccaatatgatgttgaaaagtaatgttgagaaggacatctttgtcttgttcctgatgttggccggaaagcttcaagtttccattaaatatgttagctgtaggttttttggagatgttctttatgaaattgtggaagttcctctctaatttaggttttctgagattttttaaaatcagaaatgggtgctggattttgtcaaatgcttttttttttttggcatgtatagatatgatcatgtgatttttcttctttagcttattgatgtgatggattacattaattgatcttcagatgttgaaacagctgtattttattatattttgctataagaataaaaatgccctttcctttcatagctggtaatcacttataaggaaatgatttaattact

SEQ ID NO: 25063 - DNA, 171 bp, Homo sapiens
gaggatcgctaaacttggaaatttgagctctctgtcccctaccagctttgtgcctttcagccagttactgaggttctgagtcaactttctcacctgtaaaatgaggaagatggtcatggtgctgttggtgatggtgattttggatatattggtaatggtggtagtgatggt

SEQ ID NO: 25064 - DNA, 586 bp, Homo sapiens
ccgactaatttaatttctgtatgtttttagtagaggcggggtttcaccatgttggtcaggctggtctcgaactcctgactccaagtgatccatccacctcagcctcccaaagagctggggttacaggtgtgagccaccacgcctggccactattcctgtttcttctacagacttgtttaaagagaaccctacattatgtgtgtttcttccacctcatcattcctctggggcctgggttccgtctccacctgggcactgagaacttggggacagaggttgccagtgacctcccaccgtatctcagtggcatggggttagggacatgggttctggaacagtgagcctcattctttagcggtacataccgaaatgtttgtccttggaatgtctgggatttgctttgacaaaatccacaagtagaaggagtgggtgggggtgaagataaaataagactggccatgaattgatagtttttgaagctggggggtgatggatacatggaggtttgttgtgttttgtctgctttatacttgagagattttctgtttacaaaaagaagagtacatgggttcaaatccagattctg

SEQ ID NO: 25065 - DNA, 503 bp, Homo sapiens
aggtgatccacttgccttggcctcccaaagtgctgggattgcaggcataagccactacccccggctctgtggttggttttgtttaatagctgaaacaggtatcctggtgatgctactatgctgcttagttgtcctgacacattattttttcagtgttaatggtatgtcatatttttactgttaagtacttaatgtatgaataaatgtaagaaaacaattgcctattgttagcatgtagattaagagtcaggaatgatgactcttgttgacatgggtggctgagatagtgacacctttgctttctgatggttcagggtacacaaactttattacaggcacaaaattatcaaaaatacggtataaaattaccttaaggctatgtatataagggatgtgtgtatgtgtgtatacacacaaaaataaattttgtgtttccacttggatcccctccctaagataactcattgtgtacatgcaaatattagaaaatgcaaaaaaaagaa

SEQ ID NO: 25066 - DNA, 191 bp, Homo sapiens
ctgagcatctggaatataacctttggatcttatcctcagcttagatttgttcttcagcagtttttttattctctagaaaaaggctgatatattattggagaaatcaaaatttctgtcataatgtaatataaagaaccaagcatgttttgttgcatgctagaataatttgttaggttttttttttcagctta

SEQ ID NO: 25067 - DNA, 647 bp, Homo sapiens
cttctttctgccatgtgaagaaggcccttactagaactcaaccatggtggcaccctgatcttggacttccaagcctccggaagtgtgagaactaaatgtctgctgtttaaggcacccagctgtatgatactttgttgtgtcagcatgaactaagacaacacgtaagactcaaaaaaacaaaaacaaaaaggactattggagcaacaaaagtttggatatatcctcaaaccatcagacctatagagctacatgtagagtaaacatggattaggtcttgttgataatgcacatctaaaaagagagttttgctacaggtaaaatgataaattatattatttatactaaccactcatttaaattttcagggataatgaggctgtcagaggaattttttttgtctttgtcgtggaaaacaaaagccatggttttaccaaggatgctatttagtaccacaacagacacagacatactaagtcaaaagcctgctgggaactggtatttcttacgattattggtatgagtaagtgaaaatttcagggtaggttaactttggtctcctgtaaagtgtgtttgacactagtaaaatacatttttttaagtatatacatccattttcatttgcaaataattataatcacaagcttgta

SEQ ID NO: 25068 - DNA, 457 bp, Homo sapiens
ctaactactgttatgttacgagttcctcatatgtattcagattgctcccaaataagtgacattgcacatgcattttaaaaaataaatttcagaaactgctacaaaaatgatagaaacattgactaaaaatcagggtaaagagattaaaccaaagagaaaatagtcaatgagtggatattttaggaatacactctagagcatggagactcaagtgtgcaggttgaggagagcacttaggatgtaagctttcgagtcattcattcattcgttcattcagtgaatacctgttgaatgcctgtatgtgtcaggcactgtgctgagctctgggtctgagtctcagctctccccctttctcactgtgtggatgggctaagtgatttcctctcttctcccccagtctcgacctttgcaacctgaggattaatcctgactcacagcgtggttgtgaagattaaat

SEQ ID NO: 25069 - DNA, 321 bp, Homo sapiens
gcctgggcaacagagtgagagacggtctcaaaaaagactagaacggcttttaaaacaaagcattgtagagctatgtgtggtggttcgtgcctgtaatcccaacactttgggaggccaaggccggcagatcactgagatcaggcgttcgagaccagtctggccaacatggtgaaaccccatctcgattaaaaatacaaaaatcagcagggcgtggtggcgggcgcctgttgtctcagctacttgggaggctgaggctggagaattgcttgaacccaggaggtggaggttgtggtgagccgagatcacgccattgcactccag

SEQ ID NO: 25070 - DNA, 465 bp, Homo sapiens
ggagaacctcaggcaggggagtaggctccatcctgcgtggaggaacctgagcagtctaaggcaggctggctctatgatgtgctggcaataaaatcccaatgcttccgctgcagaagtccaagaggacatgactgcggctccatctagtcaagcccagggcaggaattcccttccaggaaaccaagccagagcgctgtggtctctgggctgccaagatgtctcagacaatggtctagcccttcagcccacagaaatctctgggcaaaattatctcccagcattgacagacgaatggataaacaaaatgtgttctatcccacagtggagtattattcagctttaaaaaggaaggaaaaatgctgggcgcggtggctcacaccttgatcccagcacttttgggaggctgaggaaggaggatcatttgtgcccaggagttcgagactagcctggacaacatagagaaac

SEQ ID NO: 25071 - DNA, 389 bp, Homo sapiens
atgtcagcaatagaatctacgtcatggttaagttcaagggaaggtactatgactagacgtgcacataagccagatttatgtttctttccacctaaacatctcagtggagtaaagaataacaaggcagcattgctgcaaatgtgtctcatctcccaccacagggaggtttttctctgatctcagaattgaacaaatgtacaaccgggttttataccgatacattcagttcccaggggcaggcaggagactggccttcctctatctccactgcaagagactttcctcttttactaatctacctcagcacagaccctttatgggtgtcaggccgcgggtcggtcaggtctttctcatcccatgaggccatgtttcaaaacatcacatgggga

SEQ ID NO: 25072 - DNA, 437 bp, Homo sapiens
cccaactctaccgccttatgtgctgtaggccagcgctgtgcagtctaccttagctgttcaatctcatggtcacccccgggactgtgtcaccatcagagggtgaaccatatctggcatgccaggttcacatatcccatttttttcaccaacatctctcttatttctaattcattgcccccaagatgtccgctaccatacatctctgaacttaccgaaattcttctgtccactgaccccgccactttctcgttaaccatcagcctgtttcctagctttcctgctctttttatccaattgagacttctcttattcattattaactctctgatgtaaatacttcccttctcttccagtgtttttctcattatactactctggataaaccgtgctatctgccttcgctggcctacagcacatgccggtaccgagctcgatta

SEQ ID NO: 25073 - DNA, 1193 bp, Homo sapiens
gaatcaaacccaggtttctgtgacactacagcgtactcttcacacctcaccaagctgcccctcacaagagagtaggtgtgatgcctgggctgatgaaatggcagcttaggacgtaaagtgaccatttcaaaggcagcaaaactgcgatttcatctttgacgttaataaaacggcaacaagaagccatctcagtaaatctcgtacaaagaaactctccagaatctaatggcatcaagatcctcgatcaggaatataaccccgattgtcttgtttctatagagaaatcagatttcatttcaggtattttatttcagtttacagttctttctcaaggactgaataacttaccaaatagcagtgtttatactatgaagtacatcagctatctcttgagatattttatttgtatgtagagttaaaattggatttgtagtaatttgaatacattatctgcatttgggagatgctttacggaatgaagtcacaggtattcagaatgtggatggtctatggtgaagaaagcctagtatattctcttgaaattttggtcggatgctacactttttgggtccaggagcccctgaagaagtctttcggtccctatctgcctagccatagttgattccttgtatgaatgtatatatagtcctactgttaaacaaatgaaattaggtaagacagaaggacttatgaaattattaagaataattagtgtataaaggccatatcttgaatcttttcttaccaaatttcttcttgtttggcatgtgcattcttttccttttcctgtttcgaacggagctgaaaataacgtgattgattttgctttaaaggtacatgactgggctgggtgcggtggctcacacctgtaatcccagctctcagggaggcaagaggtgggaggacagcttgagcccaggagttcgagagctgcctgggcaatatagcgagaccccgttctccacaaaaaggaaaaacaaaaacaaaaaaggaacatgactgattgtgtgtgtgtgtgtgtgtgtgtgtgtgtgtgtgttcagcatttcgtttttcagagatgtgtttatctttcaaatggccccagtagtttgggattttggtctccttttcacttaattaggaaaagtgttatttgtggtacaatataagaatttctaatcagagtatttttcaggttagaggaagaaatt

SEQ ID NO: 25074 - DNA, 476 bp, Homo sapiens
tctccagtcaattttctacacagctgccagaataatcttctttaaagacagggctattcatgatactgctcttagttctttttgcctgggagaaaaatgcatgtttcttgaagtttggaatccagggctgtttgtacattttccagcctcatcttctcatgatacactgtgttccatcaactctgaactgttcaccatccccaaacatgctaggccctttcttaactctgaactcttgtgctttcctctgaatactcacttctctccttcttcacatgacaaactactattcttcctttaaaatttagcttaaatatcagcacctaagggaaggttccccatcttctcctaggaataggtcattggtccatcgtttttgctaccagaactctttgtccacaattcagttgaatcactttgccttttctaatatgactatccctttacatgtctttccccactagatcctaaaagtt

SEQ ID NO: 25075 - DNA, 539 bp, Homo sapiens
gtgaaggagccagtgctagtgagccagtgctgggccagccaggtgcccccactttaggaccatccgcagtacagggagaggacaggatgacagggccccagaggtgcgaggggacaggtggctcagcgtgcatctgggaagggagcggcagaatgggccactgcgggcagcagctatcccctgcaccccaagagagcaggaaaagggccaggctgccaggaaggcttccccagccatagatttccctgagacaggcttcccagtgccaagtccctgcagacaggtgcctcgtcaaagaaacgccctgtttggagagggtggccaggacttacctgaggctgaggagggtctggttggtgcagagggcccccatcagtgctgccactcctgcgtcactgatggaattgctctgcaggctgcggaaagaggaggcgccctgggtgtggctgtcccaggacccagagggagctgccctgtcccagtctgggacagcaggcactgggctcaacagggagttgggggctccagggacagtggtg

SEQ ID NO: 25076 - DNA, 430 bp, Homo sapiens
cattttctttatccagtccaccattgatgggcatctaggttgattctatacctttgctattgtgaatagtgctgcgatgaacatacaggtccatgtatcttttttttatagaatgatttattttcatgatttttttttaagtggaaagaaaggttaagtttcagtaggcttgagtgaatgttaaagcatcaacttgtgtattcactgggacagtccctcaattatgactgtacaagttgctgatgtcccatgagcaaaattacctctgtgtccagggactttcctcctgattgcagctgaagctataaatattctcacctctacccctgcatcattgctggcccacccctgctccttttcccttcgtctttctgtcactgctggaaagcccctgcctttgctcagacttctggatgccttccaactcatt

SEQ ID NO: 25077 - DNA, 928 bp, Homo sapiens
tacttttttcctcttactgcattttgggggatttatcattctatgtctaccttttcttgagtacagctttgatatgcacctgttgttacgtggtgatgggaagtcacgggcgtgctctttctggttaatttgatgccacatcttccttgtcttttcagcttgggaaaaaggcggcagtggaggaaggcatggaatgcccacagtggtcagttcaaagaacaaacgtgcaattaaaaaactgtagtcagccaggcacggtggttcacacctgtaatcccagcactttgaaaggccaaggcgggcagattgcttgagctaaggagttcgagaccagcctgagcaacatgatgaaaccccgtctctacaaaaagtacaaaaattagccaggcgtggtggtatgccctggtagtcccagctgctcgggaggctgaggcaggaggatcacctgattctaagaattcgagactgcagtgagccgtgatcttgccactgtagtccaggctgggctacggagagaccctgcctccaaaaaaaaaaaaaaaaaggaaaaaaggggggggggtaaaaattttcccgagtggggggccaagtttggtttacccggttttttgtgtaccagggggtccctaagaggagcggattttaaagcaaggccgggccgccgttacacccgtcggggctgggaaaacctggctcgctgggaccttgggaagggaccctacttctgggcggtgcccttattggcaacctccaatggggtttagggctaaggcacaataaactctacggtattcgcggtaacaccggaatctgcgtggaagttgtcggattgttagaattacggcgccgtacacactctcccaccacacaacaaacacacgccgacacgcattatacacaactactacccgaccaacaccgcactcgt

SEQ ID NO: 25078 - DNA, 2080 bp, Homo sapiens
ctcagctccgcaccgcaactgaagatctgccgccgcggaacagttgcgtctccatctggctaccaacccacccaagctttcttctccaccaccaccaccttccttccttccccctcctccccctcctttccgtcttccctctccacccccgcccccaatctcctcctttttttctcactacgagcggttgctgatgctgaagccgagcgtcacttcggctcccacggcagacatggcgacattgacagtggtccagccgctcaccctggacagagatgttgcaagagcaattgaattactggaaaaactacaggaatctggagaagtaccagtgcacaagctacaatccctcaaaaaagtgcttcagagtgagttttgtacagctattcgagaggtgtatcaatatatgcatgaaacgataactgttaatggctgtcccgaattccgtgcgagggcaacagcaaaggcaacagttgcagcttttgcagctagtgaaggccactcccaccctcgagtagttgaactgccaaagactgatgaaggccttggttttaatgtgatgggaggaaaggagcaaaattcccccatttatatctctcgcataattcctggaggggtggctgaaagacacggaggcctcaaaagaggagaccagctgctatcagtgaacggagtgagtgtggaaggagaacaccatgagaaagctgtggaactactcaaggctgctaaagacagcgtcaagctggtggtgcgatacaccccaaaagttctggaagaaatggaggctcgctttgaaaagctacgaacagccaggcgtcggcagcagcagcaattgctaattcagcagcagcaacagcagcagcagcaacaaacacaacaaaaccacatgtcataggcccttgagggaaagctacttgatcaaacatccgatagtcacaaatttgaaaccgtgcttcagaatcccagcacatagtaaaagacaacactgataattatacctgtcaagaagctgtgaacacatggtgtataaattctttaccaaggcaactcaacaccttctttctctgggcttgaaccgccactgctcacgtgggctttacatacattgaccttccattcactgcagtgggaattctcagtgtgcagagggagaggttttctagtctgcaaactgaaacagtgtaagaagaataaagtctatgacttttaaataaatcaccagggccaagattgagtgaatcttgggtccatagcttttccagatattagcaaacccctcattaggctataattcaaactgcatcagttcaaagtgaaacctacacattgctccttaccctcacctgctccacaatccatagtgctgagttgtctgaattggaattccagttaattgcaagttcaacctgttttcctcttgaaaatcgcaaggtatcatactatatttatattttcttcaggttctagaagcaatcggctttttcttttgtttccatgaattttattatgcattaatagaatggaccaattttagctcaacttttagtttgttagaagcaagtgtaggaactctagcactgtagtttttaattattgcttgtatctattattattaattccaacagagtataatgtatatttattctataaaatatatattatcagagtgcatttgttacaacttaggttcttttcttaccaagtattaagaatctagtaagagaatactagcaaaggacctagccctgtgaacagattctcgtatgttatatacataaacccactctcaatattttttgagttttatactttttgattgataaacactgaagaaatctaaactctactcacactgatgtgctgtcatagaagcctatttcatattttaaagcttagcaaaactaaattatatgtgcatatatattcaaatatttgtgtcacacaaagtttaggtcaatttccccaaatataaaccagatatttttggcactctcagataaacaagtattatttctcttataattgggcaggtggaaaccagtgatatcaatattgtgaatggcagatgctgcttcctcta

SEQ ID NO: 25079 - DNA, 1880 bp, Homo sapiens
tttatattcttatcctaccaggcttcggaataatctcccatatgtaagtggtccagccgctcaccctggacagagatgttgcaagagcaattgaattactggaaaaactacaggaatctggagaagtaccagtgcacaagctacaatccctcaaaaaagtgcttcagagtgagttttgtacagctattcgagaggtgtatcaatatatgcatgaaacgataactgttaatggctgtcccgaattccgtgcgagggcaacagcaaaggcaacagttgcagcttttgcagctagtgaaggccactcccaccctcgagtagttgaactgccaaagactgatgaaggccttggttttaatgtgatgggaggaaaggagcaaaattcccccatttatatctctcgcataattcctggaggggtggctgaaagacacggaggcctcaaaagaggagaccagctgctatcagtgaacggagtgagtgtggaaggagaacaccatgagaaagctgtggaactactcaaggctgctaaagacagcgtcaagctggtggtgcgatacaccccaaaagttctggaagaaatggaggctcgctttgaaaagctacgaacagccaggcgtcggcagcagcagcaattgctaattcagcagcagcaacagcagcagcagcaacaaacacaacaaaaccacatgtcataggcccttgagggaaagctacttgatcaaacatccgatagtcacaaatttgaaaccgtgcttcagaatcccagcacatagtaaaagacaacactgataattatacctgtcaagaagctgtgaacacatggtgtataaattctttaccaaggcaactcaacaccttctttctctgggcttgaaccgccactgctcacgtgggctttacatacattgaccttccattcactgcagtgggaattctcagtgtgcagagggagaggttttctagtctgcaaactgaaacagtgtaagaagaataaagtctatgacttttaaataaatcaccagggccaagattgagtgaatcttgggtccatagcttttccagatattagcaaacccctcattaggctataattcaaactgcatcagttcaaagtgaaacctacacattgctccttaccctcacctgctccacaatccatagtgctgagttgtctgaattggaattccagttaattgcaagttcaacctgttttcctcttgaaaatcgcaaggtatcatactatatttatattttcttcaggttctagaagcaatcggctttttcttttgtttccatgaattttattatgcattaatagaatggaccaattttagctcaacttttagtttgttagaagcaagtgtaggaactctagcactgtagtttttaattattgcttgtatctattattattaattccaacagagtataatgtatatttattctataaaatatatattatcagagtgcatttgttacaacttaggttcttttcttaccaagtattaagaatctagtaagagaatactagcaaaggacctagccctgtgaacagattctcgtatgttatatacataaacccactctcaatattttttgagttttatactttttgattgataaacactgaagaaatctaaactctactcacactgatgtgctgtcatagaagcctatttcatattttaaagcttagcaaaactaaattatatgtgcatatatattcaaatatttgtgtcacacaaagtttaggtcaatttccccaaatataaaccagatatttttggcactctcagataaacaagtattatttctcttataattgggcaggtggaaaccagtgatatcaatattgtgaatggcagatgctgcttcctcta

SEQ ID NO: 25080 - DNA, 1050 bp, Homo sapiens
ctcagctccgcaccgcaactgaagatctgccgccgcggaacagttgcgtctccatctggctaccaacccacccaagctttcttctccaccaccaccaccttccttccttccccctcctccccctcctttccgtcttccctctccacccccgcccccaatctcctcctttttttctcactacgagcggttgctgatgctgaagccgagcgtcacttcggctcccacggcagacatggcgacattgacagtggtccagccgctcaccctggacagagatgttgcaagagcaattgaattactggaaaaactacaggaatctggagaagtaccagtgcacaagctacaatccctcaaaaaagtgcttcagagtgagttttgtacagctattcgagaggtgtatcaatatatgcatgaaacgataactgttaatggctgtcccgaattccgtgcgagggcaacagcaaaggcaacagttgcagcttttgcagctagtgaaggccactcccaccctcgagtagttgaactgccaaagactgatgaaggccttggttttaatgtgatgggaggaaaggagcaaaattcccccatttatatctctcgcataattcctggaggggtggctgaaagacacggaggcctcaaaagaggagaccagctgctatcagtgaacggagtgagtgtggaaggagaacaccatgagaaagctgtggaactactcaaggctgctaaagacagcgtcaagctggtggtgcgatacaccccaaaagttctggaagaaatggaggctcgctttgaaaagctacgaacagccaggcgtcggcagcagcagcaattgctaattcagcagcagcaacagcagcagcagcaacaaacacaacaaaaccacatgtcataggcccttgagggaaagctacttgatcaaacatccgatagtcacaaatttgaaaccgtgcttcagaatcccagcacatagtaaaagacaacactgataattatacctgtcaagaagctgtgaacacatggtgtataaattctttaccaaggcaactc

SEQ ID NO: 25081 - DNA, 1243 bp, Homo sapiens
gcaacatatagccctcacccttcataagccagtacggaatcttatcataaggcgcaaggcccttgagggaaagctacttgatcaaacatccgatagtcacaaatttgaaaccgtgcttcagaatcccagcacatagtaaaagacaacactgataattatacctgtcaagaagctgtgaacacatggtgtataaattctttaccaaggcaactcaacaccttctttctctgggcttgaaccgccactgctcacgtgggctttacatacattgaccttccattcactgcagtgggaattctcagtgtgcagagggagaggttttctagtctgcaaactgaaacagtgtaagaagaataaagtctatgacttttaaataaatcaccagggccaagattgagtgaatcttgggtccatagcttttccagatattagcaaacccctcattaggctataattcaaactgcatcagttcaaagtgaaacctacacattgctccttaccctcacctgctccacaatccatagtgctgagttgtctgaattggaattccagttaattgcaagttcaacctgttttcctcttgaaaatcgcaaggtatcatactatatttatattttcttcaggttctagaagcaatcggctttttcttttgtttccatgaattttattatgcattaatagaatggaccaattttagctcaacttttagtttgttagaagcaagtgtaggaactctagcactgtagtttttaattattgcttgtatctattattattaattccaacagagtataatgtatatttattctataaaatatatattatcagagtgcatttgttacaacttaggttcttttcttaccaagtattaagaatctagtaagagaatactagcaaaggacctagccctgtgaacagattctcgtatgttatatacataaacccactctcaatattttttgagttttatactttttgattgataaacactgaagaaatctaaactctactcacactgatgtgctgtcatagaagcctatttcatattttaaagcttagcaaaactaaattatatgtgcatatatattcaaatatttgtgtcacacaaagtttaggtcaatttccccaaatataaaccagatatttttggcactctcagataaacaagtattatttctcttataattgggcaggtggaaaccagtgatatcaatattgtgaatggcagatgctgcttcctcta

SEQ ID NO: 25082 - DNA, 1213 bp, Homo sapiens
ctcagctccgcaccgcaactgaagatctgccgccgcggaacagttgcgtctccatctggctaccaacccacccaagctttcttctccaccaccaccaccttccttccttccccctcctccccctcctttccgtcttccctctccacccccgcccccaatctcctcctttttttctcactacgagcggttgctgatgctgaagccgagcgtcacttcggctcccacggcagacatggcgacattgacagtggtccagccgctcaccctggacagagatgttgcaagagcaattgaattactggaaaaactacaggaatctggagaagtaccagtgcacaagctacaatccctcaaaaaagtgcttcagagtgagttttgtacagctattcgagaggtgtatcaatatatgcatgaaacgataactgttaatggctgtcccgaattccgtgcgagggcaacagcaaaggcaacagttgcagcttttgcagctagtgaaggccactcccaccctcgagtagttgaactgccaaagactgatgaaggccttggttttaatgtgatgggaggaaaggagcaaaattcccccatttatatctctcgcataattcctggaggggtggctgaaagacacggaggcctcaaaagaggagaccagctgctatcagtgaacggagtgagtgtggaaggagaacaccatgagaaagctgtggaactactcaaggctgctaaagacagcgtcaagctggtggtgcgatacaccccaaaagttctggaagaaatggaggctcgctttgaaaagctacgaacagccaggcgtcggcagcagcagcaattgctaattcagcagcagcaacagcagcagcagcaacaaacacaacaaaaccacatgtcataggcccttgagggaaagctacttgatcaaacatccgatagtcacaaatttgaaaccgtgcttcagaatcccagcacatagtaaaagacaacactgataattatacctgtcaagaagctgtgaacacatggtgtataaattctttaccaaggcaactcaacaccttctttctctgggcttgaaccgccactgctcacgtgggctttacatacattgaccttccattcactgcagtgggaattctcagtgtgcagagggagaggttttctagtctgcaaactgaaacagtgtaagaagaataaagtctatgacttttaaata

SEQ ID NO: 25083 - DNA, 2157 bp, Homo sapiens
ctcagctccgcaccgcaactgaagatctgccgccgcggaacagttgcgtctccatctggctaccaacccacccaagctttcttctccaccaccaccaccttccttccttccccctcctccccctcctttccgtcttccctctccacccccgcccccaatctcctcctttttttctcactacgagcggttgctgatgctgaagccgagcgtcacttcggctcccacggcagacatggcgacattgacagtggtccagccgctcaccctggacagagatgttgcaagagcaattgaattactggaaaaactacaggaatctggagaagtaccagtgcacaagctacaatccctcaaaaaagtgcttcagagtgagttttgtacagctattcgagaggtgtatcaatatatgcatgaaacgataactgttaatggctgtcccgaattccgtgcgagggcaacagcaaaggtattctcgtgtgtacactgtaagagaatttagacatcagtggcagcccagagtctagaaccagtactacttctcaggcaacagttgcagcttttgcagctagtgaaggccactcccaccctcgagtagttgaactgccaaagactgatgaaggccttggttttaatgtgatgggaggaaaggagcaaaattcccccatttatatctctcgcataattcctggaggggtggctgaaagacacggaggcctcaaaagaggagaccagctgctatcagtgaacggagtgagtgtggaaggagaacaccatgagaaagctgtggaactactcaaggctgctaaagacagcgtcaagctggtggtgcgatacaccccaaaagttctggaagaaatggaggctcgctttgaaaagctacgaacagccaggcgtcggcagcagcagcaattgctaattcagcagcagcaacagcagcagcagcaacaaacacaacaaaaccacatgtcataggcccttgagggaaagctacttgatcaaacatccgatagtcacaaatttgaaaccgtgcttcagaatcccagcacatagtaaaagacaacactgataattatacctgtcaagaagctgtgaacacatggtgtataaattctttaccaaggcaactcaacaccttctttctctgggcttgaaccgccactgctcacgtgggctttacatacattgaccttccattcactgcagtgggaattctcagtgtgcagagggagaggttttctagtctgcaaactgaaacagtgtaagaagaataaagtctatgacttttaaataaatcaccagggccaagattgagtgaatcttgggtccatagcttttccagatattagcaaacccctcattaggctataattcaaactgcatcagttcaaagtgaaacctacacattgctccttaccctcacctgctccacaatccatagtgctgagttgtctgaattggaattccagttaattgcaagttcaacctgttttcctcttgaaaatcgcaaggtatcatactatatttatattttcttcaggttctagaagcaatcggctttttcttttgtttccatgaattttattatgcattaatagaatggaccaattttagctcaacttttagtttgttagaagcaagtgtaggaactctagcactgtagtttttaattattgcttgtatctattattattaattccaacagagtataatgtatatttattctataaaatatatattatcagagtgcatttgttacaacttaggttcttttcttaccaagtattaagaatctagtaagagaatactagcaaaggacctagccctgtgaacagattctcgtatgttatatacataaacccactctcaatattttttgagttttatactttttgattgataaacactgaagaaatctaaactctactcacactgatgtgctgtcatagaagcctatttcatattttaaagcttagcaaaactaaattatatgtgcatatatattcaaatatttgtgtcacacaaagtttaggtcaatttccccaaatataaaccagatatttttggcactctcagataaacaagtattatttctcttataattgggcaggtggaaaccagtgatatcaatattgtgaatggcagatgctgcttcctcta

SEQ ID NO: 25084 - DNA, 843 bp, Homo sapiens
ctcagctccgcaccgcaactgaagatctgccgccgcggaacagttgcgtctccatctggctaccaacccacccaagctttcttctccaccaccaccaccttccttccttccccctcctccccctcctttccgtcttccctctccacccccgcccccaatctcctcctttttttctcactacgagcggttgctgatgctgaagccgagcgtcacttcggctcccacggcagacatggcgacattgacagtggtccagccgctcaccctggacagagatgttgcaagagcaattgaattactggaaaaactacaggaatctggagaagtaccagtgcacaagctacaatccctcaaaaaagtgcttcagagtgagttttgtacagctattcgagaggtgtatcaatatatgcatgaaacgataactgttaatggctgtcccgaattccgtgcgagggcaacagcaaaggcaacagttgcagcttttgcagctagtgaaggccactcccaccctcgagtagttgaactgccaaagactgatgaaggccttggttttaatgtgatgggaggaaaggagcaaaattcccccatttatatctctcgcataattcctggaggggtggctgaaagacacggaggcctcaaaagaggagaccagctgctatcagtgaacggagtggtatgtttataaaataaccagagattttctccttaagcacattctttttttttgccccctgctattactgaagtcaacgttgaaaacctagaataaatattcattttatgtctaaccagctttctaagcattgatggatattaaacctataaaagctgcaatctaat

SEQ ID NO: 25085 - DNA, 317 bp, Homo sapiens
gtgagaaacagtacattgatgttctaccttgtttttaataaaataaaagtgataacataattagacctatataattttaatcctgatgataggatttagtaaccgatttataagatttatttatttcctattggttacaatcacattccttgaaataaatgctaacacggccgggcacagtggctcatgcctgtaatcccagcgctttgggaggctgaggcgagcagatcacaaggtcaggagttcgagaccagcccggccaatatggtgaaaccccgtctctactaaaaatacaaaaattagtcaggtgtggtggc

SEQ ID NO: 25086 - DNA, 257 bp, Homo sapiens
gtattagctagaattctcctatgaagatttttcccatttaccctttctcttcctctgtatcctacctttgtttttaaaacactattgcagacccaggattttttttttatgtgttctccattttaattttctttcttttttttttttaaactcatattgtcccagttttgagaagctagagcactctgtgtacatatttgtaacgttttatagaatttcagctttcagaaaacttgcgctgttttagcttgtttagg

SEQ ID NO: 25087 - DNA, 419 bp, Homo sapiens
cttggaaatatacctttgtttatcccattctttcaccaaatgtgtaaatataaaacacagctttccaagatgtgccactttaatttaatctaccagattatgcctgctgtcattctttagcacctcacttcagtgtatctgttgtttgcataacaatatactatcaatttataatgagttattttacaataggtctgtttttcgggaattttgaatgcatttttctaggaagttctgtttgtctatgtagccccaatacttgcatacttggggaagtaaaattgaaaacgaatagtttcatggaggattgttaacattagaggagaagattgtttaatcagaggagaatgaggaagtaaatggagattttagaggaaatgttgaccaggaagaaagccaggacactttcccatgctttt

SEQ ID NO: 25088 - DNA, 669 bp, Homo sapiens
atttacataccactgataaaatgtacaataggcctgaagggtgttaagaacttcttgggggtaaataacaaaaatctctatataaatccacctcttttaacatttgtcttcactggccacagcctatttcatctaccttttctagacagatggggttattggaaaggtactgtttacttaatttccagatcataattgtaaaatagatgaatttagagaacagataataaagggacgttttcaatatgctttgtaacacagctaattcaagtctattcaaaaaggtaaacaaattcattttaactgccactgatatttatagacttcctccaaaatattaaaagctcttaaactgggcagattaagaaatacataaatggccaggtgtggtgcctgtaatcccggcactttgggaggccaaggtgggaggttcacctgagatcaggagttcaagaccagcctgaccaagattgcaaaaccttgtctccactaaaaatacaaaaattagccggtagtggtggcacatgcctgtacttccagctactcaggaggctaaggctggagaattacttgaatccaggaggcagaggttgcagtgaaccaagattgtgccactgcactccagcctaagcaacacagcgagactccatctcaaacaaaaaaaaaaca

SEQ ID NO: 25089 - DNA, 386 bp, Homo sapiens
gaacccagctaaccaggacccattcatctgacccacagaaacagtggcatagtaaatgtgtgttatcataagccactacattgtgataattcactataaagcaagaggtaattattaaccagccttaaggattcagtaacaactctggtataacattgctttgcttcacatatacattgaggttccaagaataatcctgataaagcaagaaactagaactataggctggtgtaaaaacaggccctgggtagatggtggcttcaagggttgggctgtatctcacattaaactggagagggattaagatagtgaaggtccaggaggaagagctagcagaataaaactattcagcttgatgaaatatacacttagggcaaaatgataga

SEQ ID NO: 25090 - DNA, 350 bp, Homo sapiens
agccagccagaagttttgctggcaatggtttggtttctagaacagcatcaaaacttgtctcccatgttttgtaagtggtttaacccacaagatatcacgcatttgaaacttttaagaagaaacttaatttcatctgtgaatgcagaagcaaatatgagggcatgggcatttaaatatgaagtatttcttgaaagccacctactggagagtaagtttggtgcaataatttaagaaaagataaaaaagaaacaggaaaattgggacaacggacagcatgatggagccaccgtgcaagccctcaatagtctgcctccaggttgtgtcaaataaagtaaaaagaacaaaaaaac

SEQ ID NO: 25091 - DNA, 438 bp, Homo sapiens
aacacactcatgaaaaaccagtgggtcaaaaaagaaatcaaaagggaaatttaaaaactcttgagacaaacaaaaatggacatagaacacacccaaactcgcaagatgtagcaaaagcaattctaaaagggaagagcatagcagtaaacacctatgttaagaaaaaaaaaatcccaaataaatagcctaactttatacctcaaacaactagaaaaagaaaaacaaaataaccccaaagttagtagaaaaaagacagaaaggaaggaaggaagggaggaaggaaggaaggaagaaggaaagaaagaaaaagaaggaaagaaagaaagaaaggaaaatcagagcaaaaataaatgaaatagagataagacaaacaagagaaaagatcaaaagttggctttttgaaaagataaaattaacgaaactttagctggcctaact

SEQ ID NO: 25092 - DNA, 248 bp, Homo sapiens
cacagacaggaggaggaggaggaggcagtgtgatcctggaggcacagatcagggtgaagcagtcacaaaccaaggagtgccggcagctcccagaggccggagggtggaggagtggattctccctgagagcctccagagggaacaggccctgcccaacgccctcgttctggcccagtgaaatgaatgtggactgctggccttaataactgtgagaaaaaaacatgtctgtggtttaaagccaccaaatc

SEQ ID NO: 25093 - DNA, 452 bp, Homo sapiens
gaatacttccagacatctttgtttttcaaccatgtttaccaagatttcacccttggggaatagattttcatcttaatttatggaagtctttgagaaacctgggaaatggctaatgaggtagatctttttagtggtagataaaaattaggagatgttagaatctttttaataataactacagttttttaaaacaacatttaaaattatgaaaatagccaggcacggtggctcatgcctgtactcccaatgtgctggtattacaggtgtgagccactgtgcccagccttgctttaataattttttttgtacttgggaaaacctacttagcgtactccacatttttagaatgtttatctgttttattcccggcctagataggcttttagttggtttccatatacagtgtatatagggagaaacagactaagacagacactggcatccacagaagt

SEQ ID NO: 25094 - DNA, 476 bp, Homo sapiens
caggggagcacctgggaagcgctgggggtcgcgtgcccttggccggaggcctggtcacccgcaggccctgccatcctcggcttggccgctgctgcccgcgcgcctgtggcggagcgagcctgcctccagggcagcctcaccgcctggatcctgggcaggagacctcccaggtcccttcctctgtccagctgtctggaatggagccgccatgtctggtgctcaagcggccagctctgacccagaggttaaccagtgttggttcctgttgtttacaaccaagaatcctgagaagttcatatgtagcccacacataagctgaagtattgccttatgacatattctgaatattccaattattttgcaaataattccactaagagattaatacattctagagcatgtagctgtggttcattcattttcataactgtgtaatatttcattgaataaatttgctctttctatattttcaaacc

SEQ ID NO: 25095 - DNA, 410 bp, Homo sapiens
tgagatggagtctcactctgtccccccaggctgcagtgcagtggcacgatctctgctcactgcaacctctgtctccagggttcaagtgattctcctgcctcagcctctcaagtagttgggattagaggtgcctgccagcacgcctggctaattttttgtatttttagtagagacagggtttctcaattttggtcgggctggtctcaaactcccgacctcaggtgatctgcttgccttggcctcccaaagtgttgggattacaggcgtgagccactgcgcccggcccagaatatactttttaaaatgaggtgctataatttatatttgtgtactttagatcaaattaactataagctaaatttttaacatttaacgatacaattcacataaaattggacaaatatgcaact

SEQ ID NO: 25096 - DNA, 1825 bp, Homo sapiens
agcgggccgagcccagctccccgcggcggccgctagcccccggccccgagccaccactccgacctagcggccgccgcccccggtgcgggatgaggagatccgcggccgccactgggccccatggaggagccgcagccgccccgcccaccagcgagcatggccttactgggcagccagcactccggcgccccctccgcggccggcccacctggcgggacttcctcagcggccacggcggccgtgctctccttcagcaccgtggcgaccgcggcgctggggaacctgagcgacgcaagcggaggcggcacagctgccgctcccggtggcggcggccttggcgggtccggggcagcgcgggaggcgggggcggcggtgaggcggccgctaggcccggaggcggcgccgctgctgtcgcacggagctgcagtggcggcccaggcgctcgtcctcctgctcatcttcctgctgtctagccttggcaactgcgcggtgatgggggtgattgtgaagcaccggcagctccgcaccgtcaccaacgccttcatcctgtcgctgtccctatcggatctgctcacggcgctgctctgcctgcccgccgccttcctggacctcttcactccgcccgggggttcggcgcctgcgctgcccgcggggccctggcgcggcttctgccggccaagccgcttcttcagctcgtgcttcggcatcgtgtacgctcagcgtggcgctcatctcgttggaccgttactgcgctatcgtcggccgccgcgggagaagatcggccgccgccgcgcgctgcagctgctggcgggcgcctggctgacggccctgggcttctccttgccctgggagctgctcggggcgccccgggaactcgcggcggcgcagagcttccacggctgcctctaccggacctccccggaccccgcgcagctgggcgcggccttcagcgtggggctggtggtggcctgctacctgctgcccttcctgctcatgtgcttctgccactaccacatctgcaagacggtgcgcctgtcggacgtgcgcgtgcggccggtgaacacctacgcgcgcgtgctgcgcttcttcagcgaggtgcgcacggccaccaccgtcctcatcatgatcgtcttcgtcatctgctgctgggggccctactgcttcctggtgctgctggccgccgcccggcaggcccagaccatgcaggccccctcgctcctcagcgtggtggccgtctggctgacctgggccaatggggccatcaaccctgtcatctacgccatccgcaatcccaacatttcgatgctcctagggcgcaaccgcgaggagggctaccggactaggaatgtggacgctttcctgcccagccagggcccgggtctgcaagccagaagccgcagtcgccttcgaaaccgctatgccaaccggctgggggcctgcaacaggatgtcctcttccaacccggccagcggagtggcaggggacgtggccatgtgggcccgcaaaaatccagttgtacttttctgccgagagggaccaccagagccggtgacggcagtgaccaaacagcctaaatccgaagctggggataccagcctctaagacggttggaatggccagcttatgaaggcaaatttccactcgcattatttaatgatggaagattctgggggagagttgtggatttcataaagccaaacatttaaagctagagacgggggaggcttaccactttccccaaacaacataaaagacaatgtcccttcttcaaaagtgccaaaaggaatgtaaaatgcaaaaattaaaacaatcttaaaccacataa

SEQ ID NO: 25097 - DNA, 163 bp, Homo sapiens
catgggccacactttgagactcaaggtaataagtaaccctcttcaaagtcagggcttttgttttggggaaaattcaagtattcaaatagagctttgttgtcattccaaaaagtcctcaccatccgatgtgttctttcaatggataaatacaaggtaatccatc

SEQ ID NO: 25098 - DNA, 456 bp, Homo sapiens
aaatacgtaaaatcacatatccagttatatagtatgtagtacacatccttccttttgcaacatggctcagcacagcactggctggaactatgacttgcggctaccagcctcaaagattttcaggactctaaatggaaacagaacatctgatcatatctgactcctcacgtctcctgtcacagctcctttgggtagtagcctctcttttcatagaaaaatatcactgtcaggctgacttttagggtcatgttcctaaaggccaataaagacaagctgtgttctcatgacaacaggcagaaatcaacctcacacatctgctgacgctccagaacatctatgtggacttccaagcactaaatatctgagagttactgtcttttaaatacccccaaatgaaggttttgaataacttttctggagcacatatgttcatttaacatttattgaagactacat

SEQ ID NO: 25099 - DNA, 415 bp, Homo sapiens
ggataaattcccaactgattgttttatagcatgctttgtttttacattaaaagggagaatgggcctggtatggtagctcatgcctgtaatcccagcactttgggaggccgaggcagatgaatcatttgaggtcaggagttcgagaccagcttgggcaatatagggaaaccctatctctacaaaaaatacaaaaattagccaggcgttgtggcacgtgcctgtagtccggctactcaagagactgaagtgggagaatggcttgagctggcgaggtagaggttgcagtgagcagagattacaccactgcacatcagcctgggcaacagagccagaccctgtatcaaaaaaaaaaaaaaaaaaaaaagacatgataatacagccagttgtaaaagtcatggggatgtttagtctagag

SEQ ID NO: 25100 - DNA, 165 bp, Homo sapiens
tggtttggggcctggggtcggggaggagtgagtcacccccagtggagagcagtgcactctgggagggcctgacgttccttgccttgctctgcccagtgtttgagaacagcagcaagatcgtgatcgtcatggagtatgccagcacaagaacacacggggtaccga

SEQ ID NO: 25101 - DNA, 970 bp, Homo sapiens
  misc_feature (22)..(22): n is a, c, g, or t
gtctggggcacgaggcagcgancaaccaccagaactggatggtggcacccctaatgtgcatgaggcatcctgggaatggtctggagtaacgcttcgttatttttatttttatttttatttatttatttatttttttgagacggagtttcgctcttggtgcccaggctagagtgcaatggcgcgatctcagctcacctcaacctccgcctcccgggttcaagcgattctcctgcctcagcctccctagtagctgggattacaggcgcccgccaccatgcccggctaattttgtatttttagtagagacagggtttctccatgttggtcaggctggtctcaaactcccgacctcaggtgatccacccacctcggcctcccaaagtgctgggattacaggcgtgagccaccgcgccccacctaacccttccttatttagcctaggagtaagagaacacaatctctgtttcttcaatggttctcttcccttttccatcctccaaacctggcctgagcctcctgaagttgctgctgtgaatctgaaagacttgaaaagcctccgcctgctgtgtggacttcatctcaaggggcccagcctcctctggactccaccttggacctcagtgactcagaacttctgcctctaagctgctctaaagtccagactatggatgtgttctctaggccttcaggactctagaatgtccatatttatttttatgttcttggctttgtgttttaggaaaagtgaatcttgctgttttcaataatgtgaatgctatgttctgggaaaatccactatgacatctaagttttgtgtacagagagatatttttgcaactatttccacctcctcccacaaccccccacactccactccacactcttgagtctctttacctaatggtctctacctaatggacctccgtggccaaaaagtaccattaaaaccagaaaggtgattggaagcagg

SEQ ID NO: 25102 - DNA, 3406 bp, Homo sapiens
gtgctttactgcgcgctctggtactgctgtggctccccgtcctggtgcgggacctgtgccccgcgcttcagccctccccgcacagcctactgattcccctgccgcccttgctcacctcctgctcgccatggagtcgctggttttcgcgcggcgctccggccccactccctcggccgcagagctagcccggccgctggcggaagggctgatcaagtcgcccaagcccctaatgaagaagcaggcggtgaagcggcaccaccacaagcacaacctgcggcaccgctacgagttcctggagaccctgggcaaaggcacctacgggaaggtgaagaaggcgcgggagagctcggggcgcctggtggccatcaagtcaatccggaaggacaaaatcaaagatgagcaagatctgatgcacatacggagggagattgagatcatgtcatcactcaaccaccctcacatcattgccatccatgaagtgtttgagaacagcagcaagatcgtgatcgtcatggagtatgccagccggggcgacctttatgactacatcagcgagcggcagcagctcagtgagcgcgaagctaggcatttcttccggcagatcgtctctgccgtgcactattgccatcagaacagagttgtccaccgagatctcaagctggagaacatcctcttggatgccaatgggaatatcaagattgctgacttcggcctctccaacctctaccatcaaggcaagttcctgcagacattctgtgggagccccctctatgcctcgccagagattgtcaatgggaagccctacacaggcccagaggtggacagctggtccctgggtgttctcctctacatcctggtgcatggcaccatgccctttgatgggcatgaccataagatcctagtgaaacagatcagcaacggggcctaccgggagccacctaaaccctctgatgcctgtggcctgatccggtggctgttgatggtgaaccccacccgccgggccaccctggaggatgtggccagtcactggtgggtcaactggggctacgccacccgagtgggagagcaggaggctccgcatgagggtgggcaccctggcagtgactctgcccgcgcctccatggctgactggctccggcgttcctcccgccccctcctggagaatggggccaaggtgtgcagcttcttcaagcagcatgcacctggtgggggaagcaccacccctggcctggagcgccagcattcgctcaagaagtcccgcaaggagaatgacatggcccagtctctccacagtgacacggctgatgacactgcccatcgccctggcaagagcaacctcaagctgccaaagggcattctcaagaagaaggtgtcagcctctgcagaaggggtacaggaggaccctccggagctcagcccaatccctgcgagcccagggcaggctgccccgctgctccccaagaagggcattctcaagaagccccgacagcgcgagtctggctactactcctctcccgagcccagtgaatctggggagctcttggacgcaggcgacgtgtttgtgagtggggatcccaaggagcagaagcctccgcaagcttcagggctgctcctccatcgcaaaggcatcctcaaactcaatggcaagttctcccagacagccttggagctcgcggcccccaccaccttcggctccctggatgaactcgccccacctcgccccctggcccgggccagccgaccctcaggggctgtgagcgaggacagcatcctgtcctctgagtcctttgaccagctggacttgcctgaacggctcccagagcccccactgcggggctgtgtgtctgtggacaacctcacggggcttgaggagcccccctcagagggccctggaagctgcctgaggcgctggcggcaggatcctttgggggacagctgcttttccctgacagactgccaggaggtgacagcgacctaccgacaggcactgagggtctgctcaaagctcacctgagtggagtaggcattgccccagcccggtcaggctctcagatgcagctggttgcaccccgaggggagatgccttctcccccacctcccaggacctgcatcccagctcagaaggctgagagggtttgcagtggagccctgagcagggctggatatgggaagtaggcaaatgaaatgcgccaagggttcagtgtctgtcttcagccctgctgaacgaagaggatactaaagagaggggaacgggaatgcccgcgacagagtccacattgcctgtttcttgtgtacatgggggggccacagagacctggaaagagaactctcccagggcccatctcctgcatcccatgaatactctgtacacatggtgccttctaaggacagctccttccctactcattccctgcccaagtggggccagacctctttacacacacattcccgttcctaccaaccaccagaactggatggtggcacccctaatgtgcatgaggcatcctgggaatggtctggagtaacgcttcgttatttttatttttatttttatttatttatttatttttttgagacggagtttcgctcttggtgcccaggctagagtgcaatggcgcgatctcagctcacctcaacctccgcctcccgggttcaagcgattctcctgcctcagcctccctagtagctgggattacaggcgcccgccaccatgcccggctaattttgtatttttagtagagacagggtttctccatgttggtcaggctggtctcaaactcccgacctcaggtgatccacccacctcggcctcccaaagtgctgggattacaggcgtgagccaccgcgccccacctaacccttccttatttagcctaggagtaagagaacacaatctctgtttcttcaatggttctcttcccttttccatcctccaaacctggcctgagcctcctgaagttgctgctgtgaatctgaaagacttgaaaagcctccgcctgctgtgtggacttcatctcaaggggcccagcctcctctggactccaccttggacctcagtgactcagaacttctgcctctaagctgctctaaagtccagactatggatgtgttctctaggccttcaggactctagaatgtccatatttatttttatgttcttggctttgtgttttaggaaaagtgaatcttgctgttttcaataatgtgaatgctatgttctgggaaaatccactatgacatctaagttttgtgtacagagagatatttttgcaactatttccacctcctcccacaaccccccacactccactccacactcttgagtctctttacctaatggtctctacctaatggacctccgtggccaaaaagtaccattaaaaccagaaaggtgattggaagcagg

SEQ ID NO: 25103 - DNA, 665 bp, Homo sapiens
gcaagactattatatcctaaattggaataaaagttttaataatactaacttgtcttttttttttttctaaaattgattccattgctactgttaatagtataaatcttaaaagggtgaattttttggatgaaattaatgcttattcttttctttttaaacagggcaataaatgtgttcgtaagtgccaaccgactaattcatcaaaccaacttaatacttcagaccttcaaaactgtggcctgaaagttgtatatgttaagagatgtacttctcagtggcagtattgaactgcctttatctgtaaattttaaagtttgactgtataaattatcagtccctcctgaagggatctaatccaggatgttgaatgggattattgccatcttacaccatatttttgtaaaatgtagcttaatcataatctcacactgaagattttgcatcacttttgctattatcattcttttaagaattataagccaaaagaatttacgccttaatgtgtcattatataacattccttaaaagaattgtaaatattggtgtttgtttctgacattttaacttgaaagcgatatgctgcaagataatgtatttaacaatatttggtggcaaatattcaataaatagtttacatctgttaaacatttctttacttgaaaaaa

SEQ ID NO: 25104 - DNA, 1312 bp, Homo sapiens
tgcacgactccggctgggcaggattccggacaacgcctggttcctcttgggtccttccggcgtcgccggagtgaattgatccgggagttgaagagggctgcaaggtgggaagtgaagtcagtgcctcagttgctgatcagtgtgttttttgtgtccaattcttttatcaccaaaaaagagaagaaatattgcagtgaatgaagattcctctgcattttagcactgctttttcaactgtagttggcttttgaatgaggatgacaatggaagagatgaagaatgaagctgagaccacatccatggtttctatgcccctctatgcagtcatgtatcctgtgtttaatgagctagaacgagtaaatctgtctgcagcccagacactgagagccgctttcatcaaggctgaaaaagaaaatccaggtctcacacaagacatcattatgaaaattttagagaaaaaaagcgtggaagttaacttcacggagtcccttcttcgtatggcagctgatgatgtagaagagtatatgattgaacgaccagagccagaattccaagacctaaacgaaaaggcacgagcacttaaacaaattctcagtaagatcccagatgagatcaatgacagagtgaggtttctgcagacaatcaaggatatagctagtgcaataaaagaacttcttgatacagtgaataatgtcttcaagaaatatcaataccagaaccgcagggcacttgaacaccaaaagaaagaatttgtaaagtactccaaaagtttcagtgatactctgaaaacgtattttaaagatggcaaggcaataaatgtgttcgtaagtgccaaccgactaattcatcaaaccaacttaatacttcagaccttcaaaactgtggcctgaaagttgtatatgttaagagatgtacttctcagtggcagtattgaactgcctttatctgtaaattttaaagtttgactgtataaattatcagtccctcctgaagggatctaatccaggatgttgaatgggattattgccatcttacaccatatttttgtaaaatgtagcttaatcataatctcacactgaagattttgcatcacttttgctattatcattcttttaagaattataagccaaaagaatttacgccttaatgtgtcattatataacattccttaaaagaattgtaaatattggtgtttgtttctgacattttaacttgaaagcgatatgctgcaagataatgtatttaacaatatttggtggcaaatattcaataaatagtttacatctgttaaacatttctttacttgaaaaaa

SEQ ID NO: 25105 - DNA, 879 bp, Homo sapiens
tgcacgactccggctgggcaggattccggacaacgcctggttcctcttgggtccttccggcgtcgccggagtgaattgatccgggagttgaagagggctgcaaggtgggaagtgaagtcagtgcctcagttgctggaagaggagcactggaagaaggaagagacaaatgttggggtctacggattcagttccagtttaatgatgtggccctctaaggagataattttgccttaaacagaaagacttgaccctcttaggtgtcatacctaagatcagtgtgttttttgtgtccaattcttttatcaccaaaaaagagaagaaatattgcagtgaatgaagattcctctgcattttagcactgctttttcaactgtagttggcttttgaatgaggatgacaatggaagagatgaagaatgaagctgagaccacatccatggtttctatgcccctctatgcagtcatgtatcctgtgtttaatgagctagaacgagtaaatctgtctgcagcccagacactgagagccgctttcatcaaggctgaaaaagaaaatccaggtctcacacaagacatcattatgaaaattttagagaaaaaaagcgtggaagttaacttcacggagtcccttcttcgtatggcagctgatgatgtagaagagtatatgattgaacgaccagagccagaattccaagacctaaacgaaaaggcacgagcacttaaacaaattctcagtaagatcccagatgagatcaatgacagagtgaggtttctgcagacaatcaaggatatagctagtgcaataaaagaacttcttgatacagtgaataatgtcttcaagaaatatcaataccagaaccgcaggggtacgtttagtagaagc

SEQ ID NO: 25106 - DNA, 777 bp, Homo sapiens
tgcacgactccggctgggcaggattccggacaacgcctggttcctcttgggtccttccggcgtcgccggagtgaattgatccgggagttgaagagggctgcaaggtgggaagtgaagtcagtgcctcagttgctgctttctcctctaaatcttggtctcttgtttggaagtgactaacagcattttggcatgagaaagccctaaaaagatcagtgtgttttttgtgtccaattcttttatcaccaaaaaagagaagaaatattgcagtgaatgaagattcctctgcattttagcactgctttttcaactgtagttggcttttgaatgaggatgacaatggaagagatgaagaatgaagctgagaccacatccatggtttctatgcccctctatgcagtcatgtatcctgtgtttaatgagctagaacgagtaaatctgtctgcagcccagacactgagagccgctttcatcaaggctgaaaaagaaaatccaggtctcacacaagacatcattatgaaaattttagagaaaaaaagcgtggaagttaacttcacggagtcccttcttcgtatggcagctgatgatgtagaagagtatatgattgaacgaccagagccagaattccaagacctaaacgaaaaggcacgagcacttaaacaaattctcagtaagatcccagatgagatcaatgacagagtgaggtttctgcagacaatcaagatatagctagtgcaatcaggcacctgaacaccaaagaaagaattgtaagtcttcaaa

SEQ ID NO: 25107 - DNA, 679 bp, Homo sapiens
  misc_feature (679)..(679): n is a, c, g, or t
tgcacgactccggctgggcaggattccggacaacgcctggttcctcttgggtccttccggcgtcgccggagtgaattgatccgggagttgaagagggctgcaaggtgggaagtgaagtcagtgcctcagttgctgctttctcctctaaatcttggtctcttgtttggaagtgactaacagcattttggcatgagaaagccctaaaaagatcagtgtgttttttgtgtccaattcttttatcaccaaaaaagagaagaaatattgcagtgaatgaagattcctctgcattttagcactgctttttcaactgtagttggcttttgaatgaggatgacaatggaagagatgaagaatgaagctgagaccacatccatggtttctatgcccctctatgcagtcatgtatcctgtgtttaatgagctagaacgagtaaatctgtctgcagcccagacactgagagccgctttcatcaaggctgaaaaagaaaatccaggtctcacacaagacatcattatgaaaattttagagaaaaaaagcgtggaagttaacttcacggagtcccttcttcgtatggcagctgatgatgtagaagagtatatgattgaacgaccagagccagaattccaaaagtttcagtgttactctgcgtattttaaagatggcgggcattgtgttcgtn

SEQ ID NO: 25108 - DNA, 1385 bp, Homo sapiens
tgcacgactccggctgggcaggattccggacaacgcctggttcctcttgggtccttccggcgtcgccggagtgaattgatccgggagttgaagagggctgcaaggtgggaagtgaagtcagtgcctcagttgctgctttctcctctaaatcttggtctcttgtttggaagtgactaacagcattttggcatgagaaagccctaaaaagatcagtgtgttttttgtgtccaattcttttatcaccaaaaaagagaagaaatattgcagtgaatgaagattcctctgcattttagcactgctttttcaactgtagttggcttttgaatgaggatgacaatggaagagatgaagaatgaagctgagaccacatccatggtttctatgcccctctatgcagtcatgtatcctgtgtttaatgagctagaacgagtaaatctgtctgcagcccagacactgagagccgctttcatcaaggctgaaaaagaaaatccaggtctcacacaagacatcattatgaaaattttagagaaaaaaagcgtggaagttaacttcacggagtcccttcttcgtatggcagctgatgatgtagaagagtatatgattgaacgaccagagccagaattccaagacctaaacgaaaaggcacgagcacttaaacaaattctcagtaagatcccagatgagatcaatgacagagtgaggtttctgcagacaatcaaggatatagctagtgcaataaaagaacttcttgatacagtgaataatgtcttcaagaaatatcaataccagaaccgcagggcacttgaacaccaaaagaaagaatttgtaaagtactccaaaagtttcagtgatactctgaaaacgtattttaaagatggcaaggcaataaatgtgttcgtaagtgccaaccgactaattcatcaaaccaacttaatacttcagaccttcaaaactgtggcctgaaagttgtatatgttaagagatgtacttctcagtggcagtattgaactgcctttatctgtaaattttaaagtttgactgtataaattatcagtccctcctgaagggatctaatccaggatgttgaatgggattattgccatcttacaccatatttttgtaaaatgtagcttaatcataatctcacactgaagattttgcatcacttttgctattatcattcttttaagaattataagccaaaagaatttacgccttaatgtgtcattatataacattccttaaaagaattgtaaatattggtgtttgtttctgacattttaacttgaaagcgatatgctgcaagataatgtatttaacaatatttggtggcaaatattcaataaatagtttacatctgttaaacatttctttacttgaaaaaa

SEQ ID NO: 25109 - DNA, 1592 bp, Homo sapiens
tgcacgactccggctgggcaggattccggacaacgcctggttcctcttgggtccttccggcgtcgccggagtgaattgatccgggagttgaagagggctgcaaggtgggaagtgaagtcagtgcctcagttgctggtaaggtgtagctgttctgtcccagtccccgtagctctgcaccgagcagaagaggtctagggtcacgcaggggccatggctgaggcacttgggcttggttctggcaggcggagcggacggggctgagagcggggccctacgggcgaagaggagcactggaagaaggaagagacaaatgttggggtctacggattcagttccagtttaatgatgtggccctctaaggagataattttgccttaaacagaaagacttgaccctcttaggtgtcatacctaagatcagtgtgttttttgtgtccaattcttttatcaccaaaaaagagaagaaatattgcagtgaatgaagattcctctgcattttagcactgctttttcaactgtagttggcttttgaatgaggatgacaatggaagagatgaagaatgaagctgagaccacatccatggtttctatgcccctctatgcagtcatgtatcctgtgtttaatgagctagaacgagtaaatctgtctgcagcccagacactgagagccgctttcatcaaggctgaaaaagaaaatccaggtctcacacaagacatcattatgaaaattttagagaaaaaaagcgtggaagttaacttcacggagtcccttcttcgtatggcagctgatgatgtagaagagtatatgattgaacgaccagagccagaattccaagacctaaacgaaaaggcacgagcacttaaacaaattctcagtaagatcccagatgagatcaatgacagagtgaggtttctgcagacaatcaaggatatagctagtgcaataaaagaacttcttgatacagtgaataatgtcttcaagaaatatcaataccagaaccgcagggcacttgaacaccaaaagaaagaatttgtaaagtactccaaaagtttcagtgatactctgaaaacgtattttaaagatggcaaggcaataaatgtgttcgtaagtgccaaccgactaattcatcaaaccaacttaatacttcagaccttcaaaactgtggcctgaaagttgtatatgttaagagatgtacttctcagtggcagtattgaactgcctttatctgtaaattttaaagtttgactgtataaattatcagtccctcctgaagggatctaatccaggatgttgaatgggattattgccatcttacaccatatttttgtaaaatgtagcttaatcataatctcacactgaagattttgcatcacttttgctattatcattcttttaagaattataagccaaaagaatttacgccttaatgtgtcattatataacattccttaaaagaattgtaaatattggtgtttgtttctgacattttaacttgaaagcgatatgctgcaagataatgtatttaacaatatttggtggcaaatattcaataaatagtttacatctgttaaacatttctttacttgaaaaaa

SEQ ID NO: 25110 - DNA, 823 bp, Homo sapiens
tgcacgactccggctgggcaggattccggacaacgcctggttcctcttgggtccttccggcgtcgccggagtgaattgatccgggagttgaagagggctgcaaggtgggaagtgaagtcagtgcctcagttgctgctttctcctctaaatcttggtctcttgtttggaagtgactaacagcattttggcatgagaaagccctaaaaagatcagtgtgttttttgtgtccaattcttttatcaccaaaaaagagaagaaatattgcagtgaatgaagattcctctgcattttagcactgctttttcaactgtagttggcttttgaatgaggatgacaatggaagagatgaagaatgaagctgagaccacatccatggtttctatgcccctctatgcagtcatgtatcctgtgtttaatgagctagaacgagtaaatctgtctgcagcccagacactgagagccgctttcatcaaggctgaaaaagaaaatccaggtctcacacaagacatcattatgaaaattttagagaaaaaaagcgtggaagttaacttcacggagtcccttcttcgtatggcagctgatgatgtagaagagtatatgattgaacgaccagagccagaattccaagacctaaacgaaaaggcacgagcacttaaacaaattctcagtaagatcccagatgagatcaatgacagagtgaggtttctgcagacaatcaaggatatagctagtgcaataaaagaacttcttgatacagtgaataatgtcttcaagaaatatcaataccagaaccgcaggttgaaagacgcaggtaccgagctcg

SEQ ID NO: 25111 - DNA, 1686 bp, Homo sapiens
tgcacgactccggctgggcaggattccggacaacgcctggttcctcttgggtccttccggcgtcgccggagtgaattgatccgggagttgaagagggctgcaaggtgggaagtgaagtcagtgcctcagttgctggtaaggtgtagctgttctgtcccagtccccgtagctctgcaccgagcagaagaggtctagggtcacgcaggggccatggctgaggcacttgggcttggttctggcaggcggagcggacggggctgagagcggggccctacgggcgtaagcgaggttaccctacgcgagtggcgtaaagcgggtttgtaaatgccgcctgccggcttgggcccgaacgcctccaggaagtctcctctaggtgggggcgggaggggaagggcgaggttggcccctggtgccccgggagaggggacagggcggatgtgcctggggtggggtcctttgaaggtgtggcttcggaccgagaggtgaggctgctgttttccccctgctttatcagtgtgttttttgtgtccaattcttttatcaccaaaaaagagaagaaatattgcagtgaatgaagattcctctgcattttagcactgctttttcaactgtagttggcttttgaatgaggatgacaatggaagagatgaagaatgaagctgagaccacatccatggtttctatgcccctctatgcagtcatgtatcctgtgtttaatgagctagaacgagtaaatctgtctgcagcccagacactgagagccgctttcatcaaggctgaaaaagaaaatccaggtctcacacaagacatcattatgaaaattttagagaaaaaaagcgtggaagttaacttcacggagtcccttcttcgtatggcagctgatgatgtagaagagtatatgattgaacgaccagagccagaattccaagacctaaacgaaaaggcacgagcacttaaacaaattctcagtaagatcccagatgagatcaatgacagagtgaggtttctgcagacaatcaaggatatagctagtgcaataaaagaacttcttgatacagtgaataatgtcttcaagaaatatcaataccagaaccgcagggcacttgaacaccaaaagaaagaatttgtaaagtactccaaaagtttcagtgatactctgaaaacgtattttaaagatggcaaggcaataaatgtgttcgtaagtgccaaccgactaattcatcaaaccaacttaatacttcagaccttcaaaactgtggcctgaaagttgtatatgttaagagatgtacttctcagtggcagtattgaactgcctttatctgtaaattttaaagtttgactgtataaattatcagtccctcctgaagggatctaatccaggatgttgaatgggattattgccatcttacaccatatttttgtaaaatgtagcttaatcataatctcacactgaagattttgcatcacttttgctattatcattcttttaagaattataagccaaaagaatttacgccttaatgtgtcattatataacattccttaaaagaattgtaaatattggtgtttgtttctgacattttaacttgaaagcgatatgctgcaagataatgtatttaacaatatttggtggcaaatattcaataaatagtttacatctgttaaacatttctttacttgaaaaaa

SEQ ID NO: 25112 - DNA, 1448 bp, Homo sapiens
tgcacgactccggctgggcaggattccggacaacgcctggttcctcttgggtccttccggcgtcgccggagtgaattgatccgggagttgaagagggctgcaaggtgggaagtgaagtcagtgcctcagttgctggaagaggagcactggaagaaggaagagacaaatgttggggtctacggattcagttccagtttaatgatgtggccctctaaggagataattttgccttaaacagaaagacttgaccctcttaggtgtcatacctaagatcagtgtgttttttgtgtccaattcttttatcaccaaaaaagagaagaaatattgcagtgaatgaagattcctctgcattttagcactgctttttcaactgtagttggcttttgaatgaggatgacaatggaagagatgaagaatgaagctgagaccacatccatggtttctatgcccctctatgcagtcatgtatcctgtgtttaatgagctagaacgagtaaatctgtctgcagcccagacactgagagccgctttcatcaaggctgaaaaagaaaatccaggtctcacacaagacatcattatgaaaattttagagaaaaaaagcgtggaagttaacttcacggagtcccttcttcgtatggcagctgatgatgtagaagagtatatgattgaacgaccagagccagaattccaagacctaaacgaaaaggcacgagcacttaaacaaattctcagtaagatcccagatgagatcaatgacagagtgaggtttctgcagacaatcaaggatatagctagtgcaataaaagaacttcttgatacagtgaataatgtcttcaagaaatatcaataccagaaccgcagggcacttgaacaccaaaagaaagaatttgtaaagtactccaaaagtttcagtgatactctgaaaacgtattttaaagatggcaaggcaataaatgtgttcgtaagtgccaaccgactaattcatcaaaccaacttaatacttcagaccttcaaaactgtggcctgaaagttgtatatgttaagagatgtacttctcagtggcagtattgaactgcctttatctgtaaattttaaagtttgactgtataaattatcagtccctcctgaagggatctaatccaggatgttgaatgggattattgccatcttacaccatatttttgtaaaatgtagcttaatcataatctcacactgaagattttgcatcacttttgctattatcattcttttaagaattataagccaaaagaatttacgccttaatgtgtcattatataacattccttaaaagaattgtaaatattggtgtttgtttctgacattttaacttgaaagcgatatgctgcaagataatgtatttaacaatatttggtggcaaatattcaataaatagtttacatctgttaaacatttctttacttgaaaaaa

SEQ ID NO: 25113 - DNA, 1732 bp, Homo sapiens
tgcacgactccggctgggcaggattccggacaacgcctggttcctcttgggtccttccggcgtcgccggagtgaattgatccgggagttgaagagggctgcaaggtgggaagtgaagtcagtgcctcagttgctggtaaggtgtagctgttctgtcccagtccccgtagctctgcaccgagcagaagaggtctagggtcacgcaggggccatggctgaggcacttgggcttggttctggcaggcggagcggacggggctgagagcggggccctacgggcgtaagcgaggttaccctacgcgagtggcgtaaagcgggtttgtaaatgccgcctgccggcttgggcccgaacgcctccaggaagtctcctctaggtgggggcgggaggggaagggcgaggttggcccctggtgccccgggagaggggacagggcggatgtgcctggggtggggtcctttgaaggtgtggcttcggaccgagagctttctcctctaaatcttggtctcttgtttggaagtgactaacagcattttggcatgagaaagccctaaaaagatcagtgtgttttttgtgtccaattcttttatcaccaaaaaagagaagaaatattgcagtgaatgaagattcctctgcattttagcactgctttttcaactgtagttggcttttgaatgaggatgacaatggaagagatgaagaatgaagctgagaccacatccatggtttctatgcccctctatgcagtcatgtatcctgtgtttaatgagctagaacgagtaaatctgtctgcagcccagacactgagagccgctttcatcaaggctgaaaaagaaaatccaggtctcacacaagacatcattatgaaaattttagagaaaaaaagcgtggaagttaacttcacggagtcccttcttcgtatggcagctgatgatgtagaagagtatatgattgaacgaccagagccagaattccaagacctaaacgaaaaggcacgagcacttaaacaaattctcagtaagatcccagatgagatcaatgacagagtgaggtttctgcagacaatcaaggatatagctagtgcaataaaagaacttcttgatacagtgaataatgtcttcaagaaatatcaataccagaaccgcagggcacttgaacaccaaaagaaagaatttgtaaagtactccaaaagtttcagtgatactctgaaaacgtattttaaagatggcaaggcaataaatgtgttcgtaagtgccaaccgactaattcatcaaaccaacttaatacttcagaccttcaaaactgtggcctgaaagttgtatatgttaagagatgtacttctcagtggcagtattgaactgcctttatctgtaaattttaaagtttgactgtataaattatcagtccctcctgaagggatctaatccaggatgttgaatgggattattgccatcttacaccatatttttgtaaaatgtagcttaatcataatctcacactgaagattttgcatcacttttgctattatcattcttttaagaattataagccaaaagaatttacgccttaatgtgtcattatataacattccttaaaagaattgtaaatattggtgtttgtttctgacattttaacttgaaagcgatatgctgcaagataatgtatttaacaatatttggtggcaaatattcaataaatagtttacatctgttaaacatttctttacttgaaaaaa

SEQ ID NO: 25114 - DNA, 1904 bp, Homo sapiens
tgcacgactccggctgggcaggattccggacaacgcctggttcctcttgggtccttccggcgtcgccggagtgaattgatccgggagttgaagagggctgcaaggtgggaagtgaagtcagtgcctcagttgctggtaaggtgtagctgttctgtcccagtccccgtagctctgcaccgagcagaagaggtctagggtcacgcaggggccatggctgaggcacttgggcttggttctggcaggcggagcggacggggctgagagcggggccctacgggcgtaagcgaggttaccctacgcgagtggcgtaaagcgggtttgtaaatgccgcctgccggcttgggcccgaacgcctccaggaagtctcctctaggtgggggcgggaggggaagggcgaggttggcccctggtgccccgggagaggggacagggcggatgtgcctggggtggggtcctttgaaggtgtggcttcggaccgagaggtgaggctgctgttttccccctgctttgtaagtaagagaaaagggaggaggaaggaaagggtgcttgggagtcggctcttgggggtgactcgggttatgccctttgagggaagaggagcactggaagaaggaagagacaaatgttggggtctacggattcagttccagtttaatgatgtggccctctaaggagataattttgccttaaacagaaagacttgaccctcttaggtgtcatacctaagatcagtgtgttttttgtgtccaattcttttatcaccaaaaaagagaagaaatattgcagtgaatgaagattcctctgcattttagcactgctttttcaactgtagttggcttttgaatgaggatgacaatggaagagatgaagaatgaagctgagaccacatccatggtttctatgcccctctatgcagtcatgtatcctgtgtttaatgagctagaacgagtaaatctgtctgcagcccagacactgagagccgctttcatcaaggctgaaaaagaaaatccaggtctcacacaagacatcattatgaaaattttagagaaaaaaagcgtggaagttaacttcacggagtcccttcttcgtatggcagctgatgatgtagaagagtatatgattgaacgaccagagccagaattccaagacctaaacgaaaaggcacgagcacttaaacaaattctcagtaagatcccagatgagatcaatgacagagtgaggtttctgcagacaatcaaggatatagctagtgcaataaaagaacttcttgatacagtgaataatgtcttcaagaaatatcaataccagaaccgcagggcacttgaacaccaaaagaaagaatttgtaaagtactccaaaagtttcagtgatactctgaaaacgtattttaaagatggcaaggcaataaatgtgttcgtaagtgccaaccgactaattcatcaaaccaacttaatacttcagaccttcaaaactgtggcctgaaagttgtatatgttaagagatgtacttctcagtggcagtattgaactgcctttatctgtaaattttaaagtttgactgtataaattatcagtccctcctgaagggatctaatccaggatgttgaatgggattattgccatcttacaccatatttttgtaaaatgtagcttaatcataatctcacactgaagattttgcatcacttttgctattatcattcttttaagaattataagccaaaagaatttacgccttaatgtgtcattatataacattccttaaaagaattgtaaatattggtgtttgtttctgacattttaacttgaaagcgatatgctgcaagataatgtatttaacaatatttggtggcaaatattcaataaatagtttacatctgttaaacatttctttacttgaaaaaa

SEQ ID NO: 25115 - DNA, 1659 bp, Homo sapiens
tgcacgactccggctgggcaggattccggacaacgcctggttcctcttgggtccttccggcgtcgccggagtgaattgatccgggagttgaagagggctgcaaggtgggaagtgaagtcagtgcctcagttgctggtaaggtgtagctgttctgtcccagtccccgtagctctgcaccgagcagaagaggtctagggtcacgcaggggccatggctgaggcacttgggcttggttctggcaggcggagcggacggggctgagagcggggccctacgggcgtaagcgaggttaccctacgcgagtggcgtaaagcgggtttgtaaatgccgcctgccggcttgggcccgaacgcctccaggaagtctcctctaggtgggggcgggaggggaagggcgaggttggcccctggtgccccgggagaggggacagggcggatgtgcctggggtggggtcctttgaaggtgtggcttcggaccgagagatcagtgtgttttttgtgtccaattcttttatcaccaaaaaagagaagaaatattgcagtgaatgaagattcctctgcattttagcactgctttttcaactgtagttggcttttgaatgaggatgacaatggaagagatgaagaatgaagctgagaccacatccatggtttctatgcccctctatgcagtcatgtatcctgtgtttaatgagctagaacgagtaaatctgtctgcagcccagacactgagagccgctttcatcaaggctgaaaaagaaaatccaggtctcacacaagacatcattatgaaaattttagagaaaaaaagcgtggaagttaacttcacggagtcccttcttcgtatggcagctgatgatgtagaagagtatatgattgaacgaccagagccagaattccaagacctaaacgaaaaggcacgagcacttaaacaaattctcagtaagatcccagatgagatcaatgacagagtgaggtttctgcagacaatcaaggatatagctagtgcaataaaagaacttcttgatacagtgaataatgtcttcaagaaatatcaataccagaaccgcagggcacttgaacaccaaaagaaagaatttgtaaagtactccaaaagtttcagtgatactctgaaaacgtattttaaagatggcaaggcaataaatgtgttcgtaagtgccaaccgactaattcatcaaaccaacttaatacttcagaccttcaaaactgtggcctgaaagttgtatatgttaagagatgtacttctcagtggcagtattgaactgcctttatctgtaaattttaaagtttgactgtataaattatcagtccctcctgaagggatctaatccaggatgttgaatgggattattgccatcttacaccatatttttgtaaaatgtagcttaatcataatctcacactgaagattttgcatcacttttgctattatcattcttttaagaattataagccaaaagaatttacgccttaatgtgtcattatataacattccttaaaagaattgtaaatattggtgtttgtttctgacattttaacttgaaagcgatatgctgcaagataatgtatttaacaatatttggtggcaaatattcaataaatagtttacatctgttaaacatttctttacttgaaaaaa

SEQ ID NO: 25116 - DNA, 1281 bp, Homo sapiens
tgcacgactccggctgggcaggattccggacaacgcctggttcctcttgggtccttccggcgtcgccggagtgaattgatccgggagttgaagagggctgcaagatcagtgtgttttttgtgtccaattcttttatcaccaaaaaagagaagaaatattgcagtgaatgaagattcctctgcattttagcactgctttttcaactgtagttggcttttgaatgaggatgacaatggaagagatgaagaatgaagctgagaccacatccatggtttctatgcccctctatgcagtcatgtatcctgtgtttaatgagctagaacgagtaaatctgtctgcagcccagacactgagagccgctttcatcaaggctgaaaaagaaaatccaggtctcacacaagacatcattatgaaaattttagagaaaaaaagcgtggaagttaacttcacggagtcccttcttcgtatggcagctgatgatgtagaagagtatatgattgaacgaccagagccagaattccaagacctaaacgaaaaggcacgagcacttaaacaaattctcagtaagatcccagatgagatcaatgacagagtgaggtttctgcagacaatcaaggatatagctagtgcaataaaagaacttcttgatacagtgaataatgtcttcaagaaatatcaataccagaaccgcagggcacttgaacaccaaaagaaagaatttgtaaagtactccaaaagtttcagtgatactctgaaaacgtattttaaagatggcaaggcaataaatgtgttcgtaagtgccaaccgactaattcatcaaaccaacttaatacttcagaccttcaaaactgtggcctgaaagttgtatatgttaagagatgtacttctcagtggcagtattgaactgcctttatctgtaaattttaaagtttgactgtataaattatcagtccctcctgaagggatctaatccaggatgttgaatgggattattgccatcttacaccatatttttgtaaaatgtagcttaatcataatctcacactgaagattttgcatcacttttgctattatcattcttttaagaattataagccaaaagaatttacgccttaatgtgtcattatataacattccttaaaagaattgtaaatattggtgtttgtttctgacattttaacttgaaagcgatatgctgcaagataatgtatttaacaatatttggtggcaaatattcaataaatagtttacatctgttaaacatttctttacttgaaaaaa

SEQ ID NO: 25117 - DNA, 873 bp, Homo sapiens
  misc_feature (805)..(805): n is a, c, g, or t
  misc_feature (807)..(807): n is a, c, g, or t
  misc_feature (815)..(815): n is a, c, g, or t
  misc_feature (817)..(817): n is a, c, g, or t
  misc_feature (850)..(850): n is a, c, g, or t
tgcacgactccggctgggcaggattccggacaacgcctggttcctcttgggtccttccggcgtcgccggagtgaattgatccgggagttgaagagggctgcaaggtgggaagtgaagtcagtgcctcagttgctgctttctcctctaaatcttggtctcttgtttggaagtgactaacagcattttggcatgagaaagccctaaaaagatcagtgtgttttttgtgtccaattcttttatcaccaaaaaagagaagaaatattgcagtgaatgaagattcctctgcattttagcactgctttttcaactgtagttggcttttgaatgaggatgacaatggaagagatgaagaatgaagctgagaccacatccatggtttctatgcccctctatgcagtcatgtatcctgtgtttaatgagctagaacgagtaaatctgtctgcagcccagacactgagagccgctttcatcaaggctgaaaaagaaaatccaggtctcacacaagacatcattatgaaaattttagagaaaaaaagcgtggaagttaacttcacggagtcccttcttcgtatggcagctgatgatgtagaagagtatatgattgaacgaccagagccagaattccaagacctaaacgaaaaggcacgagcacttaaacaaattctcagtaagatcccagatgagatcaatgacagagtgaggtttctgcagacaatcaaggatatagctagtgcaataaaagaacttcttgatacagtgaataatgtcttcaagaaatatcaataccagaaccgcaggacaccanangaaagaantntgtaaagtactccagttcagtgatactctgccngactattcatcaaacccaactta

SEQ ID NO: 25118 - DNA, 1486 bp, Homo sapiens
ccatcaatctgtaggctgcatcccttctgctaatccagcaaagaccatgcaggtcagtgaggttgtaaatgtcttaaaatccttatgtcaaatcttgatgaagtaaagaaggaaagagagggtctggagaatgacttgaaatctgtgaattttgacatgacaagcaagtttttgacagccctggctcaagatggtgtgataaatgaagaagctctttctgttactgaactagatcgagtctatggaggtcttacaactaaagtccaagaatctctaaagaaacaggagggacttcttaaaaatattcaggtctcacatcaggaattttcgaaaatgaaacaatctaataatgaagctaacttaagagaagaagttttgaagaatttagctactgcatatgacaactttgtgtagttggcttttgaatgaggatgacaatggaagagatgaagaatgaagctgagaccacatccatggtttctatgcccctctatgcagtcatgtatcctgtgtttaatgagctagaacgagtaaatctgtctgcagcccagacactgagagccgctttcatcaaggctgaaaaagaaaatccaggtctcacacaagacatcattatgaaaattttagagaaaaaaagcgtggaagttaacttcacggagtcccttcttcgtatggcagctgatgatgtagaagagtatatgattgaacgaccagagccagaattccaagacctaaacgaaaaggcacgagcacttaaacaaattctcagtaagatcccagatgagatcaatgacagagtgaggtttctgcagacaatcaaggatatagctagtgcaataaaagaacttcttgatacagtgaataatgtcttcaagaaatatcaataccagaaccgcagggcacttgaacaccaaaagaaagaatttgtaaagtactccaaaagtttcagtgatactctgaaaacgtattttaaagatggcaaggcaataaatgtgttcgtaagtgccaaccgactaattcatcaaaccaacttaatacttcagaccttcaaaactgtggcctgaaagttgtatatgttaagagatgtacttctcagtggcagtattgaactgcctttatctgtaaattttaaagtttgactgtataaattatcagtccctcctgaagggatctaatccaggatgttgaatgggattattgccatcttacaccatatttttgtaaaatgtagcttaatcataatctcacactgaagattttgcatcacttttgctattatcattcttttaagaattataagccaaaagaatttacgccttaatgtgtcattatataacattccttaaaagaattgtaaatattggtgtttgtttctgacattttaacttgaaagcgatatgctgcaagataatgtatttaacaatatttggtggcaaatattcaataaatagtttacatctgttaaacatttctttacttgaaaaaa

SEQ ID NO: 25119 - DNA, 1391 bp, Homo sapiens
  misc_feature (1150)..(1150): n is a, c, g, or t
  misc_feature (1156)..(1156): n is a, c, g, or t
  misc_feature (1161)..(1161): n is a, c, g, or t
  misc_feature (1163)..(1163): n is a, c, g, or t
  misc_feature (1389)..(1391): n is a, c, g, or t
tgcacgactccggctgggcaggattccggacaacgcctggttcctcttgggtccttccggcgtcgccggagtgaattgatccgggagttgaagagggctgcaaggtgggaagtgaagtcagtgcctcagttgctggtaaggtgtagctgttctgtcccagtccccgtagctctgcaccgagcagaagaggtctagggtcacgcaggggccatggctgaggcacttgggcttggttctggcaggcggagcggacggggctgagagcggggccctacgggcgtaagcgaggttaccctacgcgagtggcgtaaagcgggtttgtaaatgccgcctgccggcttgggcccgaacgcctccaggaagtctcctctaggtgggggcgggaggggaagggcgaggttggcccctggtgccccgggagaggggacagggcggatgtgcctggggtggggtcctttgaaggtgtggcttcggaccgagagctttctcctctaaatcttggtctcttgtttggaagtgactaacagcattttggcatgagaaagccctaaaaagatcagtgtgttttttgtgtccaattcttttatcaccaaaaaagagaagaaatattgcagtgaatgaagattcctctgcattttagcactgctttttcaactgtagttggcttttgaatgaggatgacaatggaagagatgaagaatgaagctgagaccacatccatggtttctatgcccctctatgcagtcatgtatcctgtgtttaatgagctagaacgagtaaatctgtctgcagcccagacactgagagccgctttcatcaaggctgaaaaagaaaatccaggtctcacacaagacatcattatgaaaattttagagaaaaaaagcgtggaagttaacttcacggagtcccttcttcgtatggcagctgatgatgtagaagagtatatgattgaacgaccagagccagaattccaagacctaaacgaaaaggcacgagcacttaaacaaattctcagtaagatcccagatgagatcaatgacagagtgaggtttctgcagacaatcaaggatatagctagtgcaataaaagaacttcttgatacagtgaataatgtcttcaagaaatatcaataccagaaccgcaggacggnggcatngaacncnaaagaaaaatggagtccccacagttcggaacccgaacggatctaagagcacggcacaagggtccgtggtgcccggaataccaacataacttcgccctaaagggcgaaggtgtttaaaagatccggaaagacacgtagaaaagaggggaaagccccaggacacaggggagcacacaggagggcacacagagaggcgcaacacgccccctaggcgcgtgacaagatannn

SEQ ID NO: 25120 - DNA, 1513 bp, Homo sapiens
tgcacgactccggctgggcaggattccggacaacgcctggttcctcttgggtccttccggcgtcgccggagtgaattgatccgggagttgaagagggctgcaaggtgggaagtgaagtcagtgcctcagttgctgctttctcctctaaatcttggtctcttgtttggaagtgactaacagcattttggcatgagaaagccctaaaaagatcagtgtgttttttgtgtccaattcttttatcaccaaaaaagagaagaaatattgcagtgaatgaagattcctctgcattttagcactgctttttcaactgtagttggcttttgaatgaggatgacaatggaagagatgaagaatgaagctgagaccacatccatggtttctatgcccctctatgcagtcatgtatcctgtgtttaatgagctagaacgagtaaatctgtctgcagcccagacactgagagccgctttcatcaagggcaaaaaggaaagaaaatcatcagcataatgattaaaattggcaggcatcctacaggaaacaaacatcaagtgtgattacagaatttactgggaaaaactgaaatctgaagattaactctggctttggctgaaaaagaaaatccaggtctcacacaagacatcattatgaaaattttagagaaaaaaagcgtggaagttaacttcacggagtcccttcttcgtatggcagctgatgatgtagaagagtatatgattgaacgaccagagccagaattccaagacctaaacgaaaaggcacgagcacttaaacaaattctcagtaagatcccagatgagatcaatgacagagtgaggtttctgcagacaatcaaggatatagctagtgcaataaaagaacttcttgatacagtgaataatgtcttcaagaaatatcaataccagaaccgcagggcacttgaacaccaaaagaaagaatttgtaaagtactccaaaagtttcagtgatactctgaaaacgtattttaaagatggcaaggcaataaatgtgttcgtaagtgccaaccgactaattcatcaaaccaacttaatacttcagaccttcaaaactgtggcctgaaagttgtatatgttaagagatgtacttctcagtggcagtattgaactgcctttatctgtaaattttaaagtttgactgtataaattatcagtccctcctgaagggatctaatccaggatgttgaatgggattattgccatcttacaccatatttttgtaaaatgtagcttaatcataatctcacactgaagattttgcatcacttttgctattatcattcttttaagaattataagccaaaagaatttacgccttaatgtgtcattatataacattccttaaaagaattgtaaatattggtgtttgtttctgacattttaacttgaaagcgatatgctgcaagataatgtatttaacaatatttggtggcaaatattcaataaatagtttacatctgttaaacatttctttacttgaaaaaa

SEQ ID NO: 25121 - DNA, 1765 bp, Homo sapiens
tgcacgactccggctgggcaggattccggacaacgcctggttcctcttgggtccttccggcgtcgccggagtgaattgatccgggagttgaagagggctgcaaggtgggaagtgaagtcagtgcctcagttgctggtaaggtgtagctgttctgtcccagtccccgtagctctgcaccgagcagaagaggtctagggtcacgcaggggccatggctgaggcacttgggcttggttctggcaggcggagcggacggggctgagagcggggccctacgggcgtaagcgaggttaccctacgcgagtggcgtaaagcgggtttgtaaatgccgcctgccggcttgggcccgaacgcctccaggaagtctcctctaggtgggggcgggaggggaagggcgaggttggcccctggtgccccgggagaggggacagggcggatgtgcctggggtggggtcctttgaaggtgtggcttcggaccgagaggtgaggctgctgttttccccctgctttgtaagtaagagaaaagggaggaggaaggaaagggtgcttgggagtcggctcttgggggtgactcgggttatgccctttgagggaagaggagcactggaagaaggaagagacaaatgttggggtctacggattcagttccagtttaatgatgtggccctctaaggagataattttgccttaaacagaaagacttgaccctcttaggtgtcatacctaagctttctcctctaaatcttggtctcttgtttggaagtgactaacagcattttggcatgagaaagccctaaaaagctagaacgagtaaatctgtctgcagcccagacactgagagccgctttcatcaaggctgaaaaagaaaatccaggtctcacacaagacatcattatgaaaattttagagaaaaaaagcgtggaagttaacttcacggagtcccttcttcgtatggcagctgatgatgtagaagagtatatgattgaacgaccagagccagaattccaagacctaaacgaaaaggcacgagcacttaaacaaattctcagtaagatcccagatgagatcaatgacagagtgaggtttctgcagacaatcaaggatatagctagtgcaataaaagaacttcttgatacagtgaataatgtcttcaagaaatatcaataccagaaccgcagggcacttgaacaccaaaagaaagaatttgtaaagtactccaaaagtttcagtgatactctgaaaacgtattttaaagatggcaaggcaataaatgtgttcgtaagtgccaaccgactaattcatcaaaccaacttaatacttcagaccttcaaaactgtggcctgaaagttgtatatgttaagagatgtacttctcagtggcagtattgaactgcctttatctgtaaattttaaagtttgactgtataaattatcagtccctcctgaagggatctaatccaggatgttgaatgggattattgccatcttacaccatatttttgtaaaatgtagcttaatcataatctcacactgaagattttgcatcacttttgctattatcattcttttaagaattataagccaaaagaatttacgccttaatgtgtcattatataacattccttaaaagaattgtaaatattggtgtttgtttctgacattttaacttgaaagcgatatgctgcaagataatgtatttaacaatatttggtggcaaatattcaataaatagtttacatctgttaaacatttctttacttgaaaaaa

SEQ ID NO: 25122 - DNA, 1233 bp, Homo sapiens
tgcacgactccggctgggcaggattccggacaacgcctggttcctcttgggtccttccggcgtcgccggagtgaattgatccgggagttgaagagggctgcaaggtgggaagtgaagtcagtgcctcagttgctgatcagtgtgttttttgtgtccaattcttttatcaccaaaaaagagaagaaatattgcagtgaatgaagattcctctgcattttagcactgctttttcaactgtagttggcttttgaatgaggatgacaatggaagagatgaagaatgaagctgagaccacatccatggtttctatgcccctctatgcagtcatgtatcctgtgtttaatgagctagaacgagtaaatctgtctgcagcccagacactgagagccgctttcatcaaggctgaaaaagaaaatccaggtctcacacaagacatcattatgaaaattttagagaaaaaaagcgtggaagttaacttcacggagtcccttcttcgtatggcagctgatgatgtagaagagtatatgattgaacgaccagagccagaattccaagacctaaacgaaaaggcacgagcacttaaacaaattctcagtaagatcccagatgagatcaatgacagagtgaggtttctgcagacaatcaagcacttgaacaccaaaagaaagaatttgtaaagtactccaaaagtttcagtgatactctgaaaacgtattttaaagatggcaaggcaataaatgtgttcgtaagtgccaaccgactaattcatcaaaccaacttaatacttcagaccttcaaaactgtggcctgaaagttgtatatgttaagagatgtacttctcagtggcagtattgaactgcctttatctgtaaattttaaagtttgactgtataaattatcagtccctcctgaagggatctaatccaggatgttgaatgggattattgccatcttacaccatatttttgtaaaatgtagcttaatcataatctcacactgaagattttgcatcacttttgctattatcattcttttaagaattataagccaaaagaatttacgccttaatgtgtcattatataacattccttaaaagaattgtaaatattggtgtttgtttctgacattttaacttgaaagcgatatgctgcaagataatgtatttaacaatatttggtggcaaatattcaataaatagtttacatctgttaaacatttctttacttgaaaaaa

SEQ ID NO: 25123 - DNA, 821 bp, Homo sapiens
gggcgttctagaggatcccgggcagaagagtatatgattgaacgaccagagccagaattccaagacctaaacgaaaaggcacgagcacttaaacaaattctcagtaagatcccagatgagatcaatgacagagtgaggtttctgcagacaatcaaggatatagctagtgcaataaaagaacttcttgatacagtgaataatgtcttcaagaaatatcaataccagaaccgcagggcacttgaacaccaaaagaaagaatttgtaaagtactccaaaagtttcagtgatactctgaaaacgtattttaaagatggcaaggcaataaatgtgttcgtaagtgccaaccgactaattcatcaaaccaacttaatacttcagaccttcaaaactgtggcctgaaagttgtatatgttaagagatgtacttctcagtggcagtattgaactgcctttatctgtaaattttaaagtttgactgtataaattatcagtccctcctgaagggatctaatccaggatgttgaatgggattattgccatcttacaccatatttttgtaaaatgtagcttaatcataatctcacactgaagattttgcatcacttttgctattatcattcttttaagaattataagccaaaagaatttacgccttaatgtgtcattatataacattccttaaaagaattgtaaatattggtgtttgtttctgacattttaacttgaaagcgatatgctgcaagataatgtatttaacaatatttggtggcaaatattcaataaatagtttacatctgttaaacatttctttacttgaaaaaa

SEQ ID NO: 25124 - DNA, 764 bp, Homo sapiens
tgcacgactccggctgggcaggattccggacaacgcctggttcctcttgggtccttccggcgtcgccggagtgaattgatccgggagttgaagagggctgcaaggtgggaagtgaagtcagtgcctcagttgctgctttctcctctaaatcttggtctcttgtttggaagtgactaacagcattttggcatgagaaagccctaaaaagatcagtgtgttttttgtgtccaattcttttatcaccaaaaaagagaagaaatattgcagtgaatgaagattcctctgcattttagcactgctttttcaactgtagttggcttttgaatgaggatgacaatggaagagatgaagaatgaagctgagaccacatccatggtttctatgcccctctatgcagtcatgtatcctgtgtttaatgagctagaacgagtaaatctgtctgcagcccagacactgagagccgctttcatcaaggctgaaaaagaaaatccaggtctcacacaagacatcattatgaaaattttagagaaaaaaagcgtggaagttaacttcacggagtcccttcttcgtatggcagctgatgatgtagaagagtatatgattgaacgaccagagccagaattccaagacctaaacgaaaaggcacgagcacttaaacaaattctcagtaagatcccagatgagatcaatgacagagtgaggtttctgcagacaatcaaaggggcggaacagcagagaggggcggagcaggggtaccgagctcg

SEQ ID NO: 25125 - DNA, 1205 bp, Homo sapiens
  misc_feature (125)..(125): n is a, c, g, or t
aaccgtgcatagtatcgcaaggtagtaacacccgtatacctgctgcatagatgaaatcagctacacataagtttgtcaggggatccaaagtttacaaccctgtaaatcagccgagactagataangaaatatctgaaagatgagactagaacccagtcctactgtcagtaataatcaatgggtaagatcaattaggtataggctattgaattgagggatgactgtgggatggactagtgtatgtcctgagattgaatacttaacatccatgtttatctttggccctctgatgccgtctatgtatcctgtgtttaatgagctagaacgagtaaatctgtctgcagcccagacactgagagccgctttcatcaaggctgaaaaagaaaatccaggtctcacacaagacatcattatgaaaattttagagaaaaaaagcgtggaagttaacttcacggagtcccttcttcgtatggcagctgatgatgtagaagagtatatgattgaacgaccagagccagaattccaagacctaaacgaaaaggcacgagcacttaaacaaattctcagtaagatcccagatgagatcaatgacagagtgaggtttctgcagacaatcaagcacttgaacaccaaaagaaagaatttgtaaagtactccaaaagtttcagtgatactctgaaaacgtattttaaagatggcaaggcaataaatgtgttcgtaagtgccaaccgactaattcatcaaaccaacttaatacttcagaccttcaaaactgtggcctgaaagttgtatatgttaagagatgtacttctcagtggcagtattgaactgcctttatctgtaaattttaaagtttgactgtataaattatcagtccctcctgaagggatctaatccaggatgttgaatgggattattgccatcttacaccatatttttgtaaaatgtagcttaatcataatctcacactgaagattttgcatcacttttgctattatcattcttttaagaattataagccaaaagaatttacgccttaatgtgtcattatataacattccttaaaagaattgtaaatattggtgtttgtttctgacattttaacttgaaagcgatatgctgcaagataatgtatttaacaatatttggtggcaaatattcaataaatagtttacatctgttaaacatttctttacttgaaaaaa

SEQ ID NO: 25126 - DNA, 1380 bp, Homo sapiens
tgcacgactccggctgggcaggattccggacaacgcctggttcctcttgggtccttccggcgtcgccggagtgaattgatccgggagttgaagagggctgcaaggtgggaagtgaagtcagtgcctcagttgctggtaaggtgtagctgttctgtcccagtccccgtagctctgcaccgagcagaagaggtctagggtcacgcaggggccatggctgaggcacttgggcttggttctggcaggcggagcggacggggctgagagcggggccctacgggcgtaagcgaggttaccctacgcgagtggcgtaaagcgggtttgtaaatgccgcctgccggcttgggcccgaacgcctccaggaagtctcctctaggtgggggcgggaggggaagggcgaggttggcccctggtgccccgggagaggggacagggcggatgtgcctggggtggggtcctttgaaggtgtggcttcggaccgagaggtgaggctgctgttttccccctgctttctttctcctctaaatcttggtctcttgtttggaagtgactaacagcattttggcatgagaaagccctaaaaagatcagtgtgttttttgtgtccaattcttttatcaccaaaaaagagaagaaatattgcagtgaatgaagattcctctgcattttagcactgctttttcaactgtagttggcttttgaatgaggatgacaatggaagagatgaagaatgaagctgagaccacatccatggtttctatgcccctctatgcagtcatgtatcctgtgtttaatgagctagaacgagtaaatctgtctgcagcccagacactgagagccgctttcatcaaggctgaaaaagaaaatccaggtctcacacaagacatcattatgaaaattttagagaaaaaaagcgtggaagttaacttcacggagtcccttcttcgtatggcagctgatgatgtagaagagtatatgattgaacgaccagagccagaattccaagacctaaacgaaaaggcacgagcacttaaacaaattctcagtaagatcccagatgagatcaatgacagagtgaggtttctgcagacaatcaaggatatagctagttgcacataaaaaagaaacttcttgataccaggtggaataagttgtctttcacaggaaaattatcaattacccagaacccggcagggcacttggaacaccgcacaaaggaaaggaatttgggtagacagttacttcccaaacagtttccaggtggatacctcctgggaaacggtaatttttaacagaatgggcagggggcactaactgtgttttcgaaagttgcccaaccgaattaagtttgattcaagagccacgtttaattatcttccggaac

SEQ ID NO: 25127 - DNA, 615 bp, Homo sapiens
ggttggcaacctttggtcagcagtgcaagagaatcaggattacagaggggtataggctaaaatccccactccaaccagctagccgaaaaggctggctgttcttgaagtgattgcgcttaacataattaagagtgtactgtgattagattaagagtgtacttaatttctttcaaatgtagctgatgttcttttctctcacaaatttctttcaaatgtagctgatattctttattcttttcccaacaggatatagctagtgcaataaaagaacttcttgatacagtgaataatgtcttcaagaaatatcaataccagaaccgcaggggtacgtttagtagaagccttgctagttgacaccctagatgttggtttatgcctagttgttttattgacttaaaaataagattgattgttggaaatagttttgtgtcattaaccattgagtttattcttgaatttaaatatgcctttttatttaaaagtgagtactccacaattgcttattagtaatattcatataaagtgcatcccatatcctgtgtaatctcttgtccttgcctttggcttttgtgattatttctcttatttagtactttatttcttattatattttgt

SEQ ID NO: 25128 - DNA, 1521 bp, Homo sapiens
tgcacgactccggctgggcaggattccggacaacgcctggttcctcttgggtccttccggcgtcgccggagtgaattgatccgggagttgaagagggctgcaaggtgggaagtgaagtcagtgcctcagttgctggaagaggagcactggaagaaggaagagacaaatgttggggtctacggattcagttccagtttaatgatgtggccctctaaggagataattttgccttaaacagaaagacttgaccctcttaggtgtcatacctaagctttctcctctaaatcttggtctcttgtttggaagtgactaacagcattttggcatgagaaagccctaaaaagatcagtgtgttttttgtgtccaattcttttatcaccaaaaaagagaagaaatattgcagtgaatgaagattcctctgcattttagcactgctttttcaactgtagttggcttttgaatgaggatgacaatggaagagatgaagaatgaagctgagaccacatccatggtttctatgcccctctatgcagtcatgtatcctgtgtttaatgagctagaacgagtaaatctgtctgcagcccagacactgagagccgctttcatcaaggctgaaaaagaaaatccaggtctcacacaagacatcattatgaaaattttagagaaaaaaagcgtggaagttaacttcacggagtcccttcttcgtatggcagctgatgatgtagaagagtatatgattgaacgaccagagccagaattccaagacctaaacgaaaaggcacgagcacttaaacaaattctcagtaagatcccagatgagatcaatgacagagtgaggtttctgcagacaatcaaggatatagctagtgcaataaaagaacttcttgatacagtgaataatgtcttcaagaaatatcaataccagaaccgcagggcacttgaacaccaaaagaaagaatttgtaaagtactccaaaagtttcagtgatactctgaaaacgtattttaaagatggcaaggcaataaatgtgttcgtaagtgccaaccgactaattcatcaaaccaacttaatacttcagaccttcaaaactgtggcctgaaagttgtatatgttaagagatgtacttctcagtggcagtattgaactgcctttatctgtaaattttaaagtttgactgtataaattatcagtccctcctgaagggatctaatccaggatgttgaatgggattattgccatcttacaccatatttttgtaaaatgtagcttaatcataatctcacactgaagattttgcatcacttttgctattatcattcttttaagaattataagccaaaagaatttacgccttaatgtgtcattatataacattccttaaaagaattgtaaatattggtgtttgtttctgacattttaacttgaaagcgatatgctgcaagataatgtatttaacaatatttggtggcaaatattcaataaatagtttacatctgttaaacatttctttacttgaaaaaa

SEQ ID NO: 25129 - DNA, 1323 bp, Homo sapiens
tgcacgactccggctgggcaggattccggacaacgcctggttcctcttgggtccttccggcgtcgccggagtgaattgatccgggagttgaagagggctgcaaggtgggaagtgaagtcagtgcctcagttgctgctttctcctctaaatcttggtctcttgtttggaagtgactaacagcattttggcatgagaaagccctaaaaagatcagtgtgttttttgtgtccaattcttttatcaccaatgtagttggcttttgaatgaggatgacaatggaagagatgaagaatgaagctgagaccacatccatggtttctatgcccctctatgcagtcatgtatcctgtgtttaatgagctagaacgagtaaatctgtctgcagcccagacactgagagccgctttcatcaaggctgaaaaagaaaatccaggtctcacacaagacatcattatgaaaattttagagaaaaaaagcgtggaagttaacttcacggagtcccttcttcgtatggcagctgatgatgtagaagagtatatgattgaacgaccagagccagaattccaagacctaaacgaaaaggcacgagcacttaaacaaattctcagtaagatcccagatgagatcaatgacagagtgaggtttctgcagacaatcaaggatatagctagtgcaataaaagaacttcttgatacagtgaataatgtcttcaagaaatatcaataccagaaccgcagggcacttgaacaccaaaagaaagaatttgtaaagtactccaaaagtttcagtgatactctgaaaacgtattttaaagatggcaaggcaataaatgtgttcgtaagtgccaaccgactaattcatcaaaccaacttaatacttcagaccttcaaaactgtggcctgaaagttgtatatgttaagagatgtacttctcagtggcagtattgaactgcctttatctgtaaattttaaagtttgactgtataaattatcagtccctcctgaagggatctaatccaggatgttgaatgggattattgccatcttacaccatatttttgtaaaatgtagcttaatcataatctcacactgaagattttgcatcacttttgctattatcattcttttaagaattataagccaaaagaatttacgccttaatgtgtcattatataacattccttaaaagaattgtaaatattggtgtttgtttctgacattttaacttgaaagcgatatgctgcaagataatgtatttaacaatatttggtggcaaatattcaataaatagtttacatctgttaaacatttctttacttgaaaaaa

SEQ ID NO: 25130 - DNA, 866 bp, Homo sapiens
tgcacgactccggctgggcaggattccggacaacgcctggttcctcttgggtccttccggcgtcgccggagtgaattgatccgggagttgaagagggctgcaaggtgggaagtgaagtcagtgcctcagttgctgaaagacttgaccctcttaggtgtcatacctaagatcagtgtgttttttgtgtccaattcttttatcaccaaaaaagagaagaaatattgcagtgaatgaagattcctctgcattttagcactgctttttcaactgtagttggcttttgaatgaggatgacaatggaagagatgaagaatgaagctgagaccacatccatggtttctatgcccctctatgcagtcatgtatcctgtgtttaatgagctagaacgagtaaatctgtctgcagcccagacactgagagccgctttcatcaaggctgaaaaagaaaatccaggtctcacacaagacatcattatgaaaattttagagaaaaaaagcgtggaagttaacttcacggagtcccttcttcgtatggcagctgatgatgtagaagagtatatgattgaacgaccagagccagaattccaagacctaaacgaaaaggcacgagcacttaaacaaattctcagtaagatcccagatgagatcaatgacagagtgaggtttctgcagacaatcaaggatatagctagtgcaataaaagaacttcttgatacagtgaataatgtcttcaagaaatatcaataccagaaccgcagggcacttgaacaccaaaagaaagaatttgtaaagtactccaaaagtttcagtgatactctgaaaacgtattttaaagatggcaagtaagtactgtaatttatcctttac

SEQ ID NO: 25131 - DNA, 1240 bp, Homo sapiens
tgcacgactccggctgggcaggattccggacaacgcctggttcctcttgggtccttccggcgtcgccggagtgaattgatccgggagttgaagagggctgcaaggtgggaagtgaagtcagtgcctcagttgctgtgtagttggcttttgaatgaggatgacaatggaagagatgaagaatgaagctgagaccacatccatggtttctatgcccctctatgcagtcatgtatcctgtgtttaatgagctagaacgagtaaatctgtctgcagcccagacactgagagccgctttcatcaaggctgaaaaagaaaatccaggtctcacacaagacatcattatgaaaattttagagaaaaaaagcgtggaagttaacttcacggagtcccttctcctttcgataactggggccaaggccccttgcactgcactgctacgaaacgcagcagtatatgattgaacgaccagagccagaattccaagacctaaacgaaaaggcacgagcacttaaacaaattctcagtaagatcccagatgagatcaatgacagagtgaggtttctgcagacaatcaaggatatagctagtgcaataaaagaacttcttgatacagtgaataatgtcttcaagaaatatcaataccagaaccgcagggcacttgaacaccaaaagaaagaatttgtaaagtactccaaaagtttcagtgatactctgaaaacgtattttaaagatggcaaggcaataaatgtgttcgtaagtgccaaccgactaattcatcaaaccaacttaatacttcagaccttcaaaactgtggcctgaaagttgtatatgttaagagatgtacttctcagtggcagtattgaactgcctttatctgtaaattttaaagtttgactgtataaattatcagtccctcctgaagggatctaatccaggatgttgaatgggattattgccatcttacaccatatttttgtaaaatgtagcttaatcataatctcacactgaagattttgcatcacttttgctattatcattcttttaagaattataagccaaaagaatttacgccttaatgtgtcattatataacattccttaaaagaattgtaaatattggtgtttgtttctgacattttaacttgaaagcgatatgctgcaagataatgtatttaacaatatttggtggcaaatattcaataaatagtttacatctgttaaacatttctttacttgaaaaaa

SEQ ID NO: 25132 - DNA, 237 bp, Homo sapiens
tttttagtagagacgggatttcaccatgttggccaggctggtctcaaactcctaacctcaagtgatccaccggccttggcctcccaaagtggtacgattacaggcatgatgcacggtgccaggccagcagagttgtttgtttgcttaaaatatcctatttacagctgggcatggtggctcacgcctgcaatcccagtactttgggaggccgaggtgggcgaatcgcgaggtcaggag

SEQ ID NO: 25133 - DNA, 388 bp, Homo sapiens
actctagaggtttactcatttttctgcattatctcccatgtgtacaggaagtatacatgttattaagcttttgtttgctttcccttgttaatctaccttttgttacagggagtcccagctaaaaattcttgaagagtgaaggagaagattatttttttccccctacagaaataagttttatcaggataaactgcagttatagctgcaagccttattaggagagaatcaaaaaagagggagttaattaacatggtcaataaagttggaaaaagatcccagccagattcacaaaggcaaagtggagcagtgctcataactctcaacctgtaggttaaaattacctagtgatcttactaaaatgcagaatctgattcagtaggtctgggtc

SEQ ID NO: 25134 - DNA, 227 bp, Homo sapiens
tggaatggaagggaggttcttctgtttttctaagaattcagagaaaggagaaaaggagaagtgagagtgaagacataataaaaatttcagattgtgaaggggaaaatttatggaaaccattcctctgcgtgagagttttagaattcgctttggggcttaaaaagtggagaaaggtttagagctgcccttatggaaatgagataggaaatgaccttgatgaatgatgg

SEQ ID NO: 25135 - DNA, 209 bp, Homo sapiens
gggctttaggtctcagttttccttttctggaacaggaaaagggagatctgcctgtcaccctcctttccagcctgctttcagtattctcaagctgaagcatttgagcaggaagaacatggaccactgcagcgctgcctccatggggcattgctaccctgacctgcttcatgcacttccccaaaatagctccaaatcatgcttgcttcctg

SEQ ID NO: 25136 - DNA, 287 bp, Homo sapiens
gatccaactgtatggcttctgaggtgtcttctggtaagtctgtgttttgtgacttttagggaaaccacctaatgtttttgaatttgctttttcttaactacactgggaaatacggtggattcattctggtacagtggatctccaccttagctgtactttagaatctcctaggtagattttttttaagtgtgcagtctatgtatatgagtgtgcgtgtgtgcacacacacagccagagttgagacacactagcctagaaatgtccaagagccagtgagtatattaaga

SEQ ID NO: 25137 - DNA, 808 bp, Homo sapiens
tgggagtgggtctctatttcttttctgcaatttacatttaaagcagagtttaccctggaattctgaaggtttcggtgttgaggtatggtttgcattttagaaattcattttggaaatgtgaagatgtcttctatgcggcttgaaagcccgtctgacgttcacaagctgtatggctcaggtcttcagtgcctgaaggttatacagcaaacccaccttgactttgacttcggagtcttttcctcctgaagccaaatctgtttcagcattctggtctcgttaattctcatggtgacagtatattaatatgagccaaagagaaaataaaattcactgaaagaaaataaggctgagcctcattacgcctgtaatcccagcactttgggaggccgaggcgggtggatcatctgaggtcaggagttcaagaccagcctggccaacatggtgaaacccccgtctctacgaaaaatacaaaaattagccaggagtggtggcacacgcctgtaatcccagctactctggtggctgaggcaggaaaatctcttgaacctgggaggctgaggttgcagtgagctgagattgcgccactgcactccagcctgggcgacagagtgagactccatctcaaaaaaaaaaaaaaagagagaaaatgagaataaataagcagccattccacctcttgggtcaaagcttccaaatttgctttttctccaaggagtggcagccacagcaaaacatcttctgcagcgtctggccagggcgttactccagcccagttttgccctggactagattgagtcaggtcgtgcat

SEQ ID NO: 25138 - DNA, 388 bp, Homo sapiens
tacgattttactttttgaatacactgactctaaacatattttaatccacatgttaagccatctcaaataatttcttttaaacttccatagaattttatagaaagttgaagttacactgtgtgatattggaaagacacttgtccatttgttgaacagacattcattatgtgccaggctttgagctggaaagtacaagtcaagtaacaagtcactgtctttgaataacttacatctgttctaggagagaaataaatgatttatttcagtggaccttctgcattctgaattattctgtaaaataaagaataattcatacctacttgaatttttaatagctatttgaatcaaaatattaaaaatggaagggcccttaaagatcatgtaattc

SEQ ID NO: 25139 - DNA, 239 bp, Homo sapiens
cacttatgcccatgcaacgtcatttggtggtaactgaaatacgatacattgatttttaatttctaaagctcttctagataaaggcagcaacatcgatcttcaaaagatgttttaaactagaggttaggccgggcgcggtggctcacgcctgtaatcccagcactttgggaggccgaggcgggcgtatcacaagggctggagatcgagaccatcctggctaacacagtgaaaccccgtct

SEQ ID NO: 25140 - DNA, 408 bp, Homo sapiens
gagcaaaatccttaccaaggtcaccatgggatttgattcctaagtcctcagtcttcactattctaagttattgacttgctcatctaaatccaacctaaattcaaatgcatgttgctggtttgatcagaatcaagaaatttgcttactctgcaattagtcatcggatttgcctctgaacatgtatgtagagatggttcactcttttgtactggtaaaggctgaagacaaaaagaaaatctcaccttttgtcccttgaaagaaaaagcttttcccattccagaagaccatggtatagtttccttaaaaactagctgtgtttcaaactcaaatgactcttgctgtggttgatgaaaagcacaatattccttctctcttcctgtaggaatgcagaaataggaaaacagaaag

SEQ ID NO: 25141 - DNA, 739 bp, Homo sapiens
cttgtgtatggtggtttaggggaatttaaaaggaaagatggcagtttttatataaagcaactgacatactgtctccatacgtgcttcaagttgtttttgcaacaagggtggtgatttacgtagaaccgtcagtggttcagagctgctgtaacaaaggtaactctaaagccagttaacctccatggggatcagtcagacccatcattgttcctgtcttgacctctgtgctctaataaacttccctaaatactactttagctgctgtgtgttatatctacattaatagctaaattagcctgaaggcctaattaatattcagtgtaatttaatacagggaaacaggcccctcttctcaaccctttatagtatgaagaaattttaaattaccctggtcagtgaacaaactccctctgtcaaatatagtcatgatagacctggcacaatgtagggactatggggagtgttagaggatcaaagacagaattggggaaggggtatagttactggatgttacttgttctgtgagagatgtgtggatgttctataagaaaataataatgttttttgtttgtatttaaaactagatagctgtttattggcacccttttagttggataagagaaaatacattgcttggtttctacaagtgagtcttagcaaatttattgtagttattttaggaagagtaattgatagtgcagtaatcttcagtttttaaaaagccctgataaggtttaac

SEQ ID NO: 25142 - DNA, 505 bp, Homo sapiens
cctcccaaagtgctgggattacagatgtgtgccactgcgcctggcctattcttccttgtgagtgattttagtgtattaataatttaaaatgtcaaaagcctatttctcctaacctagaaaagaaactggattattccgataaaagcctgttttagaaaaggatgagaaaatttaggaactgttgtgatgattcttagatcagagtagttaagtggagccagtgttgtgctggaactggttagctgattgtgcctctctctccagctccatgttcagtgacatcatgttagtagcttgaaactggccatggtgggacatttacagcatggcagactgcagaagctacaaatcaggggcccttttctcaaagaggtggtcaaatatttatcagcagaccactggcagtgggaccatatgaaattgttgtttttatagacaaaaaaaatgcttgaatattggcagttcctttcctttcctctcccctcccctcccccctcccctcccc

SEQ ID NO: 25143 - DNA, 153 bp, Homo sapiens
cctggcctcaagtgatctgcctcctttggcctcccaaagtgccgggattacaggtgtgagccactgcgcccgactgagagtcaggcttgtaaaaccggtaagaccaagagcagctaggcaggtcaagggtcacaggtacaggctgatgtggac

SEQ ID NO: 25144 - DNA, 669 bp, Homo sapiens
agtcagcattgcttcagtattgacagtgggccgcaaagcacttaccagtgggaagcaaggaaatgatggctgaagcaaggaatgaatgctgttatttcttaccagcagataggtacacaccacttgctggaatgattcagcaatttaaagttaagagctttgagacttcatgagttacacacggggagcataggaaccaggagggtcagctctgttggaatacttctgggattgctctgttccctcctgctttgaatcacaagctgatgtgcagttgtaggctttttcttctttttctcctcactcctaatcttatccccaaggatccttgactatttataatagagtattctagacagcagcaggtaaaaattctcaggtgctggggggccaggggaggggaagggagggtaaagaaggtgtttcatctatcccttcagtgtttacggtacttccatcttttaaaagtgacattattctattccaccttgtctccctggaaaaaagcaggcctcttgtctggatcttttcgttttaatgatttccatgaaaaggcttttacccaggctctgacatgactgtcagaacacacatttaaatgtgaaactgcttaaaaggccattgatattccctggtggtaaagaaagtgctcttaaaaaaaaaaacaac

SEQ ID NO: 25145 - DNA, 356 bp, Homo sapiens
ggtgctgctgtgatttgaatgtgtcccctccaaaatccagttgttgccggtttgatagtattaagatatggggcctttgagagatggttaggcagtgagggctccaccctcgtgaatgggattaggtgcccttgtaaaggggcttgacagaggggattttatcccccttatgccctccgacttctaccatgtgaggacacattgttcctcccctccagacgatgcaatgttcaaggtgccgcttggaaacagagacccagcctccaccagacgctgaccctgctgatgtcctgatcttggactctcagccaccagaactgtgggaaaataaatttctgttctttataagttaccca

SEQ ID NO: 25146 - DNA, 618 bp, Homo sapiens
cagttctgcctatattttccctggatctgtttttattttgtaactaattttaaaatttttcttttattacattgttcacattctggtgagatgcctcaaatcctttgtgcaagaagactaggtagacaaaattaagctagtcagcagtggccacaaaacattctgaaaaaagagaatattaccatgaaccattctaattgcaggaggctttaatagaaaattgcaatttttatagcctccctccatatggcatgtaagtccttctcttcacacaattcctttagccataagatgctgactgtgagtccccaagacaacaatcttagcaaacttagctgctatagagaggaatgctgctagacttcaggacctctgagatctcttccacctgggtttcccttagactgaggtcacttatgtaatagcttgaggtttattaaatattgaaagtaatattctctaacgacagcacaactgcaagcaacactgaaaatcctgaagagtttaaaaggtttatgtggagatgtatctctagcacaacagagaacttgtggccatttaattatgtgaaaagaagcctctagaaagacaaatttcaattactataaaagcttttcc

SEQ ID NO: 25147 - DNA, 154 bp, Homo sapiens
tatttttttagttttggaattaatcctactctcctgttattttagctatgaatacatgtaacactcctagatcttgggctgatctcctgattgagaagacagcctgactctgcacttcagaactctattcaggccccaagttctttctttcttc

SEQ ID NO: 25148 - DNA, 808 bp, Homo sapiens
gcaatagcatcctttaagaactcattagaaatgtgaattttagggcctgatcccagactacagactacagaaattgaacagtctgttttaataagtcctctagatgattctgctatacaccaacatttgagaacactgtgacttacacaattatgatccttaagggaatagccaagtttctaaaaaagataacttagttctaactcctgctgctgttttacagatcaaatctctggagacagaaactattctcttaaaattatgtagattcatgagtttggttaaggataaatgtacatagctcacatcccctcagtctctccctatagtcccaaagttgttggagcagggaatctgtagagtattgatttaaattgattaaggttacatgtttatgaaactctaagagactagttttagaaatttcactgtaatttctgctgggataaatttgttagcctgggatatcttccaaagataaggcggatgctcaaatatgtgtaaattcatgcaactgttaacagagactgtgctgtaaggagtacttatgtcctatagtaattttattaaacaaatacatgtatgtctccttttgatgtgtacagaaatatactgtttaatctgaagaagctgattgaaacaggaaaaatttaaaaagtaaaaacactcaacccatgtaatactttatttttataacaaggtgttctctttaatacgcctattagattatcctgaagttctctatttactcttactttaaaaaaaatccaatgaaagaaaatttcagtaaagtttgttttgctagaag

SEQ ID NO: 25149 - DNA, 1197 bp, Homo sapiens
tactgtgcgagggtcaacaaggtataaaggtaatgtgggcaagggtctgttggtctgctgaaacagcggccgcttggaaaaaggcaaacatttagactttgtcccaggcctgatcttcccaccaacttagcctcctcctgcctctaccccggctggtgttcacattgacctcgtccaatttttgcctctctaaatctcaagagtcctacacatcttcaccgcagcttcccacacatcattaaaaccagccatctgcacatagactgagaggctgcaaattcaaacacatggaggggccggatccagaaaacacaaatgtgtgaactggactggtgaaagtcaacagaagtagggtttgtaagtaaggcatgacagaatacacatcccaccacaaacaccttcaaattcagctttccaaacactgtcctagccaaacaaacatgtctgccagcagcattcagtcccaaaggcaatagtttgggacctctgatttagagccaacaggatcagattcttgatagtgacttggtgagtgtacacacaaaatacactgagaaccgagaggggggaaaagaaactcgccttattcagagttactcttgttctgaatgatatatgcatgtatatttgttagccacataattctaaacttgaacacagagtctttgtgagagagattcagaagaagagtaccatagcatggtatgaagacttacctgcttcctgtcactactgcgtctgacctgagtttatattgctgctaccgctgtgtaaaaacagtacgtgcagtatactgtactcatagccatttcataatataggacctagactctcatttgtaaacgttctaaccctagtttataatgggggaaattattcagatatcatttttaaatgaattcctacaaatacaatggttttaaaattgggtttgctgaatatatatacatcttttccttctttgtgtatggatagaccacggtatgcatatctatcgacactataaatatatataaatccttagaagaattgttcttttttaaaggtctattattggattcacaatgcactttgagtttgattgtttagatatacaattcagagcagaagttggcagataccacgggaaaaactttctgaaatttctgtaacaaatgttttgcaataaaaaaaaaaactcagtagtttaaaacatga

SEQ ID NO: 25150 - DNA, 1649 bp, Homo sapiens
cttttaattcctctcagaaggtagttgtgttaccttttctctgatgatttccttgcactcatcactgctaatgaaagcaacgtgactgtttctacaggtcatctaagagaggattttggtgaccaggtaatccagatggcaataagaatgaggtgaattttcccttccttaccttacctagtctaccagcctccttaaacctgcaggcccttgtgcgtttgcacaatgtttgtgtgctggaaactgaaaagacatgtgtatggctagaagtccataggctttgtaaagagtgtcagtgccaatcaggacccatgccttcctctggaggagacaggtggctgaggcctatggggcaaagggggaaattcagccttgtgcctggatgtgcggctttctttctcccctcttcttgcttctcttctcttagtctaagactagctgctttttcaccagaccaacagacccttgcccacattacctttataccttgttgaccctcgcacagtaagctgaaacagcggccgcttggaaaaaggcaaacatttagactttgtcccaggcctgatcttcccaccaacttagcctcctcctgcctctaccccggctggtgttcacattgacctcgtccaatttttgcctctctaaatctcaagagtcctacacatcttcaccgcagcttcccacacatcattaaaaccagccatctgcacatagactgagaggctgcaaattcaaacacatggaggggccggatccagaaaacacaaatgtgtgaactggactggtgaaagtcaacagaagtagggtttgtaagtaaggcatgacagaatacacatcccaccacaaacaccttcaaattcagctttccaaacactgtcctagccaaacaaacatgtctgccagcagcattcagtcccaaaggcaatagtttgggacctctgatttagagccaacaggatcagattcttgatagtgacttggtgagtgtacacacaaaatacactgagaaccgagaggggggaaaagaaactcgccttattcagagttactcttgttctgaatgatatatgcatgtatatttgttagccacataattctaaacttgaacacagagtctttgtgagagagattcagaagaagagtaccatagcatggtatgaagacttacctgcttcctgtcactactgcgtctgacctgagtttatattgctgctaccgctgtgtaaaaacagtacgtgcagtatactgtactcatagccatttcataatataggacctagactctcatttgtaaacgttctaaccctagtttataatgggggaaattattcagatatcatttttaaatgaattcctacaaatacaatggttttaaaattgggtttgctgaatatatatacatcttttccttctttgtgtatggatagaccacggtatgcatatctatcgacactataaatatatataaatccttagaagaattgttcttttttaaaggtctattattggattcacaatgcactttgagtttgattgtttagatatacaattcagagcagaagttggcagataccacgggaaaaactttctgaaatttctgtaacaaatgttttgcaataaaaaaaaaaactcagtagtttaaaacatga

SEQ ID NO: 25151 - DNA, 401 bp, Homo sapiens
gaaaaatacacacttgaagtccacagcccatgactgaatctgctagatgatgactcggtggttgctgaggaatttaatcatctggaccatgtccttccctagttaattttcaacccagatgatcatatctcctgttccgggcagacacatttctggcgctaagaccagggcccctattcagccttagtggataattcaacctcctgagaggcactgcagaagcacctgggccaagattgctttcctcttctacgcctatcccaggaatgtggccactgctcaaaatgtgggaattcccttccagaattccccttgaagctgctgcacgcttcttagaccacgtctgagcaatgcctgcatcactagaatatttggcctcagttgggtttgtttctttaaaa

SEQ ID NO: 25152 - DNA, 519 bp, Homo sapiens
agacaggatctcactgtcacccaggctggaatgcagcagcgctatcacagctcactgctgcctggacttcccgggcacaggtgattctcccacctcagcctcccaggtagctgggactacaggtgcataccaccatgcccagttaattttttgtatttttcatagagacagggtttcaccatgttgctcaagttggtctcgaactactgggctcaagtgatctgctcacctctgcctcccaaaatgctgggattattggctctataactgttaacttccatgttattaaactactccacaccatttaaaaagaagagaggctgaggcacgagaattgcttgaacccaggaagtggagcttgcagtgagccaagattgtgccactgcacttcagcctgggtgatggagtgaaacactgtcttaaaataaaataaaataaaataaaaataataaaaagaagaacttccaccaattcattttacaaagtccacacacccctaacacaaagcctgacactacc

SEQ ID NO: 25153 - DNA, 410 bp, Homo sapiens
tatggtttaaggtgactgtcttagtcagcatgggttgccataacaaaataccatagcctgggtggcttcaacaacagaatttacttctcacacttctggaggttgggaagtccaagatccaggactttcgccttgccctcatgtggtgagggggtgaggaagctctgtggggcctcttatatatggatgctaatctcattcatgaggggtctgccctcatgacccagtcacctcccaaaggccccacctcctaataccatcaccctggtaattaagtttcagtgtataaatttgggggactatagacattgaaaccataacaagcacttttctaagatcagggagtgagtaagtagcagagctaggacctcaattccacatgtcagtcatcttgccttcactctgctcca

SEQ ID NO: 25154 - DNA, 466 bp, Homo sapiens
atttcatctgagttgtcgacatttacagcacagagttgttcataatactctgttatcacctgtgaaatctgtagtcatgttacatcactcatctctgttattggtaatttgtgtcttctttataatcccaatcagtctgggtagaggtttgttagttttattgaccttatcaaaaggtgttttctgttgggcatggtggttcacacctgtaatcccagcactttgagaggccgaggcgggcagatcacgtgaggtcaggagttcaagaccagcctggtcaacatagtgaaacgccatctctactaaaaatacaaaaattagccgcctgtggtggcgggcgcctgtggtcccagctcctcgggaggctgaggcaggagaactgcttgaacccaggaaacgtaggttgcagtgagccaggatcgcaccattgcactccagcatgggggacagagcgaaactccatctc

SEQ ID NO: 25155 - DNA, 371 bp, Homo sapiens
ttatattacactatttcaatgtttcctgtgaacctacattaatatagttagtatagtattggcacacataaagatttataggtaaatggaacaaaatttgtgaatctagaaataaacccttatatttgtggtcagtttattttagccaaagaagccaacacaatttaattgaaaaagacagtcttttcaacaattggtgctataataattgaatatttgtatgtacaaaatacccttaagtcctagctctcaccatagagaaaaatcagctttcagtgaatcataatcctaaatgtaacctctaaaattctaaaacttctagaatatattaattagacattcttagatacaatctcaagagtaaaagccct

SEQ ID NO: 25156 - DNA, 398 bp, Homo sapiens
gacaaaaagaaaacttgcttaagaaactataatttaaaaatttaaagtggaaccaatgtaagaatctactgctacgagaatagaagacctagaaaagtgatcctagtgtatataagaactagatatatggtaatagagggattataaattggaaagaagggacagtattaggaaaccatgctagaatgattatcttgtagagcatgtgggactattatattgcgataaattttagataaaccaaaagtcaaatgtttttaaaagaaataagctataggagaagtagaacatgtaggtgaatgtttactttgtcttaagtgggcatggtctttccaagcattaaaacaaaggaaaaaaaccataatggaaatgttaaatactgtatccaaaattaaaaa

SEQ ID NO: 25157 - DNA, 328 bp, Homo sapiens
cttctaccaccaagtactgtactcttaacaagaacagtttggtagggtttttataagactatatagatataagatgatagagaagagagtcatgaatgatgtcagagcactactgaagcctttggagtgattccatagccttctggatggcagctgaatacctatatgtagtatcactgcccaaagacctagactagaaagtgcaaagtagcttagcagctgcagtcattcactcccagcctccaaaattctctttctttcacctcaaatctatttcttgtacttacctactcacagcgacttctgtttgctttcgatcttcacctga

SEQ ID NO: 25158 - DNA, 379 bp, Homo sapiens
ttttgagttgtcttattctctagtgtaataaaataactcccaccagcctgggaatcagccatttctctagtttcttttagtgtgtgtatatctatcaatagatagaactgtaaattatatatatacatacattctctttctcatctgttttgtatccgtttatctaaaaagccatgaattcatcatagtatcttcaattccagtcaaacacagtagggttcgttctagctttccctctttccaagtttgtcttcgacagcaagaaccctggcttttgttatctacaatatatttacttattatttgttcattcctgaaatacatagaaagtagattcagaattgctaaagcatatatctgtaaacaaacctattaatta

SEQ ID NO: 25159 - DNA, 651 bp, Homo sapiens
cgcgaagcggcttggaagtgggcagcctggaagtcactcgggccaccggagctggcggcgtctccagcgagcggcgcggagctggacgccgcgatcgtggggcccgcgaggcgggcagccggggcgtccagatgcacagtctctgacatcagctctcctgggaccctccaagagcactagtgtctagaaggcactaaggcatggcgaggacaacatccttgctgcctccagctggcgggcgaccacagctactgcctgctctgcgctactgagccactcggtctggagcccccaggacagcacctgcttcctgaggttgtcctggctcagctgtgcacagcgatggtggagaactggactccacaggctcacaaccttcctgtcaggtttcagggcccagcatccttcatcctgggcctggctgccctgaacaatggctgagggctgggggaccccatagagtgacaccacagcgtacggggccagcagcactccagtgcccgtggactatgaccacctatcgggccatccccagcgatggtgtggacctggcagccagctgtggcgccagggtgggcgatgtcctccctgggccacacacaggggactacgctcccttgggattctgggcccagaatggcagcatgtccc

SEQ ID NO: 25160 - DNA, 480 bp, Homo sapiens
cttctaaaaaagagtgggtagtgattgttaagacttacccgctcataaatgttttattacatacttaatatgtgaagctatcaagtaaggaggtaaggaagtatgttaatagggaagaagatgataaaatacccaaataggaaaccataatgccaactttctaagcttaagctgactgtaacaaagaactggctttgtaacaaagaacaagtcttactggcttcatgcaatgcaaacatttttttcttacgtatctgacagatcaaggtggtcaggtagctctcctgagcagttttccaccatgtggtgattcagggatccaagcacattctatcacgaggcttagccatattggagtttttcacttcggtgatgaggatgagggagaaagtgggagagagtgaaaagagggagaaaggtggaaaagggagaaagaaggagaaggtggaaaggagagagagagaaattgagaaagtgaga

SEQ ID NO: 25161 - DNA, 343 bp, Homo sapiens
gacaggagtccaagtggctggagtagaaggaagacggaggctgttacaacatgaagtcaagtagggcatcaagttaggtattatggaaggcagggaggcaggatgggggcagggacatagggaaagggctgtgagaagagccgttaaagttgaaaatgagaatggaaagctgaccagacttgtgaaaaagtttattaacagcttgccgactctgctgagatggaaaataataacttttaatagcattaatctacacggtttcaccaacaacttgcagcagcaacagggtgtggaaagcagggagacagatggtttgacctgtaaacagtgaagaatagatttc

SEQ ID NO: 25162 - DNA, 540 bp, Homo sapiens
tgatattattttagaataatattttaaaatgtagatactataaaaggtaaaagaatattttttgaatgtcagatttatttcctttctgagtgtacattgggatggttagactttaaaagtataagtgatttgtgagtccattcagcagttctatagtgtgagatcttttgtattatcaaagtaaccattttaaactattcctaagaaaattcttacaagggtaaccaatgtaatggtcttgagacatggaaattgtttccaagagaagttttaggatttagtgattttttttcaaatatttgagagctatctttttggaattacattgctttgctctttattatactgcataaataccccgaggatcttttttgtttttttgatttgttgtatcaaacctatgtcccttcctccagaaaatggacaaggtgaaggcaaagaagaattattttacctaatgtttgatggtgatagaagcagaacaagtagcatcatgaatctaattccttgggtttctttggtccttcagttttaattgaa

SEQ ID NO: 25163 - DNA, 498 bp, Homo sapiens
gttatggtgtccagtgtgtggcattgttaggttcatccatagctactggtaccagtcagcctagagcccacacagcaagcggcctcaggagatttcttttctcaggtggggcagtgagatgtgacagctgtctcattccagtgcctctctaggcctgatcatttaaagggggctcgccttcctcagataaaaagtttcttttctttgtagtgggtacatttcaacgtgctgggtctgatgcacactggggcttctcaaactctgaatcctgcagcttctgaagtggccaccatgccctccccagaatccacttctctttccttcaattccaccgtgcccagcagccagcaccaccccttgaaaacccaaatcttagctgagcctggtggcttacgcctgtaatcgcagcactttgagacgccaaggcaggcagatcgcctgaggtcaggagttcaagaccagcctggctgacatagcaaaatcctgtctctacttaaa

SEQ ID NO: 25164 - DNA, 505 bp, Homo sapiens
gtataaaaaagagggcctgacaattgccaaacatatcaggtgaggctttgggatccactggtgggaaacactgaatatatttaatatccaagacaataattcaaagactctaaattgggaaattagcttaatagtattttacttgcaaggtcctacatttcaatattaaaaatactgacacattaaaaaatgaaattggtcttttattcctagcctattcatctttgcatctttcccagcacagagcatccccatggcactcagcagacccccatgatgtctggtcaattaatgagttaatggatggtttcaagcccatgagccagattcctgtcaccggcatgtatcagtttattgctgcacacgggaaaccttgcagccacagggctttgtttatacactgccctagaagccactaggattctctagatcagaaagagaaatatattctagttctcatctttcaaactggctcaaaacctgacactttcacatcaggaaagtg

SEQ ID NO: 25165 - DNA, 428 bp, Homo sapiens
gtggtagagttttagcatctttcagctccacagctctactagccaaatgtgcgttccaaaatatttcccacaggtttctgactcttggattttaagtagtatgttatggctggtacctgggatttggtgtatttaaaatttgtttgggccagtcgcagtggctcacgcctgtaatcccagcactttgggaggctgaggcgggtggatcacctgaggttgggagttcgagaccagcctggccaacatgttgaaacgctgtctctactaaaaatacaaaaattagccaggcatggtggtgcacacctgtaattccagctactctggaggccaaggcaggagaatcgcttgaacccaggaggtggaggttgcagtgagcagagatcctctcactgcactccagcctgggtgacagagcgaatctttgtctc

SEQ ID NO: 25166 - DNA, 482 bp, Homo sapiens
ctcttcgtgaaaatcttgtctactatttttaatcgatgtttataataaagatattcaaaaccaagaaatctagtgtaatttagcacatgttgaatagatgctatgaaaccctggttgggtatgacaaaattggaaaagagcttttgaatacccttaggatggagtgagaagctctggtcaggccaaacaatgaatacatctataccattttaataataaaatataattctttggccatgttgaattcattacaggatgcattagatgaaactgaattgatgctgatagctgagacgattattttgtaaatcagttagatattactgtctaaatattggttaaaagagtactgttggatttatttttatacagatatgtttgaaaacgaacacacaaaatctaccaatgataattttaaatcaccaattaaaaacaagaatgtcatcaggttttctcaatgttaaaatatttctcattttaaa

SEQ ID NO: 25167 - DNA, 1929 bp, Homo sapiens
atgaatgtatgagcctaattagagaaacagaaaatcagcatgtcagttttccttcattcaaaataacatagtctttctaagcagtcattctggagttaacatgcctagttcagagccgctgtggatgctcaaatcatttctggaattgccttcaggacacaattatgagaaagtcagacttccaatattttgatcatgccttgtgtcttcctaagtgtccttatcccactggattgtgtctcttactcccaagacttattccaaatgattttttgactcttttcattaatcaaattcaccccaaaccagaaagttttgccattagcgtagatattaaaaatattactggctgggaaagcactcctcaaagcagaggttctaaattaatttatctgttcttttaccatttgctcactcactcactcatggacccattcaatcatagaatatttaagatttatatgcccagaattataatagtgcctaggccttgataattagtgaatttgtacttggggtgaatgtgtaagtgtcaaaaggtaactattatgaaggagaaaataatcgatttaatatgtaaattctggggaggcatttaaaaaatcagtaatcttcaagttatatcttgtgtatcatctgtgttggatactctaatttggggggaaagaggctccagacagtttgctaaatactattttgaaagttatttttgggcattgtaaaataccttgcttcataccccaaagaataagatatgacagtctgacatcgattgtctgaaaggtactaattgcatttaaaattctttaagttaactacaacctcccagactgcaaagcaaatttccaaaccccaggtcatacttttgtatgtatgtaaaagctttagcattttagggaaaaaaatcaatctgtatttcaaaaataaactttgaggtttgaaaataataacaatattaataatggtagtattaacatctattatgtataacttaatctcaacataatttattgaattagaatgaacctggaacactttttgatgaattggtatcctagaggctgtttccttgggccttaactgctggaggattaggtaatcagggattccaagtgttgtgatcttttttctgatgatgccacagtcttcagtgtaaaagttcagaagcctaaaagaacaagtgatcctgaaagtagctgattccagacaagaaaattatattagaactcatgatatggttttttaaagtatttgttattactcagaagggttcatgaatcagtttccactacctctattccttctattgaagctttcctcaaatctacttgtgattcctgatagctcactggcaactgtaccaaggtggccactgtatcatctactgatccttctgcacctagcactcttggctccagataacgcacagaaacctattttctcaccagctgtcatttcttctagggcatgcagttctatgttcacagttcatgtgtaaaaataaaaccaaattcctggattatcaatatcagttctttacctgtgcataaaagaatatcatgaagtaattgaacttatctgttgatataaaaacacagatccaattcgtgtctgtggatgctgcaaggactggctcattggagccaaaccatgtggcggaaactcctgaaattggtggaaaaagtggaatatggcagattgggtaggtaggagaacaattttggagattttgtttcttatgttaaagtgtctgcattttatttgctgtaccctgcctactctggttttaaggattttttgacttcttcgaaaagcactgaataatctcttttccgggtctagattttttgatgagtactgtgtaaaattgtcaatattcaatggattatttaataataaattaagaattacactcataaaaaaaaaaaa

SEQ ID NO: 25168 - DNA, 401 bp, Homo sapiens
  misc_feature (311)..(311): n is a, c, g, or t
  misc_feature (335)..(335): n is a, c, g, or t
  misc_feature (362)..(362): n is a, c, g, or t
agttcttgtgtgctggagatgtggctggggtttgtctcacagtggaggttacctaaccaaactcctgtaaaaccacaccacctatgcctgtgatggggactatctgaatctacagtgccctcggcattctacaataagtgtccaatcggcattttatggacaagattacccaatgtgtagttcccagaagcctgcctgccagagggaagacagcttaacttgtgtggcacccaccaccttccagatagaattaaaaaacaaaaccgtgtgtggaaggacaagggagctggaaactggcacttgccacggantccaagtttccttcaacatcttantctgtggacctatggggcagggagggntccagggggaaggggacatgttgcttccttcccaagggc

SEQ ID NO: 25169 - DNA, 410 bp, Homo sapiens
  misc_feature (377)..(377): n is a, c, g, or t
agttcttgtgtgctggagatgtggctggggtttgtctcacagtggaggttacctaaccaaactcctgtaaaaccacaccacctatgcctgtgatggggactatctgaatctacagtgccctcggcattctacaataagtgtccaatcggcattttatggacaagattacccaatgtgtagttcccagaagcctgcctgccagagggaagacagcttaacttgtgtggcacccaccaccttccagatagaacttcgacccaagcgaatcgaaggttctggaaagatggaatccttgttagtgactctctggcagcctttgcttacattaccagataggtcaatgaatcaaagcttcctagaaagctgcacggatttcntacagtcttgttaataaatgccctgttcaattc

SEQ ID NO: 25170 - DNA, 425 bp, Homo sapiens
caggtcagaatttttatgtacctttagaaatgagatgagctctatcgttgttggtctagcatatttcgtcatatcatgccttgtgcatgaggctaccctgatacagatgtagagagttggcctggttgacagtatgttattttttctttttaaaaaaataaatttaaaaggtacagagatggcattttgttacatggatatattgcatagtggtaaagtctggggttttcctgtatctatcacttgaataatgtacattttacccattaagtgatttctcatcccctgactttatagtttgaaatttaggccaggtggcattgcttatgcctataatcccagtgctttgggaggctgaggcaggaggatcagttcagctcaggagttggagaccagcctgggcaacatagagcttgcctctacta

SEQ ID NO: 25171 - DNA, 507 bp, Homo sapiens
ttttaaattgccaggttttattaagataattggcaaaatttcaacatacaccttacctgaatgaacacttttaataaaatatgaaggatcactcatgactacaactgaactcaaaagtgagatgtagagcagatttgtaaattgataaatttatttggtaagaaattattcacttcattcgcttcactccatagagaattctttgcagagaaatgttatgaacaagagaacaaagcctgtctctcaccaaagagcacctagagtaagagtttacaatgatgtatctggattatctaattcatcaaagtttatttccttttcaaaaacaactgctgtgtcagtctggagttccctatttcatgttttctaattattacaataaatagtcttcaaaatagaagataaaatgctgctttaagaagtaacagttatttttcaacaccataccatttgtctggaaaatcattgtgttgtaatactggtgggtatcttactttgttttgcaag

SEQ ID NO: 25172 - DNA, 357 bp, Homo sapiens
tctcttcttacaatccacattctattcagtatttcatttacttgaggggttatatgctacttatctttatctgttgtggagtgaggacacattccaaatgccttggtattattaaaagcccttcatgatgtggccccatcttttatgacttttccttttcaactgtgccctctagccttatttgatttctctcaaattcttaaacacagcatgcttcactgacctttaagcctttgcacatacagtgttgatgtggagcttcctgaccaactcctaattctccttcaggcctcaatttaaacatcacttcctctgggaagctttctattattcccaaggtactgggatatgttcttg

SEQ ID NO: 25173 - DNA, 225 bp, Homo sapiens
gactcagtgttggtctttgctgctggcagagtatagacttaggtcaggaaagccccagtgagtataatttcatgtttctgagcccatgcatcatctccattcctgacatcatagccaatttgttcagagctcgttagtggctggagtgtctgaagaaagagatgactggcatccagacattttttcctatccacttgattattaaaatcattctctgttgacgta

SEQ ID NO: 25174 - DNA, 309 bp, Homo sapiens
tttttattttttgttttgtcttttattgcttctgtcctttatcacatttaaaaattcctctcattacaaaggtccccaaaaccaccaaatttggttctttccaggagtatcaaatgatttggacatctttagtcatgagagagtagtaaacaacagtactagataacactgactactcatgtcagtttcatcaaggctaataactttatgggtagagaaactgagttattttgccaattttataatgaattttcttaaaccaaaaccctgacatatttgtgcagcagtgtcttgagtttgtatccaata

SEQ ID NO: 25175 - DNA, 459 bp, Homo sapiens
gtttatcctacttgggtttgttgttattggtttttgtttgttttagcttcttggatatataatgttttttataaaatttgagagatttttggacattatttcttagttacatttttctgccctttgctcttctgtgattcgccttatgcatttgttggtacatttcctgttaccctggtctcaggctctgttcatttttttcagtctttttctccctctatttctcaggttgtgtaacgttgatttttcctcaagctcaccgatgcgtctgccatctcaaatctacttgcattgttttgtttcgtaagttgaatttttcagcgcccaggtttccatttggttctttcataactttgtacctctttattgagattctttgttcattggattattataagttttctttaatataataaacagacttccattttgaacatgtttatgaagtctgctaaatcc

SEQ ID NO: 25176 - DNA, 478 bp, Homo sapiens
tgttaagaggctggagaaccgtgcacagattctgtcactgctgtctgcatttaatgctttgcagccatcaaaaatctttctggtgaatttgcacatggttgcagcctggaacttccaagccaagagcagcactcggaattctgtggggtcgacacataggtcattgcaaaagtgctccatgccttcctccaaaattgcatcttcccactcatccttgtagcacctgaacagttcttccaacccctgcaaggaagactcctcggcactggagttggactccctcccaccatctcctgaggatgttggcagctggcagcctcggccttcttggtcccattgacaaggctatctctacttggcatgccacagggtggtacttgctcctcacagtggcctgcaccctgcctgctgtgtgacttcttgctggggtcatggtctgcattcttgctgcccagggtcaatgagggattcttacact

SEQ ID NO: 25177 - DNA, 963 bp, Homo sapiens
aaacaggctggtaccggcctggagattaggatggagaagagcggagcagtggtcggagatgtggcgaccggtgcagctctgtcatttccactctgctctgctgcacagaaggcagaagccctggccgtcccctgctgtgttcttcaggagaaacgtcaggggccttcctccaaggttctccagccccacacccctgtggaggaaggtgctctccaccgcggtagtgggggcgcccctgctcctcggagcccgctatgtcatggcagaggcacgggagaagaggaggatgcggctcgtggtggatggcatggggcgctttggcaggtctctgaaggtcggcctgcagatctccctggactactggtggtgcaccaatgttgtccttcgaggggtggaagagaacagcccaggctacttggaggtgatgtctgcgtgtcaccagcgggcggctgatgccctggtggcaggggccatcagcaacgggggcctctacgtgaagctgggccaggggctgtgctccttcaaccacctgcttccccccgagtatacccggaccctgcgcgtgctagaggacagggccctcaagcggggcttccaggaggtggatgagttgttccttgaggacttccaggccctcccccacgagctcttccaggagtttgactaccagccaattgctgccgccagcctggcacaggtgcacagagccaagctgcacgatggcaccagcgtggctgtgaaggtgcagtacatcgacctgcgggaccgctttgatggggacatccacaccctggaggctcctgctgcggctcgttgaggtcatgcaccccagctttggcttcagctgggtcctccaggacctgaaggggaccctggcccaggagctggacttcgagaatgagggccgcaacgcagagcgctgtgcgcgggagctggcgcacttcccctacgtcgtggtgcccc

SEQ ID NO: 25178 - DNA, 1137 bp, Homo sapiens
tgtggcacccttaggccaagctgactcaggagccctcgtggattccacaaggatggtgttttgtttcatgctcacagtggggtctaggagggcttgcaggcagtaagtgccaggacccgtgttggcgcccgaggatccctggcatgttcggggacggtgaggtgcctgcccggggaatgcgcagtgcgccgagggcgggactggaaccctccgctctcaggaggcgcggtccgggcgccaaaaggtgcagctctgtcatttccactctgctctgctgcacagaaggcagaagccctggccgtcccctgctgtgttcttcaggagaaacgtcaggggccttcctccaaggttctccagccccacacccctgtggaggaaggtgctctccaccgcggtagtgggggcgcccctgctcctcggagcccgctatgtcatggcagaggcacgggagaagaggaggatgcggctcgtggtggatggcatggggcgctttggcaggtctctgaaggtcggcctgcagatctccctggactactggtggtgcaccaatgttgtccttcgaggggtggaagagaacagcccaggctacttggaggtgatgtctgcgtgtcaccagcgggcggctgatgccctggtggcaggggccatcagcaacgggggcctctacgtgaagctgggccaggggctgtgctccttcaaccacctgcttccccccgagtatacccggaccctgcgcgtgctagaggacagggccctcaagcggggcttccaggaggtggatgagttgttccttgaggacttccaggccctcccccacgagctcttccaggagtttgactaccagccaattgctgccgccagcctggcacaggtgcacagagccaagctgcacgatggcaccagcgtggctgtgaaggtgcagtacatcgacctgcgggaccgctttgatggggacatccacaccctggaggctcctgctgcggctcgttgaggtcatgcaccccagctttggcttcagctgggtcctccaggacctgaaggggaccctggcccaggagctggacttcgagaatgagggccgcaacgcagagcgctgtgcgcgggagctggcgcacttcccctacgtcgtggtgcccc

SEQ ID NO: 25179 - DNA, 1127 bp, Homo sapiens
cgagacgctaagcggcgccgggcgggagaagagcggagcagtggtcggagatgtggcgaccggctggagtgcagtgtctcaatcttggctcactgcaatctccgcctaccaagatcaagcgattctcctgtctcagcctcccaactacctgggattacaggtgcagctctgtcatttccactctgctctgctgcacagaaggcagaagccctggccgtcccctgctgtgttcttcaggagaaacgtcaggggccttcctccaaggttctccagccccacacccctgtggaggaaggtgctctccaccgcggtagtgggggcgcccctgctcctcggagcccgctatgtcatggcagaggcacgggagaagaggaggatgcggctcgtggtggatggcatggggcgctttggcagaccttgcctccccaggccttggagacccaccctcctggtgtcctcctctcttcctagtggacctcaggctgcaggtctctgaaggtcggcctgcagatctccctggactactggtggtgcaccaatgttgtccttcgaggggtggaagagaacagcccaggctacttggaggtgatgtctgcgtgtcaccagcgggcggctgatgccctggtggcaggggccatcagcaacgggggcctctacgtgaagctgggccaggggctgtgctccttcaaccacctgcttccccccgagtatacccggaccctgcgcgtgctagaggacagggccctcaagcggggcttccaggaggtggatgagttgttccttgaggacttccaggccctcccccacgagctcttccaggagtttgactaccagccaattgctgccgccagcctggcacaggtgcacagagccaagctgcacgatggcaccagcgtggctgtgaaggtgcagtacatcgacctgcgggaccgctttgatggggacatccacaccctggaggctcctgctgcggctcgttgaggtcatgcaccccagctttggcttcagctgggtcctccaggacctgaaggggaccctggcccaggagctggacttcgagaatgagggccgcaacgcagagcgctgtgcgcgggagctggcgcacttcccctacgtcgtggtgcccc

SEQ ID NO: 25180 - DNA, 955 bp, Homo sapiens
cgagacgctaagcggcgccgggcgggagaagagcggagcagtggtcggagatgtggcgaccggtgcagctctgtcatttccactctgctctgctgcacagaaggcagaagccctggccgtcccctgctgtgttcttcaggagaaacgtcaggggccttcctccaaggttctccagccccacacccctgtggaggaaggtgctctccaccgcggtagtgggggcgcccctgctcctcggagcccgctatgtcatggcagaggcacgggagaagaggaggatgcggctcgtggtggatggcatggggcgctttggcaggtctctgaaggtcggcctgcagatctccctggactactggtggtgcaccaatgttgtccttcgaggggtggaagagaacagcccaggctacttggaggtgatgtctgcgtgtcaccagcgggcggctgatgccctggtggcaggggccatcagcaacgggggcctctacgtgaagctgggccaggggctgtgctccttcaaccacctgcttccccccgagtatacccggaccctgcgcgtgctagaggacagggccctcaagcggggcttccaggaggtggatgagttgttccttgaggacttccaggccctcccccacgagctcttccaggagtttgactaccagccaattgctgccgccagcctggcacaggtgcacagagccaagctgcacgatggcaccagcgtggctgtgaaggtgcagtacatcgacctgcgggaccgctttgatggggacatccacaccctggaggctcctgctgcggctcgttgaggtcatgcaccccagctttggcttcagctgggtcctccaggacctgaaggggaccctggcccaggagctggacttcgagaatgagggccgcaacgcagagcgctgtgcgcgggagctggcgcacttcccctacgtcgtggtgcccc

SEQ ID NO: 25181 - DNA, 1132 bp, Homo sapiens
  misc_feature (1131)..(1131): n is a, c, g, or t
cgagacgctaagcggcgccgggcgggagaagagcggagcagtggtcggagatgtggcgaccggctggagtgcagtgtctcaatcttggctcactgcaatctccgcctaccaagatcaagcgattctcctgtctcagcctcccaactacctgggattacaggtgcagctctgtcatttccactctgctctgctgcacagaaggcagaagccctggccgtcccctgctgtgttcttcaggagaaacgtcaggggccttcctccaaggttctccagccccacacccctgtggaggaaggtgctctccaccgcggtagtgggggcgcccctgctcctcggagcccgctatgtcatggcagaggcacgggagaagaggaggatgcggctcgtggtggatggcatggggcgctttggcaggtctctgaaggtcggcctgcagatctccctggactactggtggtgcaccaatgttgtccttcgaggggtggaagagaacagcccaggctacttggaggtgatgtctgcgtgtcaccagcgggcggctgatgccctggtggcaggggccatcagcaacgggggcctctacgtgaagctgggccaggggctgtgctccttcaaccacctgcttccccccgagtatacccggaccctgcgcgtgctagaggacagggccctcaagcggggcttccaggaggtggatgagttgttccttgaggacttccaggccctcccccacgagctcttccaggagtttgactaccagccaattgctgccgccagcctggcacaggtgcacagagccaagctgcacgatggcaccagcgtggctgtgaaggtgcagacatcgaactgcggcaaccgtttggaggggaaatcacacctggagactctgcttgcgagtcgtgaaggcatgcacccagatggtcagctggtcttccaggactgagggacctggccagaacggatgagagaggcgaagaaaggggcgcgagacgggcacccagaggggccgggcaggaaaccaagcggccgcgatgacggagcaaggagaaggcgggccggaacaaaccacgggaaaggacccgcaagcccgcgaggggggaccaaagcagcaagacgcggccgcggggtcang

SEQ ID NO: 25182 - DNA, 1130 bp, Homo sapiens
tttaggtccaagtagacttgaattaatgtcataattgtcagtattattgaaaattatgtcaactgtactgttattcatctgtcccatagtttagaacatgacctggctatctggcattgttgcaagtgccttaaattcatggcatcctattaaaaaaacaaatttggtgttatgctgcatgacaaagacaaacacacctcaaaatgttgtcctttcttagcttgctgcgttttacagttctttctgctaacaatttataagcctttattatataatattgatgaattacagaaatgatgaagttgttctcttatttctgttaaatgtaccagagctgtgtatctgttaatgagatacagcgtcatttctgtgaaatgtataaatgtatgtgcaggtcaaattaatatatgacattctatcagtctgtatacaggtattcctgttttgctaagctgtgcagattctgtaaaaataaattagtgcagtcaagttctaacatatctcattttatagactccattgacaatggtccaaccgaaaagaaaaattggaaatgactgctaaccagacctcgttatgaaaccaatgatgaaaaagtcacttggtgcacctctcaacaaaacaggatgctttttccgagttcttgtatatgcaaatcatttacgaggcaagttttcaacagacctagaaagcaaaacattgaaagtgtgttgttagccctcctctctgcccctgaatcaacagacagagctctgggaccttggcaatgactcagaggttggggctttctgagtaaagggacatttctttaagcatcatctatcaaatttatttcaatgtatgatgtttttacaactggtcagttcttttgtattcttacagctatggttatttgattgtcctcttacaatttgttctacatgaaagagttctttgttagtcagaatgcaacaaactgtcatcaaatggtcattgaccacttgcactcttttgatgtagattaaaaactttttcataaatttacctgctttgatttgctctgtatttttcctgcagctgtaattgctgagtgcctgttgtatactttatagagttgaaataaaaaaataattacttttaaaaaaaaaaaa

SEQ ID NO: 25183 - DNA, 673 bp, Homo sapiens
tagaataatatatactttaatgttcaagaagaaactagatgagtagtctatttaatgatccattgacaatggtccaaccgaaaagaaaaattggaaatgactgctaaccagacctcgttatgaaaccaatgatgaaaaagtcacttggtgcacctctcaacaaaacaggatgctttttccgagttcttgtatatgcaaatcatttacgaggcaagttttcaacagacctagaaagcaaaacattgaaagtgtgttgttagccctcctctctgcccctgaatcaacagacagagctctgggaccttggcaatgactcagaggttggggctttctgagtaaagggacatttctttaagcatcatctatcaaatttatttcaatgtatgatgtttttacaactggtcagttcttttgtattcttacagctatggttatttgattgtcctcttacaatttgttctacatgaaagagttctttgttagtcagaatgcaacaaactgtcatcaaatggtcattgaccacttgcactcttttgatgtagattaaaaactttttcataaatttacctgctttgatttgctctgtatttttcctgcagctgtaattgctgagtgcctgttgtatactttatagagttgaaataaaaaaataattacttttaaaaaaaaaaaa

SEQ ID NO: 25184 - DNA, 331 bp, Homo sapiens
ttttctagatcttaaataggatgatgatggagagactttggcatgatatagaattggaatggaggcagagttgataattaaactagatctgagggttttttcccagtttataacgtaggtctaccctgagatgatttttgttgtccctgtctggatattagtgtgccttttatttaaaaagaaaaacccaatagtttatcatctttagagagattagatgattgtattttgcatttattaattttccccaactgattatagtatatactgaggaaattcaggaccaatcagagaatgtttaagggcagagctgcctagaaaaccagtttaa

SEQ ID NO: 25185 - DNA, 580 bp, Homo sapiens
tcctcattacacaatattcccacgatctacacaatttaggacaatcagcttttttgattttttagaaaaaaacagagatgtcaacttagttttcattatgattttaaagatttttacatgttcattcttaaataaaatggggatggaaagagtactaagcaattagtgatcatgaagaatgttgctaaaccaagaaagccattaagtagacagcctcataaaacaccaagggtccaatataaaaggtactatctgacccttgtacttatgcagctgctggacccacaacttcagcctctgctccctagaggcagggtaaaggctgtcccatatttgaagggaagtacagggaacctgtacttccagggaaggcccagactacatatcccagctccatctgctggcctggatgcccttgaacatttaagttccccataaagcctagacatggctctggaccagataacccaagcctgacatgctaagaagttgtgccccactcattttcttttctttttcttttttttttttttgagacggagtcccactctctcacccaggctggagtgcagtggtgcga

SEQ ID NO: 25186 - DNA, 419 bp, Homo sapiens
gggaaatttgcttgagaatgccaaaattttaaaactctgtaaaggtaattttacattcacttatgtgtgtttactaatgttgagtaggaacagaagcaaaaatacctaaacctattttttttaaccttcacactctaaccagtattatatatttcagctacctaagataatgcaattaatcatatatccaacctaagcttctgccaataaggatttcagataagcttttaaatttatggaggattttctttgtgtctttggaagttcacttaccataaagtattttatagtctactttaaataacagattttgttacacagggtaagccaaaggctgtacaagatttagtgtcattgggtctcatatttgtgttagaccatgaaatattccattaaaatttatctgtaaatacaaggca

SEQ ID NO: 25187 - DNA, 382 bp, Homo sapiens
cattcggaatggtgcatagtacataatgtgggtgttcaataaattaacagtagtatttttaccactgcagagaataatcttactctcaggcaagtagaatctgttacagttgttgaatatttatgtaatcattgaggatgtttataaatatatttgcttctaaaaattttttccttacatattcttttattaatattaaaccaagtaacatttataatattcttgaatatcttatcacttaagaacatgaggaaaggtggccgggcacagtggctcacacctgtagtcctagcactttgaaaggctgaggtaggtaggattgcttgaactcaggagtttgagaccagcctgggcaacatggtaaaaccccatctctacaaaa

SEQ ID NO: 25188 - DNA, 438 bp, Homo sapiens
gaaaacgttacttaactattggctgaacgtaaatttaggttaaattaaaatgcagcttttttccttataggcatttgttttggttcaagtcatcataaagtaggtattgcattgctatcagtggatacagatgcttagctcttaaaagaattttttttggccagacgcagttgctcacgcctgtaatcccagcactttgggaggttgagggtggatcacgaggtcaggagatcgagaccatcttggttaacatggtgaaaacccatctctactaaaaatacaaaaaattagctaggcgttgtggtgggcacctgtagtcccagctactcgggaggctgaggcaggagaatggcgtgaacccgggaggcggagcttgcagtgagccgagattgtgccactgcactccagcctgggcgacagagcgagactctgtctcaa

SEQ ID NO: 25189 - DNA, 342 bp, Homo sapiens
acctaatgtaaatgacgagttaatgggtgcagcacaccaacatggcacatgtatacatatgtaacaaacctgcacgttgtgcacatgtaccctaaaacttaaagtgtatataaaaaaaaagaacaaaggtattaaaaaaaaagaagaagaaatgataagaaaatgtgaggctgagtccaggagctataaaaaagaaaaaaaaagatgctctcttaagtcactttctgttgctacggctgagtatcacagactgggtagtttataaagaatagaggttatttggacatagtattggaggctggtaaatccacagtcaaggggccacttctgatgagagccttc

SEQ ID NO: 25190 - DNA, 495 bp, Homo sapiens
tatcttttaccaccctctggaattttgacttgctttatgtaaatgacaatggttttgtgactaattcactaagaatatatatacacatatgtgttcacatatatattcttatatatatacagtaagaagtaatgactaagaagtttaatgaatataaaagtgacaaaaaaagacggagatagtgaaaagataaaagacatccagtatttttgactttccatggagactcagttgctatttgacataattctgcaaggtcacacccaacttctaccaccctaagagaatctgctctcaattcacagaagctcacaggagactcctcttttttggcatggcaggtagtatcaatggaaagttattttcattcattaaaactatcacctacacgaggcacacccggctaccaaagtcaatgaaaactaaagaaaaagaactaatgaattcttttaagtctagcctaatctacttcaggaatgattaagtgatgacatg

SEQ ID NO: 25191 - DNA, 441 bp, Homo sapiens
tatcttttaccaccctctggaattttgacttgctttatgtaaatgacaatggttttgtgactaattcactaagaatatatatacacatatgtgttcacatatatattcttatatatatacagtaagaagtaatgactaagaagtttaatgaatatatgactttccatggagactcagttgctatttgacataattctgcaaggtcacacccaacttctaccaccctaagagaatctgctctcaattcacagaagctcacaggagactcctcttttttggcatggcaggtagtatcaatggaaagttattttcattcattaaaactatcacctacacgaggcacacccggctaccaaagtcaatgaaaactaaagaaaaagaactaatgaattcttttaagtctagcctaatctacttcaggaatgattaagtgatgacatg

SEQ ID NO: 25192 - DNA, 390 bp, Homo sapiens
ttccgcacacgcgtagtaggacggtagccggtattcaatcttcaaatcagcgccgcgggaagtgcgggcgggtgttgctcccctgtctctggacgacgctgtgactgatcccaggcttggagccggagctgcgagcgaggcagtgaaagggtggcaggtatggctttgctggactcggaggacgtaagagaaaggcggggactggcttctaggtttaccctaccgaagataaaactttagtctccaagcgcagtgacttcaggtttggatatgtgggtcctgttcaactcgagtagctgagagaaagcaagagttgggctccgactggcactgggtagatgtccagggctctggtgggactgggagaggctcaatttgcattcctgctct

SEQ ID NO: 25193 - DNA, 241 bp, Homo sapiens
tttagtagagacgggctttcaccatgttgaccaggctggtcttgaactcctgacctcaggtgatctgcccgcctcagcctcccaaagtgctaggattacaggcgtgagccaccatgcccagccggcatttcttaacaatgtttttgcaaatgacttccaagattttgctctgctggagcatttcccgggagatgtttggggaaagatccttaagagtcaaccataccacggacaaagccga

SEQ ID NO: 25194 - DNA, 796 bp, Homo sapiens
acacccggcccccatttccttttgaagacatgaaattattcatatttcagagaaaccctataagacatgggaataccttcagttatttacatgtgaatatgaggaagcattcatactggacaggaaaccctgcgaatgtaggcagtgtgggaaaaccttcaatggtcatatgaccttttaaggaccatgagaaggcatatgaagtgtaaagaattttcatatgccctataaatgtaaagaatttataaccttaaaaatgtaaagaatgtggaaaaccctataaatgtaaaaaatgtagaaaaacctttatttgtcttagtttacttggaaaccatgaacaaactcacactggaaagcgacttcttaaatatagacattgtgaaaaagccttcagttggcccacatactaatatgtgagaatgcagactggatagaaatcctataaaagtgagatatagcaatgttttccattttaacaaatgctcatgtgatactcccttatgtgtgaaacttcaatctcatgttgaaactcccactagggaggtactgtataaatgtagataatatgggaaagcctgatgcaaattaattcatgtatattgttctagaaaattcacaacatgtcagaaatgtgataaaacatattatcagttactgattcttaaaatggatctctgaattatggatttctattactttcacaaaagaacactgagatgagataattctgtaagctcttatacagttgtacacaagttgaattgatagtattttttcattaaatcagtttctgaaa

SEQ ID NO: 25195 - DNA, 445 bp, Homo sapiens
atcttttcagaattaaataatgacaatgttggctagggggaagacaaccacttttaaagagtagagctatctgcgcattaacataagagcattttctctcttcagcttgtttgtaaggtctgatggcagatatttctttgtatcctactgcacggtgtttctacatatagtaggtgcatgataaatattggtgatgattgggaatgttaacatttactgttgcacagtgtggaagggaacaagtataaactagagaagtatagatgtctttaacatagcagtggtgactaaggaggagcaaagttgtactagtacttttatgagtaatagaagtagcaattgtctttattattagaggtcagatgtgccttagagaattctcaaaatatgtgaaattgggtaagtttttttaaaaggttgaccttaataaataatttgtttagtg

SEQ ID NO: 25196 - DNA, 928 bp, Homo sapiens
tagccacggacgcgcgctcggtcccccgccgtgcgcccccggtcccgcgcccaggctcccgcccctggcctccttaccagccacttgtcgcccagctgcgaactggagcgggaggcggcggccggagggcccaggacagccccgggagggcggcgaggcggagcaggagcgccccggctccggccacattctcagagtcaggaaaaggggcgagaggccacatgtctccctctcgcccaactgaaaacgaaacggcgctccagcagattgggtggaaagagctgggtctcttttctctgtttttcacgctagaaagggcttgtaaacattgttccttttaaaatgacctaccccaggcatttgtttgggcacacttctgtcctggggtcatcgttcctaggtggcttcggacctgggacttttcctgtatctgcacattgtcgttttatacacaattgccaaggtgggactgctttcaactttactgtgcttgaagctgcaaaggttctgccctgatgtttcctggaataatgctgaggactgcctttcgggtagccgccctattcagttcacttcatctcggaaatacctgacccctgccttggatccagcggccctcctgagagctgaggaaggaggaaatcctatgtgtctgctcccggagctgccacaacccatcttcccacaactcggaacttggaaaaaggaacccaggacacgactttgcttttcttttggacctagttgaagtcacagcttggaggaaaccagtttgcactatttgatgaggaatttggccaccaaaccactgatactttcccaaaggtttggcagaaattgttttttgagtggctcaccagagtacccagaagaatcagtatggaattagaggacagtggcctaccctaaataaagacatgagtgatgt

SEQ ID NO: 25197 - DNA, 1426 bp, Homo sapiens
tagccacggacgcgcgctcggtcccccgccgtgcgcccccggtcccgcgcccaggctcccgcccctggcctccttaccagccacttgtcgcccagctgcgaactggagcgggaggcggcggccggagggcccaggacagccccgggagggcggcgaggcggagcaggagcgccccggctccggccacattctcagagtcaggaaaaggggcgagaggccacatgtctccctctcgcccaactgaaaacgaaacggcgctccagcagattgggtggaaagagctgggtctcttttctctgtttttcacgctagaaagggcttgtaaacattgttccttttaaaatgacctaccccaggcatttgtttgggcacacttctgtcctggggtcatcgttcctaggtggcttcggacctgggacttttcctgtatctgcacattgtcgttttatacacaattgccaaggtgggactgctttcaactttactgtgcttgaagctgcaaagcggatcctgttacagtgcaaagaagaaatggcaaacggataacagctactgtgcctagaagatggttctgccctgatgtttcctggaataatgctgaggactgcctttcgggtagccgccctattcagttcacttcatctcggaaatacctgacccctgccttggatccagcggccctcctgagagctgaggaaggaggaaatcctatgtgtctgctcccggagctgccacaacccatcttcccacaactcggaacttggaaaaaggaacccaggacacgactttgcttttcttttggacctagttggtgattatactctgtctcccatggagaccacgtcttgcatccttccttctatatgggatttaggatagaaattaaaaagaaaacatattattttgagtcttgatttggagaaaggtagtattcaggaggaagtaggctatgatacacatagaaaatttgaggacagtgttacttaacaaggacatttctgtctctgcagaagtcacagcttggaggaaaccagtttgcactatttgatgaggaatttggccaccaaaccactgatactttcccaaaggtttggcagaaattgttttttgagtggctcaccagagtacccagaagaatcagtatggaattagaggacagtggcctaccctaaataaagacatgagtgatgtataaagtctagtgtcaatttattcagaaaatatcaaaattattctgggagctatgggtcaaagttgataggcacaaacaaacaaaaacgaaaggtattttaaattcacagcttggataagtaaaagggagatgttgtcatttctcttcttcaatccaactttagattttcaagccggaaaaagggtaattagaagttagaaattgttattgccagaaaatagctctaaaccctga

SEQ ID NO: 25198 - DNA, 869 bp, Homo sapiens
tagccacggacgcgcgctcggtcccccgccgtgcgcccccggtcccgcgcccaggctcccgcccctggcctccttaccagccacttgtcgcccagctgcgaactggagcgggaggcggcggccggagggcccaggacagccccgggagggcggcgaggcggagcaggagcgccccggctccggccacattctcagagtcaggaaaaggggcgagaggccacatgtctccctctcgcccaactgaaaacgaaacggcgctccagcagattgggtggaaagagctgggtctcttttctctgtttttcacgctagaaagggcttgtaaacattgttccttttaaaatgacctaccccaggcatttgtttgggcacacttctgtcctggggtcatcgttcctaggtggcttcggacctgggacttttcctgtatctgcacattgtcgttttatacacaattgccaaggtgggactgctttcaactttactgtgcttgaagctgcaaaggttctgccctgatgtttcctggaataatgctgaggactgcctttcgggtagccgccctattcagttcacttcatctcggaaatacctgacccctgccttggatccagcggccctcctgagagctgaggaaggaggaaatcctatgtgtctgctcccggagctgccacaacccatcttcccacaactcggaacttggaaaaaggaacccaggacacgactttgcttttcttttggacctagttgatacaagttaacaggatatgcttctggcctgtttctggattctaagggtagaaccagcataaaactagtcagtccaagtatttctaaagatccacagacacagttctcctggatttgggaag

SEQ ID NO: 25199 - DNA, 1127 bp, Homo sapiens
tagccacggacgcgcgctcggtcccccgccgtgcgcccccggtcccgcgcccaggctcccgcccctggcctccttaccagccacttgtcgcccagctgcgaactggagcgggaggcggcggccggagggcccaggacagccccgggagggcggcgaggcggagcaggagcgccccggctccggccacattctcagagtcaggaaaaggggcgagaggccacatgtctccctctcgcccaactgaaaacgaaacggcgctccagcagattgggtggaaagagctgggtctcttttctctgtttttcacgctagaaagggcttgtaaacattgttccttttaaaatgacctaccccaggcatttgtttgggcacacttctgtcctggggtcatcgttcctaggtggcttcggacctgggacttttcctgtatctgcacattgtcgttttatacacaattgccaaggtgggactgctttcaactttactgtgcttgaagctgcaaaggttctgccctgatgtttcctggaataatgctgaggactgcctttcgggtagccgccctattcagttcacttcatctcggaaatacctgacccctgccttggatccagcggccctcctgagagctgaggaaggaggaaatcctatgtgtctgctcccggagctgccacaacccatcttcccacaactcggaacttggaaaaaggaacccaggacacgactttgcttttcttttggacctagttggtgattatactctgtctcccatggagaccacgtcttgcatccttccttctatatgggatttaggatagaaattaaaaagaaaacatattattttgagtcttgatttggagaaaggtagtattcaggaggaagtaggctatgatacacatagaaaatttgaggacagtgttacttaacaaggacatttctgtctctgcagaagtcacagcttggaggaaaccagtttgcactatttgatgaggaatttggccaccaaaccactgatactttcccaaaggtttggcagaaattgttttttgagtggctcaccagagtacccagaagaatcagtatggaattagaggacagtggcctaccctaaataaagacatgagtgatgt

SEQ ID NO: 25200 - DNA, 1362 bp, Homo sapiens
tagccacggacgcgcgctcggtcccccgccgtgcgcccccggtcccgcgcccaggctcccgcccctggcctccttaccagccacttgtcgcccagctgcgaactggagcgggaggcggcggccggagggcccaggacagccccgggagggcggcgaggcggagcaggagcgccccggctccggccacattctcagagtcaggaaaaggggcgagaggccacatgtctccctctcgcccaactgaaaacgaaacggcgctccagcagattgggtggaaagagctgggtctcttttctctgtttttcacgctagaaagggcttgtaaacattgttccttttaaaatgacctaccccaggcatttgtttgggcacacttctgtcctggggtcatcgttcctaggtggcttcggacctgggacttttcctgtatctgcacattgtcgttttatacacaattgccaaggtgggactgctttcaactttactgtgcttgaagctgcaaaggttctgccctgatgtttcctggaataatgctgaggactgcctttcgggtagccgccctattcagttcacttcatctcggaaatacctgacccctgccttggatccagcggccctcctgagagctgaggaaggaggaaatcctatgtgtctgctcccggagctgccacaacccatcttcccacaactcggaacttggaaaaaggaacccaggacacgactttgcttttcttttggacctagttggtgattatactctgtctcccatggagaccacgtcttgcatccttccttctatatgggatttaggatagaaattaaaaagaaaacatattattttgagtcttgatttggagaaaggtagtattcaggaggaagtaggctatgatacacatagaaaatttgaggacagtgttacttaacaaggacatttctgtctctgcagaagtcacagcttggaggaaaccagtttgcactatttgatgaggaatttggccaccaaaccactgatactttcccaaaggtttggcagaaattgttttttgagtggctcaccagagtacccagaagaatcagtatggaattagaggacagtggcctaccctaaataaagacatgagtgatgtataaagtctagtgtcaatttattcagaaaatatcaaaattattctgggagctatgggtcaaagttgataggcacaaacaaacaaaaacgaaaggtattttaaattcacagcttggataagtaaaagggagatgttgtcatttctcttcttcaatccaactttagattttcaagccggaaaaagggtaattagaagttagaaattgttattgccagaaaatagctctaaaccctga

SEQ ID NO: 25201 - DNA, 150 bp, Homo sapiens
tacaggcaagcctgggtctttctggagatcctgggagggaggaggagagggaggaccttgggccacaggtaggacacaccgcctaatgcatctatccagggccaaggcggggtcaggatgagagggacaggcctccaaacaaatcagagt

SEQ ID NO: 25202 - DNA, 2116 bp, Homo sapiens
acttgctttttctcccgctttgtaattgtaggagaaaaccaaagaactagcagagaagcaggcgcaactccaggagcccatctcgctggccagctgcgccatggctgatctggttccagacttgcagcccattcttttctggatgtctaactccatcgagctcctgtactttatccagcagaaatgcccactctacatgcagagcatggaggagcagctggacatcacaggctcgaaggaatcgctgttctcctgcacgctgacggccagcgaggaggccatggcggtgctggaggaggtggtgctgtacgccttccagcagtgcgtctactatgtctccaagtccctgtacatctgcctcccggcactcctggagtgcccgccattccagacggagcgccgtgagagctggtcctcggcccccgaactgcccgaggagctgcgccgcgtggtgtctgtgtaccaggcagccctggacctcctgcggcagctgcaggtgcaccccgaggtggcctcgcagatgctcgcctacctcttcttcttctccgggacactgcttctcaaccagctcctcgacaggggcccctccctgagctgcttccactggcccagaggtgtccaggcctgcgcccgcctgcagcagctcctggagtggatgcggagcgccggcttcggggcggctggagagcacttcttccagaagctctcctgcaccctcaacctgctggccacacccagggcccagctcatccagatgagctggacagccctgcgggctgcgttccccgcactgagcccagcacagctgcaccggctgctgactcactaccagctggcctcggccatgggccccatgagcacctgggagccaggggcccaggacagccccgaggccttcaggtcagaggatgttctggagtcctacgaaaaccccccacccatcgtcctgcccagcgacggcttccaggtggacttggaagccaactgcctggacgacagcatctaccagcacctgctctacgtccgccactttctgtggggtctgcggagcagagccagccccggcagccctggcaggcctggcagtggggcctcccagccagtgtgccccgagggtatgcaccacgtggtccttgacgggcacctggaggccccgagctgccccctggctcccagggaccctggcccagcagcccgggaagtggccccggagcgtactcttcccttgaggggggctccctgggcacaggccccccctggaaggcaacccggccgtgggggctcccaggctggccccccgcacacggactcgtcctgcttgctcacgcctcccagcactccacttggccctgagcctggggaccccgactggccagagtccggcggcccctgtggaaaagcgctcccagagaggcagaggaacggactcagcggcctccggggtgcagctccggaaggagactctgcagcccttgcggaggagtcccctccagccccgtccagccgcagctccagcaccgaggacttctgctacgtcttcacggtggagctggaacgaggcccctccgggctggggatgggcctgatcgacgggatgcacacgcacctgggcgcccccgggctctacatccagaccctgctcccgggcagccccgcagcggccgacgggcgcctgtcgctgggggaccgtatcctggaggtgaatggcagcagcctcctgggccttggctacctgagagctgtggacctgatccgtcatggcgggaagaagatgcggttcctggtcgcgaagtccgacgtggaaacagccaagaagatccatttccgcacgccccctctctaggggggctgcgaggacacccccacaggcccggcacccggtcccacctggtgacactgggcttcctcccgccttcgtccctgttttgtaactgaccaagttgggtcccgggtggggagcctcaccctggggacatgcctgttgataacatgcatctcagtgtaggttctatttatatggcagatgacgtgaaattgtgatgtttgttacagagcttttatgtttaaagacttcaatggagaagtacggttcaataaactatttttcccgttctta

SEQ ID NO: 25203 - DNA, 1367 bp, Homo sapiens
atctgctcgggatttggcgtcggcggctccgggcgcctccagctccggctcgggctccggctccggctccgggcgccgaccaggtccccttggcccccgccgcgcgccctccaacctgctgctgccgccgccgcgccccccaggctctgccagctacccgcgctctgagcccggggccagattcccatggaagcgccgcgatgttcgccccccggctgctggatttccagaagacgaaatacgcgaggttcatgaaccaccgagtccctgcccacaagaggtaccagcccacagagtatgaacatgcggccaactgtgccacccatgctttctggatcatccccagcatcctgggcagctccaacctctacttcctgtcggacgatgactgggagaccatctctgcctggatctacggcctcggcctctgcggcctcttcgtggtgtccactgtgtttcacaccatctcctggaagaagagccacctcaggatggtggaacactgtctacacatgttcgaccggatggtcatctatttcttcatagcggcttcctacgcaccctggctgaaccttcgggagctgggcccctgggcctcccacatgcgctggctggtctggattatggcttccgtgggcaccatctatgtcttcttcttccatgagcggtacaagcttgtggagcttctctgctacgtcgtaatgggcttcttccccgccctggtcatcctctccatgcccaacaccgagggcatctgggagctggtgacccggaggggtcttctactgcctgggcatggtcttcttcaagagtgacgggaggatcccctttgcccacgccatctggcatctctttgtagcatttggtgctggtacccactactatgccatctggaggtacctctatctgcccagcaccctgcagaccaaggtgtccaaatgaggtgacccagacttgagaggtcgtttgggctttaggagtggagcacgtttctgcgaacgttaacccagagcacagcgccaaggcctgtcttccctttattgggtagagttcttgatggctccaaggtgacttctggtgacagccagatcgtccctcgagtccccagcgagaaagaaagcatttagccattcttacagaggagaaattaaccctgtaatgtgtttctattttagatgagtgtttcctaatacaagcaacattaacatcttcagaaaaggaagcaggcatggtcctgggaaaattggggaatgacgggccaatctgtgtttcctaaggtcctgaagaatctggcaaagagtcctgtgggttgttttatacctgggtggccagggcctccctctctgttaccaaagtccaggctggcg

SEQ ID NO: 25204 - DNA, 3674 bp, Homo sapiens
  misc_feature (894)..(894): n is a, c, g, or t
cccgttgcgccgccggcaggaggcgccgcggcacgcgcgggtctgggcgccggccccagccaacggcgagtgggagcagcgcgggaacgtggcggcgcggcgggttgtgccggaggtcacggcctccccacatcctttggctgaagcccacagtcctcatccatgaagcctcacccaccatgttttatgggacgcacttcatcatgtccccgcccaccaagagcaaactgaagcggcagagccagctgttgtccagcatgctgtcccggacgctgagctacaagtaccgggacctggactccaccttctccagcctgggcgccagcgatgaccccgccgagctctccacccagctgtcggcccctggtgtcctgaaggtgtttggggacagtgtctgcacaggaacccactacaagagcgtcctggccaccggcacctccagcgcccgtgagctggtgaaggaggcgctggagcggtacgccctggaccccaggcaggccggccagtacgtgctgtgtgacgtggtgggccaagccggcgatgctgggcagcggtggcaggcccggtgctttcgggtgtttggggacagtgagaagcccctcttgatccaggaattatggaaaccccgagaaggtttatcccggaggtttgagctgaggaagaggtcggacgtggaggagctggcagccaaggaggtggacaccatcacggcagggataaacgcccaggcccggaggctgcagcggagtcgcgcgaagggaaccccgaccccggccctgggggatgcccggagctctcctccaccccggttgcgccgcacagtcagtgagaccagcctgagcccagtgaacgccctgcccgctgccgcccagggccccgaggagcccggccccnacgccatgcggtactcgctgtaccagtccccgcatctgctccttctgcagggctacagccagcagcaccctggtgtatgtgctcaaccgggaccggcacacggtgggccagcggacccctccagcaagcccagcatcagcctctcagcccccgacatcctgcctctacactgcaccatccgccggcaaccgctcccggacagcggccaggccgcggggaggctggtcctggagcccatccccggggcgcacatctccgtcaacttctccgaggtggggcacaggaccgtggtgctgcaccacggggacctgctctccctggggctctactacctgctgctattcaaggaccccgcgcaggcccagcccctgcccgcccgggccttggcgcgcctccgggctgtgccgcagagctgccggctgtgcggggccgcgctcggggcccggggagccgcctcccctactcaggccgccctgccccggcgccagcagctgctcctggagtttgagccccacctggaggacacgctgctgcagaggatcatgacgttgatcgagccggggggcgacgaccacaagctgacccccgccttcctcctgtgcctctgcatccagcactcggccacccacttccagccgggcacattcgggcagctcctgctcaagatagccaggctgatccgcgagactgtctgggagaaaaccaaagaactagcagagaagcaggcgcaactccaggagcccatctcgctggccagctgcgccatggctgatctggttccagacttgcagcccattcttttctggatgtctaactccatcgagctcctgtactttatccagcagaaatgcccactctacatgcagagcatggaggagcagctggacatcacaggctcgaaggaatcgctgttctcctgcacgctgacggccagcgaggaggccatggcggtgctggaggaggtggtgctgtacgccttccagcagtgcgtctactatgtctccaagtccctgtacatctgcctcccggcactcctggagtgcccgccattccagacggagcgccgtgagagctggtcctcggcccccgaactgcccgaggagctgcgccgcgtggtgtctgtgtaccaggcagccctggacctcctgcggcagctgcaggtgcaccccgaggtggcctcgcagatgctcgcctacctcttcttcttctccgggacactgcttctcaaccagctcctcgacaggggcccctccctgagctgcttccactggcccagaggtgtccaggcctgcgcccgcctgcagcagctcctggagtggatgcggagcgccggcttcggggcggctggagagcacttcttccagaagctctcctgcaccctcaacctgctggccacacccagggcccagctcatccagatgagctggacagccctgcgggctgcgttccccgcactgagcccagcacagctgcaccggctgctgactcactaccagctggcctcggccatgggccccatgagcacctgggagccaggggcccaggacagccccgaggccttcaggtcagaggatgttctggagtcctacgaaaaccccccacccatcgtcctgcccagcgacggcttccaggtggacttggaagccaactgcctggacgacagcatctaccagcacctgctctacgtccgccactttctgtggggtctgcggagcagagccagccccggcagccctggcaggcctggcagtggggcctcccagccagtgtgccccgagggtatgcaccacgtggtccttgacgggcacctggaggccccgagctgccccctggctcccagggaccctggcccagcagcccgggaagtggccccggagcgtactcttcccttgaggggggctccctgggcacaggccccccctggaaggcaacccggccgtgggggctcccaggctggccccccgcacacggactcgtcctgcttgctcacgcctcccagcactccacttggccctgagcctggggaccccgactggccagagtccggcggcccctgtggaaaagcgctcccagagaggcagaggaacggactcagcggcctccggggtgcagctccggaaggagactctgcagcccttgcggaggagtcccctccagccccgtccagccgcagctccagcaccgaggacttctgctacgtcttcacggtggagctggaacgaggcccctccgggctggggatgggcctgatcgacgggatgcacacgcacctgggcgcccccgggctctacatccagaccctgctcccgggcagccccgcagcggccgacgggcgcctgtcgctgggggaccgtatcctggaggtgaatggcagcagcctcctgggccttggctacctgagagctgtggacctgatccgtcatggcgggaagaagatgcggttcctggtcgcgaagtccgacgtggaaacagccaagaagatccatttccgcacgccccctctctaggggggctgcgaggacacccccacaggcccggcacccggtcccacctggtgacactgggcttcctcccgccttcgtccctgttttgtaactgaccaagttgggtcccgggtggggagcctcaccctggggacatgcctgttgataacatgcatctcagtgtaggttctatttatatggcagatgacgtgaaattgtgatgtttgttacagagcttttatgtttaaagacttcaatggagaagtacggttcaataaactatttttcccgttctta

SEQ ID NO: 25205 - DNA, 3806 bp, Homo sapiens
  misc_feature (1026)..(1026): n is a, c, g, or t
atctgctcgggatttggcgtcggcggctccgggcgcctccagctccggctcgggctccggctccggctccgggcgccgaccaggtccccttggcccccgccgcgcgccctccaacctgctgctgccgccgccgcgccccccaggctctgccagctacccgcgctctgagcccggggccagattcccatggaagcgccgcgatgttcgccccccggctgctggatttccagaagacgaaatacgcgaggtcacggcctccccacatcctttggctgaagcccacagtcctcatccatgaagcctcacccaccatgttttatgggacgcacttcatcatgtccccgcccaccaagagcaaactgaagcggcagagccagctgttgtccagcatgctgtcccggacgctgagctacaagtaccgggacctggactccaccttctccagcctgggcgccagcgatgaccccgccgagctctccacccagctgtcggcccctggtgtcctgaaggtgtttggggacagtgtctgcacaggaacccactacaagagcgtcctggccaccggcacctccagcgcccgtgagctggtgaaggaggcgctggagcggtacgccctggaccccaggcaggccggccagtacgtgctgtgtgacgtggtgggccaagccggcgatgctgggcagcggtggcaggcccggtgctttcgggtgtttggggacagtgagaagcccctcttgatccaggaattatggaaaccccgagaaggtttatcccggaggtttgagctgaggaagaggtcggacgtggaggagctggcagccaaggaggtggacaccatcacggcagggataaacgcccaggcccggaggctgcagcggagtcgcgcgaagggaaccccgaccccggccctgggggatgcccggagctctcctccaccccggttgcgccgcacagtcagtgagaccagcctgagcccagtgaacgccctgcccgctgccgcccagggccccgaggagcccggccccnacgccatgcggtactcgctgtaccagtccccgcatctgctccttctgcagggctacagccagcagcaccctggtgtatgtgctcaaccgggaccggcacacggtgggccagcggacccctccagcaagcccagcatcagcctctcagcccccgacatcctgcctctacactgcaccatccgccggcaaccgctcccggacagcggccaggccgcggggaggctggtcctggagcccatccccggggcgcacatctccgtcaacttctccgaggtggggcacaggaccgtggtgctgcaccacggggacctgctctccctggggctctactacctgctgctattcaaggaccccgcgcaggcccagcccctgcccgcccgggccttggcgcgcctccgggctgtgccgcagagctgccggctgtgcggggccgcgctcggggcccggggagccgcctcccctactcaggccgccctgccccggcgccagcagctgctcctggagtttgagccccacctggaggacacgctgctgcagaggatcatgacgttgatcgagccggggggcgacgaccacaagctgacccccgccttcctcctgtgcctctgcatccagcactcggccacccacttccagccgggcacattcgggcagctcctgctcaagatagccaggctgatccgcgagactgtctgggagaaaaccaaagaactagcagagaagcaggcgcaactccaggagcccatctcgctggccagctgcgccatggctgatctggttccagacttgcagcccattcttttctggatgtctaactccatcgagctcctgtactttatccagcagaaatgcccactctacatgcagagcatggaggagcagctggacatcacaggctcgaaggaatcgctgttctcctgcacgctgacggccagcgaggaggccatggcggtgctggaggaggtggtgctgtacgccttccagcagtgcgtctactatgtctccaagtccctgtacatctgcctcccggcactcctggagtgcccgccattccagacggagcgccgtgagagctggtcctcggcccccgaactgcccgaggagctgcgccgcgtggtgtctgtgtaccaggcagccctggacctcctgcggcagctgcaggtgcaccccgaggtggcctcgcagatgctcgcctacctcttcttcttctccgggacactgcttctcaaccagctcctcgacaggggcccctccctgagctgcttccactggcccagaggtgtccaggcctgcgcccgcctgcagcagctcctggagtggatgcggagcgccggcttcggggcggctggagagcacttcttccagaagctctcctgcaccctcaacctgctggccacacccagggcccagctcatccagatgagctggacagccctgcgggctgcgttccccgcactgagcccagcacagctgcaccggctgctgactcactaccagctggcctcggccatgggccccatgagcacctgggagccaggggcccaggacagccccgaggccttcaggtcagaggatgttctggagtcctacgaaaaccccccacccatcgtcctgcccagcgacggcttccaggtggacttggaagccaactgcctggacgacagcatctaccagcacctgctctacgtccgccactttctgtggggtctgcggagcagagccagccccggcagccctggcaggcctggcagtggggcctcccagccagtgtgccccgagggtatgcaccacgtggtccttgacgggcacctggaggccccgagctgccccctggctcccagggaccctggcccagcagcccgggaagtggccccggagcgtactcttcccttgaggggggctccctgggcacaggccccccctggaaggcaacccggccgtgggggctcccaggctggccccccgcacacggactcgtcctgcttgctcacgcctcccagcactccacttggccctgagcctggggaccccgactggccagagtccggcggcccctgtggaaaagcgctcccagagaggcagaggaacggactcagcggcctccggggtgcagctccggaaggagactctgcagcccttgcggaggagtcccctccagccccgtccagccgcagctccagcaccgaggacttctgctacgtcttcacggtggagctggaacgaggcccctccgggctggggatgggcctgatcgacgggatgcacacgcacctgggcgcccccgggctctacatccagaccctgctcccgggcagccccgcagcggccgacgggcgcctgtcgctgggggaccgtatcctggaggtgaatggcagcagcctcctgggccttggctacctgagagctgtggacctgatccgtcatggcgggaagaagatgcggttcctggtcgcgaagtccgacgtggaaacagccaagaagatccatttccgcacgccccctctctaggggggctgcgaggacacccccacaggcccggcacccggtcccacctggtgacactgggcttcctcccgccttcgtccctgttttgtaactgaccaagttgggtcccgggtggggagcctcaccctggggacatgcctgttgataacatgcatctcagtgtaggttctatttatatggcagatgacgtgaaattgtgatgtttgttacagagcttttatgtttaaagacttcaatggagaagtacggttcaataaactatttttcccgttctta

SEQ ID NO: 25206 - DNA, 446 bp, Homo sapiens
gctagtgagtatatttagagttatttcttgattacatgctaaacaaggggcggattattcatgagttttctaggaaagggatgaagatttcctggaactgagggtccttcccctttttagactacataggtaacttcctgacgttaccgtggcatttggaaactgtcactgcgctggtgggagtgtcttttagaatgctaatgaattataattagcaactaacgagcagcaaggatgactagagatcactgtcgttgctgtcttggttttggccagcttctctacagcatcctattttatcaggagtgtctttgggacccgcatcttgaacctgtaccttgtgctgacctcctgtctcatcccgtgactaagaatgcctgtcctcctgggaatgcagccccgcaggtctcagcctcgtttttacccagcccctatttaagacgcgg

SEQ ID NO: 25207 - DNA, 6012 bp, Homo sapiens
  misc_feature (894)..(894): n is a, c, g, or t
cccgttgcgccgccggcaggaggcgccgcggcacgcgcgggtctgggcgccggccccagccaacggcgagtgggagcagcgcgggaacgtggcggcgcggcgggttgtgccggaggtcacggcctccccacatcctttggctgaagcccacagtcctcatccatgaagcctcacccaccatgttttatgggacgcacttcatcatgtccccgcccaccaagagcaaactgaagcggcagagccagctgttgtccagcatgctgtcccggacgctgagctacaagtaccgggacctggactccaccttctccagcctgggcgccagcgatgaccccgccgagctctccacccagctgtcggcccctggtgtcctgaaggtgtttggggacagtgtctgcacaggaacccactacaagagcgtcctggccaccggcacctccagcgcccgtgagctggtgaaggaggcgctggagcggtacgccctggaccccaggcaggccggccagtacgtgctgtgtgacgtggtgggccaagccggcgatgctgggcagcggtggcaggcccggtgctttcgggtgtttggggacagtgagaagcccctcttgatccaggaattatggaaaccccgagaaggtttatcccggaggtttgagctgaggaagaggtcggacgtggaggagctggcagccaaggaggtggacaccatcacggcagggataaacgcccaggcccggaggctgcagcggagtcgcgcgaagggaaccccgaccccggccctgggggatgcccggagctctcctccaccccggttgcgccgcacagtcagtgagaccagcctgagcccagtgaacgccctgcccgctgccgcccagggccccgaggagcccggccccnacgccatgcggtactcgctgtaccagtccccgcatctgctccttctgcagggctacagccagcagcaccctggtgtatgtgctcaaccgggaccggcacacggtgggccagcggacccctccagcaagcccagcatcagcctctcagcccccgacatcctgcctctacactgcaccatccgccggcaaccgctcccggacagcggccaggccgcggggaggctggtcctggagcccatccccggggcgcacatctccgtcaacttctccgaggtggggcacaggaccgtggtgctgcaccacggggacctgctctccctggggctctactacctgctgctattcaaggaccccgcgcaggcccagcccctgcccgcccgggccttggcgcgcctccgggctgtgccgcagagctgccggctgtgcggggccgcgctcggggcccggggagccgcctcccctactcaggccgccctgccccggcgccagcagctgctcctggagtttgagccccacctggaggacacgctgctgcagaggatcatgacgttgatcgagccggggggcgacgaccacaagctgacccccgccttcctcctgtgcctctgcatccagcactcggccacccacttccagccgggcacattcgggcagctcctgctcaagatagccaggctgatccgcgagactgtctgggagaaaaccaaagaactagcagagaagcaggcgcaactccaggagcccatctcgctggccagctgcgccatggctgatctggttccagacttgcagcccattcttttctggatgtctaactccatcgagctcctgtactttatccagcagaaatgcccactctacatgcagagcatggaggagcagctggacatcacaggctcgaaggaatcgctgttctcctgcacgctgacggccagcgaggaggccatggcggtgctggaggaggtggtgctgtacgccttccagcagtgcgtctactatgtctccaagtccctgtacatctgcctcccggcactcctggagtgcccgccattccagacggagcgccgtgagagctggtcctcggcccccgaactgcccgaggagctgcgccgcgtggtgtctgtgtaccaggcagccctggacctcctgcggcagctgcaggtgcaccccgaggtggcctcgcagatgctcgcctacctcttcttcttctccgggacactgcttctcaaccagctcctcgacaggggcccctccctgagctgcttccactggcccagaggtgtccaggcctgcgcccgcctgcagcagctcctggagtggatgcggagcgccggcttcggggcggctggagagcacttcttccagaagctctcctgcaccctcaacctgctggccacacccagggcccagctcatccagatgagctggacagccctgcgggctgcgttccccgcactgagcccagcacagctgcaccggctgctgactcactaccagctggcctcggccatgggccccatgagcacctgggagccaggggcccaggacagccccgaggccttcaggtcagaggatgttctggagtcctacgaaaaccccccacccatcgtcctgcccagcgacggcttccaggtggacttggaagccaactgcctggacgacagcatctaccagcacctgctctacgtccgccactttctgtggggtctgcggagcagagccagccccggcagccctggcaggcctggcagtggggcctcccagccagtgtgccccgagggtatgcaccacgtggtccttgacgggcacctggaggccccgagctgccccctggctcccagggaccctggcccagcagcccgggaagtggccccggagcgtactcttcccttgaggggggctccctgggcacaggccccccctggaaggcaacccggccgtgggggctcccaggctggccccccgcacacggactcgtcctgcttgctcacgcctcccagcactccacttggccctgagcctggggaccccgactggccagagtccggcggcccctgtggaaaagcgctcccagagaggcagaggaacggactcagcggcctccggggtgcagctccggaaggagactctgcagcccttgcggaggagtcccctccagccccgtccagccgcagctccagcaccgaggacttctgctacgtcttcacggtggagctggaacgaggcccctccgggctggggatgggcctgatcgacgggatgcacacgcacctgggcgcccccgggctctacatccagaccctgctcccgggcagccccgcagcggccgacgggcgcctgtcgctgggggaccgtatcctggaggtgaatggcagcagcctcctgggccttggctacctgagagctgtggacctgatccgtcatggcgggaagaagatgcggttcctggtcgcgaagtccgacgtggaaacagccaagaagatccatttccgcacgccccctctctaggggggctgcgaggacacccccacaggcccggcacccggtcccacctggtgacactgggcttcctcccgccttcgtccctgttttgtaactgaccaagttgggtcccgggtggggagcctcaccctggggacatgcctgttgataacatgcatctcagtgtaggttctatttatatggcagatgacgtgaaattgtgatgtttgttacagagcttttatgtttaaagacttcaatggagaagtacggttcaataaactatttttcccgttcttagagggtgccctgctggggtctcaactcgggcagcaggcgtgggctgctcggaggggccgcaggggctccccatggcctctgcctgccaccggcacgggagaatgcagtgacagctgtcatcaggggatcatctgaactgactctccctgcccccgtcccacccagacacagggcactgcaggaagcagctccaacagcccctcccagctgaagcagggccagacctggcagaggatgctggacttctgatcccgctgctcagcacaggccccagagaaaggtctagacacccaggcgttggaaagtggaccggcctgatggtctctgaggcgccgagcccaccctgggccctgcttcctctcccaggactcctgctccctcctgagttcctctcccctactaaagccaccagcgtggccctgataccaggctggcggccccaggcccttaatcctcaccagcgtccccctggccaccggccctaacccgggcaggaggccagcgtccctctccaccagctggctgaccatgcgcaggaccagggcagggcacttgctgcctcggggtgacagcgtgggtcgctgggcatcctcagcagctccaccaactgggtgtgggtggcttccgcgccctcctggctgtggtggaactggtggcccagggtcatctttgatagcaacagagaaaccctggggaagagggtcccggcatcagttgcagatgcacctctcactgggacagaggtctgtgcggggtccccagatcggtgtcctgggtctgtcccaggccctgggcctcgtgcagctccacgctgccccctggtgtgcgctacggcgaggtgcagcgcgtccgccccgcgccctctgccgacccgcagttctgtgtgcggctccgcattgcgcctggctcgaaacggcgaccactgccaggttcccaaaatactggataaaatatatatatatatatagtgtttgtatatatatttaagatatgtaaaatatatgaatatatataaatatataattatatatgaatatattacatattcatgtatacgtaatatattcgtatattttataaacattttttatattttattatataaaatataaatatttaatttttttttatgagacggagtctcgctctgtgacccaggctggagtgcagtggtgcaatctcagctcactgcaacctccacctcccaggttcaagcaattctcctcagtctcctgagtagctgggattacaggcgcctgccaccacgcttggctaatttagtacttttagtagagacagggtttcaccacgttggccaggctgatttcaaactgacatcaagtgatctgcccgccttgccctcccaaagtgctgggattacaggcgtgggattaccatgcctggccttgttctgtttcttttcctaggagtcccacaacgtgtgtgttagcactgccgagaatgtctcacagctctggacggtctgcatttctggacctggtgcagatcccaggatcctggactctgatttgatgccttaacggtggaagggggttgagtatattttttatgtgggaggggtgtggactgtggccagaggaaagacagtggcaaggcatttccaaaggtggccaccaacagttcctcccacaaagagaagggggcttatctcttcttccctgcaatattctccggccttctgacttgctccgaacaacaggatgcagcataagtgatattctgggaccttccaagccagactgaagggcctttggtttctattttcatgctcctggaactcagcatccatggaaagaagctcttggcatcaccccaaggaagggaggccccgtggagtcggggaggcccagctagcctctggccgctgaagcacctagctgaggtgcgggactggtgagggctgccactggctgttctggtcttgctgagcttccaggcgaatgcagtcccaccagtgatcccggggacaccacgtggagcagaacgacttcccagccaggccccagacaatctacaacactgtgaaaggagtgtctttgggacccgcatcttgaacctgtaccttgtgctgacctcctgtctcatcccgtgactaagaatgcctgtcctcctgggaatgcagccccgcaggtctcagcctcgtttttacccagcccctatttaagacgcggttgctgtggctcccacgcctctgacctgagtcatgcagtatgtggccttgggtctggattcttttgtgtccggaattggtgggttcttggtctcactgacctcaagaatgaagtcgcggaccctcgcggtgagtgttacagttctt

SEQ ID NO: 25208 - DNA, 1533 bp, Homo sapiens
  misc_feature (2)..(2): n is a, c, g, or t
  misc_feature (6)..(6): n is a, c, g, or t
  misc_feature (8)..(8): n is a, c, g, or t
gncacnancagagaccagtggggcagagacaggcccagtgcagagcggctcagtggggctggagggttcctggctacaaggccttgttctcagtcctgaactgctcggatgtcacaccgggtggtcggcgggaattcagaagggatgagtcctagggtggggccagtcactgtggccaggatcccagcctcctgtgtccacagggcaggggactcagggctcaatctgctggcccctgggttcccacaccgttgggcggggcggcctggcgagggaggcagcttctcctgtggccattacgggcatcctctctcccctgcagaggatgttctggagtcctacgaaaaccccccacccatcgtcctgcccagcgacggcttccaggtggacttggaagccaactgcctggacgacagcatctaccagcacctgctctacgtccgccactttctgtggggtctgcggagcagagccagccccggcagccctggcaggcctggcagtggggcctcccagccagtgtgccccgagggtatgcaccacgtggtccttgacgggcacctggaggccccgagctgccccctggctcccagggaccctggcccagcagcccgggaagtggccccggagcgtactcttcccttgaggggggctccctgggcacaggccccccctggaaggcaacccggccgtgggggctcccaggctggccccccgcacacggactcgtcctgcttgctcacgcctcccagcactccacttggccctgagcctggggaccccgactggccagagtccggcggcccctgtggaaaagcgctcccagagaggcagaggaacggactcagcggcctccggggtgcagctccggaaggagactctgcagcccttgcggaggagtcccctccagccccgtccagccgcagctccagcaccgaggacttctgctacgtcttcacggtggagctggaacgaggcccctccgggctggggatgggcctgatcgacgggatgcacacgcacctgggcgcccccgggctctacatccagaccctgctcccgggcagccccgcagcggccgacgggcgcctgtcgctgggggaccgtatcctggaggtgaatggcagcagcctcctgggccttggctacctgagagctgtggacctgatccgtcatggcgggaagaagatgcggttcctggtcgcgaagtccgacgtggaaacagccaagaagatccatttccgcacgccccctctctaggggggctgcgaggacacccccacaggcccggcacccggtcccacctggtgacactgggcttcctcccgccttcgtccctgttttgtaactgaccaagttgggtcccgggtggggagcctcaccctggggacatgcctgttgataacatgcatctcagtgtaggttctatttatatggcagatgacgtgaaattgtgatgtttgttacagagcttttatgtttaaagacttcaatggagaagtacggttcaataaactatttttcccgttctta

SEQ ID NO: 25209 - DNA, 1439 bp, Homo sapiens
atctgctcgggatttggcgtcggcggctccgggcgcctccagctccggctcgggctccggctccggctccgggcgccgaccaggtccccttggcccccgccgcgcgccctccaacctgctgctgccgccgccgcgccccccaggctctgccagctacccgcgctctgagcccggggccagattcccatggaagcgccgcgatgttcgccccccggctgctggatttccagaagacgaaatacgcgaggttcatgaaccaccgagtccctgcccacaagaggtaccagcccacagagtatgaacatgcggccaactgtgccacccatgctttctggatcatccccagcatcctgggcagctccaacctctacttcctgtcggacgatgactgggagaccatctctgcctggatctacggcctcggcctctgcggcctcttcgtggtgtccactgtgtttcacaccatctcctggaagaagagccacctcaggatggtggaacactgtctacacatgttcgaccggatggtcatctatttcttcatagcggcttcctacgcaccctggctgaaccttcgggagctgggcccctgggcctcccacatgcgctggctggtctggattatggcttccgtgggcaccatctatgtcttcttcttccatgagcgaacagggagctgtgtgcagtttcttcgtggggaggcatgtcctaaggccggcacggcttgtcttcctgccaggtacaagcttgtggagcttctctgctacgtcgtaatgggcttcttccccgccctggtcatcctctccatgcccaacaccgagggcatctgggagctggtgacccggaggggtcttctactgcctgggcatggtcttcttcaagagtgacgggaggatcccctttgcccacgccatctggcatctctttgtagcatttggtgctggtacccactactatgccatctggaggtacctctatctgcccagcaccctgcagaccaaggtgtccaaatgaggtgacccagacttgagaggtcgtttgggctttaggagtggagcacgtttctgcgaacgttaacccagagcacagcgccaaggcctgtcttccctttattgggtagagttcttgatggctccaaggtgacttctggtgacagccagatcgtccctcgagtccccagcgagaaagaaagcatttagccattcttacagaggagaaattaaccctgtaatgtgtttctattttagatgagtgtttcctaatacaagcaacattaacatcttcagaaaaggaagcaggcatggtcctgggaaaattggggaatgacgggccaatctgtgtttcctaaggtcctgaagaatctggcaaagagtcctgtgggttgttttatacctgggtggccagggcctccctctctgttaccaaagtccaggctggcg

SEQ ID NO: 25210 - DNA, 3914 bp, Homo sapiens
  misc_feature (894)..(894): n is a, c, g, or t
  misc_feature (3914)..(3914): n is a, c, g, or t
cccgttgcgccgccggcaggaggcgccgcggcacgcgcgggtctgggcgccggccccagccaacggcgagtgggagcagcgcgggaacgtggcggcgcggcgggttgtgccggaggtcacggcctccccacatcctttggctgaagcccacagtcctcatccatgaagcctcacccaccatgttttatgggacgcacttcatcatgtccccgcccaccaagagcaaactgaagcggcagagccagctgttgtccagcatgctgtcccggacgctgagctacaagtaccgggacctggactccaccttctccagcctgggcgccagcgatgaccccgccgagctctccacccagctgtcggcccctggtgtcctgaaggtgtttggggacagtgtctgcacaggaacccactacaagagcgtcctggccaccggcacctccagcgcccgtgagctggtgaaggaggcgctggagcggtacgccctggaccccaggcaggccggccagtacgtgctgtgtgacgtggtgggccaagccggcgatgctgggcagcggtggcaggcccggtgctttcgggtgtttggggacagtgagaagcccctcttgatccaggaattatggaaaccccgagaaggtttatcccggaggtttgagctgaggaagaggtcggacgtggaggagctggcagccaaggaggtggacaccatcacggcagggataaacgcccaggcccggaggctgcagcggagtcgcgcgaagggaaccccgaccccggccctgggggatgcccggagctctcctccaccccggttgcgccgcacagtcagtgagaccagcctgagcccagtgaacgccctgcccgctgccgcccagggccccgaggagcccggccccnacgccatgcggtactcgctgtaccagtccccgcatctgctccttctgcagggctacagccagcagcaccctggtgtatgtgctcaaccgggaccggcacacggtgggccagcggacccctccagcaagcccagcatcagcctctcagcccccgacatcctgcctctacactgcaccatccgccggcaaccgctcccggacagcggccaggccgcggggaggctggtcctggagcccatccccggggcgcacatctccgtcaacttctccgaggtggggcacaggaccgtggtgctgcaccacggggacctgctctccctggggctctactacctgctgctattcaaggaccccgcgcaggcccagcccctgcccgcccgggccttggcgcgcctccgggctgtgccgcagagctgccggctgtgcggggccgcgctcggggcccggggagccgcctcccctactcaggccgccctgccccggcgccagcagctgctcctggagtttgagccccacctggaggacacgctgctgcagaggatcatgacgttgatcgagccggggggcgacgaccacaagctgacccccgccttcctcctgtgcctctgcatccagcactcggccacccacttccagccgggcacattcgggcagctcctgctcaagatagccaggctgatccgcgagactgtctgggagaaaaccaaagaactagcagagaagcaggcgcaactccaggagcccatctcgctggccagctgcgccatggctgatctggttccagacttgcagcccattcttttctggatgtctaactccatcgagctcctgtactttatccagcagaaatgcccactctacatgcagagcatggaggagcagctggacatcacaggctcgaaggaatcgctgttctcctgcacgctgacggccagcgaggaggccatggcggtgctggaggaggtggtgctgtacgccttccagcagtgcgtctactatgtctccaagtccctgtacatctgcctcccggcactcctggagtgcccgccattccagacggagcgccgtgagagctggtcctcggcccccgaactgcccgaggagctgcgccgcgtggtgtctgtgtaccaggcagccctggacctcctgcggcagctgcaggtgcaccccgaggtggcctcgcagatgctcgcctacctcttcttcttctccgggacactgcttctcaaccagctcctcgacaggggcccctccctgagctgcttccactggcccagaggtgtccaggcctgcgcccgcctgcagcagctcctggagtggatgcggagcgccggcttcggggcggctggagagcacttcttccagaagctctcctgcaccctcaacctgctggccacacccagggcccagctcatccagatgagctggacagccctgcgggctgcgttccccgcactgagcccagcacagctgcaccggctgctgactcactaccagctggcctcggccatgggccccatgagcacctgggagccaggggcccaggacagccccgaggccttcaggtcagaggatgttctggagtcctacgaaaaccccccacccatcgtcctgcccagcgacggcttccaggtggacttggaagccaactgcctggacgacagcatctaccagcacctgctctacgtccgccactttctgtggggtctgcggagcagagccagccccggcagccctggcaggcctggcagtggggcctcccagccagtgtgccccgagggtatgcaccacgtggtccttgacgggcacctggaggccccgagctgccccctggctcccagggaccctggcccagcagcccgggaagtggccccggagcgtactcttcccttgaggggggctccctgggcacaggccccccctggaaggcaacccggccgtgggggctcccaggctggccccccgcacacggactcgtcctgcttgctcacgcctcccagcactccacttggccctgagcctggggaccccgactggccagagtccggcggcccctgtggaaaagcgctcccagagaggcagaggaacggactcagcggcctccggggtgcagctccggaaggagactctgcagcccttgcggaggagtcccctccagccccgtccagccgcagctccagcaccgaggacttctgctacgtcttcacggtggagctggaacgaggcccctccgggctggggatgggcctgatcgacgggatgcacacgcacctgggcgcccccgggctctacatccagaccctgctcccgggcagccccgcagcggccgacgggcgcctgtcgctgggggaccgtatcctggaggtgaatggcagcagcctcctgggccttggctacctgagagctgtggacctgatccgtcatggcgggaagaagatgcggttcctggtcgcgaagtccgacgtggaaacagccaagaagatccatttccgcacgccccctctctaggggggctgcgaggacacccccacaggcccggcacccggtcccacctggtgacactgggcttcctcccgccttcgtccctgttttgtaactgaccaagttgggtcccgggtggggagcctcaccctggggacatgcctgttgataacatgcatctcagtgtaggttctatttatatggcagatgacgtgaaattgtgatgtttgttacagagcttttatgtttaaagacttcaatggagaagtacggttcaataaactatttttcccgttcttaaaaaaaaaaaaaaaaaaaaaaacaaaacaaaaaaaaaactcccggaggggaccaaaatggcgcgggggcggcgagaacacaggggcgttataggacgtgggcccagtggtgcaaaagttgtgtttctgtagacccagtttttttggcacacgggggggagaaccggcgcgggcgcccccaaaggggggcgcggaataaaattccggacaacgcagggttaccctgtagaggcgcgacacn

SEQ ID NO: 25211 - DNA, 418 bp, Homo sapiens
ttttcttggcttctgaaagtcattctcaggcagcacgagaactttaacttttctgtctgtatgtttctcttggtatttttttctctcttcgctaattttgcattttgcttttgtttctggtttatgcatgaaggataagttatgggggcatcaataattagtggaatttgactttatgttcatactatttggtaatttagataagtgaattaaaggaccaaagaggtctattctctattgggcaaaaggatagagaattcagattgttagtctcatttgtttgtccattttgagctcaaatcaattgaaaattttatcctcatcaggagagcatacgggtctacgatatctggccctgtgagtttttgtgttgctgtctttacttttaaactatgaataaaactgtacaactgaagct

SEQ ID NO: 25212 - DNA, 812 bp, Homo sapiens
gtgcactgtagcttcagtcctttgcccacagtcacatagctagcatatgtccaaatgatagtcaaaccttagtgtctgattctctgaatctatgttgtcgtctactttttctgtaacttttaattattaagtagttagggttccttcctgactatggattcatttgggaccatcacccaagattagtgagagatactttttaagacaaagtttatgatggaatatttcttggaattcatagcagctcaaagtaagtgttaactattggtgggttcttaaggaccagcatgtccaagggatagatagattggtaaattactgtatgtacctgtcttttacaaagctataagatatttaagtacccgttttgtaattttccacttaaactgatatgtttgatgaacttggcagtctaactgcattggttaaaaggatgcacatttatatttctaaatgaaatggaatactgaatttaaaaggtgatgttttctctattaagtatgaaaatagatacaaatctggccaggcgcggtgctcacgcctgtagtcccagcgctttgggaggccaaggtggtcagatcacctgaggtcaggagttcgagaccagcctggctaacatggtgaaaccccatttctactaaaaatacaaaaaattagccagacgtgttggcgggcacctgtaatctcagctactcgggaggctgaggcaggagaatcgcttgaacccaggtggcagaggttgcagtgagccaagatcttgccattgcactccagcctgagcaacaagagcaaaacaccatctcaaaaaaaaa

SEQ ID NO: 25213 - DNA, 529 bp, Homo sapiens
tgttaatctcatcctaaaacactctcatagacacacatagaaataatatttggtctgggcacctgttggcccaattaagttgatgcataaaattaaccatcacaccaagaaatacctctcctttccccaaacccttcatagtacgtgctatatttctctttgaatctaagaagattatcttctatgaggaaataatctgctccacacagaaacctgatacagagctctttcaataatgactcattctcaacatcatgaaattatattcgaagttgcagaaaattcactattgtatattgaatgctacattgaaattggaaagaaaaaggtgatataaaataaaagctattacatattttgtgcttctccctaatctgctttattcattggaaattcctacttaagtttagtctgcttaaaacaagctagatacttgattttgcatgcaacaccttggctgttacttttactgtctcctagcactgtgctacagactgcaaaatatttagagaaaattcagacctcgctc

SEQ ID NO: 25214 - DNA, 801 bp, Homo sapiens
ggccaggtgcagtgactcacgcctgaaatcccagcactttggaaggccaaggcgggaggatcacgaggtcaaaagatcgagaccatcctggccaccatggtgaaaccccatctctactaaaagtacaaaaaaaaattagccgggcgtggtgatgcacgcctgtagtcccagctacttgggaggctgaggcaggagactcgcttgaacctgggaggcagaggttgcagtgagccgagatcgtgccactgcactccagcctggcaaaagagcgagactgtctaaaaaaagaaaaataaaaagcaaactacagtataaagtgggttacagaaagtctcaatgatgtattcatatgtaaaaaattaaaggagctgcacacttaaatgtgcactatttattgtaagttatacctcaataaaaggttttctttaatcttcataaaaaaaacaaagaaaggctgctaagtaaaaagcaatacattaaatttctcatgttaacattaaagtactgcatacctaacatcaataggaaaaaataatctaaaaggattactctgttggtttgtgctttgaggacaatttcttttttttacaaagattgctcaatgtggttgtgttctagcatgaagttcagttgtttggccttgcgcagtggttcacacctgtaatcccagcactttgggaggccgaggcgggcggatcacagggtcaggagatcgagaccatcctggctaacgcagtgaaaccgtgtttctactaaaaatacaaaaaaattagccaggcttggtggtgggcgcctatagtc

SEQ ID NO: 25215 - DNA, 392 bp, Homo sapiens
tgctaatgtttcaaattgcctgctggtttattatgttttcccttacttaggcaagtaaagttaagagctattgaagttcacggccatgagggcacatccatggatatcataaagcagcccttttacattttctctctctgcgaatccagccttcagcaggatgattaacagcttcaacctggggaaagaacgcagtctttcctctggggcttcccagacccaagaccctgcccatccccatcacagctctctaagcctgactgcctgtgaggtggggaaagactcaaagaaactgtgccaatcccaatgatacccagggcccgactactgcagggaagcagaaatgatgccttgtaaattggttataaaatggccttgtccaaaggtatgtg

SEQ ID NO: 25216 - DNA, 381 bp, Homo sapiens
tgttcattcagaaaaggtgatatgtataacccagtgtccagttgggtcaactgttttctctctttcacctccttgttagatagtgtctaataattgttccttaaaagcattttgagaaactagtctccatttcagaattttctaatacttgcccagtacccaacacccaataggtgtttgatgcacagttattgaaattgaattaaattgtgaaggatactaataagactcctgcatgtgctgtgttttaggaatattcaccccagcacagtggctcacgcctattcaggagggtaggggtttggggcggtggggaggatcacttgaagccaggagttccagaccagccttggcaacatagcaagacaccatctgtaccaa

SEQ ID NO: 25217 - DNA, 564 bp, Homo sapiens
caattaagacaactctccgtcttaactctttaaaatatctctagcaagtggttacttagcttctgcttgaacacatccactgacaaggagctcactggtctggacagtttattcaatttctagacagctcattcaatttctggacagctctaaacactgcaaatcattccctgtaatcaggtgaagggacctactctaactttaatttagtctttcttttttactcccttaagtcctacagaacatacagttcttctttcacaggaggaatagatatctgctatttgaatactattgccaagctatgcactctctgtcctctttatgttaaattctttaggcccttcaaacattttaaaatgatatggttttatattccagtgacattttagacatgttatctggaatacatgtcatctagttaatgtccctcttaaaatgtggcaccatagcagaacatggttgccaaggaaaaaatatgaaaaaccatgtttccaaatttcattttctattaggagataccttgtaatatgattaaatttccttttaaatcttaaaaaaaaa

SEQ ID NO: 25218 - DNA, 215 bp, Homo sapiens
ttttagagtttcagttgtatttccctatgaggccttgaatttagcaaaccttagttaattaactttttaaaggaaaaatgtgctcttacattagtggcttttaagcatttcttccgactttaccggcctttcccccttaggacaacatttaaaataagtgttttcaacaaacagagcaaataccttgtgaataaacatcaatttcacacaaccag

SEQ ID NO: 25219 - DNA, 455 bp, Homo sapiens
ggaaatgagtgttccacgctctctgggttctacccttcttctttgtagcctcccagccaggggtctggtggaggtctgactcctctgtcctgtgcccttggatgtggtatggaggaggggagaataaggcagcccccaggttctgggcgcaccccactccctacgtgggaagggcaggtggctccctctctagcctgccgtggtggcagggtccacagaccccactggggcccaacaacgtgaggccctgccttgccctgcactgggcgcctgtgtacccagtctcccaaggccttgtcccacctcacagccaagctgctcacctggatgcctgccgctacggcccagctctgctaccctgaggactcagctgcactgtgcagggaaggttctaggaccaggggaagccttgggggatgggcagggctgtctgccagcacctgggccagtgaggc

SEQ ID NO: 25220 - DNA, 373 bp, Homo sapiens
aatggtgaaaagaaaactcccagatatcagctgttagccagccttaaaagctactagtcccgatcagaggaggaggacagggcgctctcaaagctaagtctccaagaacagggaggaatacctagattgcctgagatactagagtacttggggaaaaaaattctggtgggaatctggcacttctgatgagcactggggaaaaagttaaaggctattttttaaaatctatgcaattttttaaaaaggcaatcattaactgcagacaaaacgaatggctgtgtaaggaaagtaagtgtattcatagcacaatacttggcccttcaaagaataaaagttatgtagtcatcattaataccaatactgattattgatt

SEQ ID NO: 25221 - DNA, 548 bp, Homo sapiens
ttttgtattttttgtagagacagggtttcacactgttacccagggtggtctcgaactcctgagctaaagcgatccacccgcctcagcctctcaaagggctaggattacaggcatgaccaagcctgtgccactgcactccagcctgggcgacaaagcaagactgagtctcaaaaataataataataataatacaaaaataacctggagaatacacctatttttatgatgtcctaatctgagtagcaaaactggaatagcaacataaatgaggcaaagactatcaagcagtcagatattatcataggggaagtctaaagatcaacccaaatcgcagagttaatcatacagtggttgtttcattggcacatacaaccagagtccaaatcgccaagataatcactgactcatccttcactctcaatcagcttttacattatggtgtttcagtagagaaatttttattgcttacatgtcctcacttattatgcaggatcagcaaaatgcacactgcatgcattcacacactaaccacacaccttctcaacctc

SEQ ID NO: 25222 - DNA, 448 bp, Homo sapiens
  misc_feature (440)..(440): n is a, c, g, or t
acgaatttcttgcaaagatcttggccgtggtgactgtgagggctggctttggaaaaagaaagatgcgaagagttacttttcacagaaatggaaaaaatattggtttgtcctaaaggatgcatccctttattggtatattaatgaggaggatgaaaaagcagaaggattcattagcctgcctgaatttaaaattgatagagccagtgaatgccgcaaaaaatatgcattcaaagcctgtcatcctaaaatcaaaagcttttattttgctgctgaacatcttgatgatatgaacaggtgggctttaacagaattaatatgctggactgcagggatatggcagaaaggggagagggtttaaggcagggaaccaaggattacttgggagttgaggagttgacccagggaagggaggccaggttacttcccttccaaccaccccnaaaccagg

SEQ ID NO: 25223 - DNA, 423 bp, Homo sapiens
actaatattcgttgagccttttagtagggatctaccttttactagagattgagcactcctcatacattgtctcattaaaccaactctccaaagtagtatctgtcctgttctaccgaaagaacaactcaaaaatgttgcattgccagtaagtggtggagctggaatgtatctgccctcaaagcttcacggacttgctttgaagaagatggtataattcaaagtactttcaaaaggacatagcagtatactgaggttaaaaaaaattagtattcccaaactgagatccttctgtgagctttgtaaccctggcagttagttgcaatactaccaatttggccatcaagaacattctgatatgtttaagctacagtgggaaagccaagatatgaaaacatcacccatgggaattttgagactagagta

SEQ ID NO: 25224 - DNA, 446 bp, Homo sapiens
gaacattctccaagatagatcatatgataggccacaaaacaagtctcaataagtttaagaaaatcaaaattatcttgagtattctctcagacagcagtgcaataatattgtaaatcaattccaaatggaatcctcaaaattatgtaaatatataaaattaaataatccactcctgaaagattgttggtcgataatgaaatcaagatggaaatttaaaaaaatctttgaactgaatgacaatagtaatataacctatcaaaaactctgggatacagcaaaagcagtgctaagagaaaagttcatagcattaatcgcttatgtcaaaaagtctgaaacagcacaaatagacaattaaggtcacatctcaaggaactagagaaacaggaacaaacccaacagaagaaaggaaataacaatgatcagagaaggactaaatgaaatgcaaa

SEQ ID NO: 25225 - DNA, 396 bp, Homo sapiens
tccccaactacagggcaagcagttggattagctcagtggtttgcagttagggacagaagttgtcggtgagcacaggatcattttagatggtagagagatgagatttaagtaacgttaaatcgcacactcagacgctgaaccagcatccagttctcttttaaacctgattttgtcaaggataaagtctcaggatggtgctaatatggttttaacacctccctaatcctcactgagctcacttttcaaagccaggaggacacagaagcctcatcaggccacctaacatttattacactgaaccatctgcaaaagttgttttaggaaggtcaaaaagggtcaagtatcagcaatttcaggtggtccaacccaataaacatattattttcttttcattgt

SEQ ID NO: 25226 - DNA, 2708 bp, Homo sapiens
agtacaaacaaaaagccttaattcccataggagaactgagacttacaagtgggaaagggagtgcaaaacagatacaagttcagaatttatacagcagaaacaatctaacattgtagaggttctttttttttttttctttttctttttgagacggagtctttcattctatcacccaggatggagcacagtggcgcaatctcggctcactgcaatctccgccacctagattcaagcaattctgtctcggcctcctgagtagctgggattacagacaggcaccaccatgcccagctattttttgtacttttagtggagacggggtttcaccatgttgaccggcctcttctcgaacttctggcctcaggtgatcctcccacctcggcctcccaaagtgctgggattacaggcgtgagccactgtgcccaacctaacattgtagaggttctgattccatcatacgtagcttgtgtccctggactcaatgtagcttatctcattctaaatggcctttttcatgctacagtttaaaaacagactagctccgctctggtgacagctagagatcatatcatcagacaaatgagtgacctacttcacaacttgaccttttgcatcaggatccaaagagtaaattctttccttcatcattttagtttctgattaacagttcttccccagatgatgtactagggggacttgattcagtttgttttacatataagcaaatctgtatgaccttggttacaattatctgcaagtttcctgattgtcttacttgctttgttatagttacaacagtgctaactccttcaagtgtaacttccacaactgctcagtacctactagcttggtcttttcttgccaaacctttcttccctacatagaattgtctagagtcccttcacagcaaatggaagtttagcctatataatgtaccctgggacaagtttagaatgtggattatcaccaatcattgacatttaaaaaaaaaacaacaacaacaaaaggtgctccttgtaacttgcagggcatagtacactgccttatgtgaaatttggtcatggaatgtactcataagagataagtgctgacagttaaaaagatgagtatggcccttccctggagatgcttaacagtctagtagaaaataaacataacatttttttcaattcccatgagatactatgttggcatgagaggcatatttttacagaattttgaagacgacttatttaaattagttttgagttttggttctattactacaaacaaaatgagtaattattgtgtcatatggttatttagacatctaagagtgaacaaaaatgataagtgtgcttagagaattaaatatctccactgaggcatggtagcaccacaggaaagatgtgtcccgtagcagatatgagataacttagctattggaaataatctaggactaaagtaattgatcaaaacaaaaactggggggaaataactgaacatgtagcccaactccagagctttgcaaatttataagcttaagtggtggtcacgcctgtagtcccagcactttgggaggctgaggcgggtggatcatgaggtcaggagatcgagaccatcctggctaacacggtgaaaccccgtctctactgaaaatgcaaaaaattggccgggcgcagtggcaggcacctgtggtcccagctactcgggaggctgaggcaggagaatggcgtgaaccctggaagcggtgtttgcagtgggcagagattgcaccactgcactccagcctggggaacaaagcaagactccgtctcaaaaggaaaaaaaaatatatggtcagatttaacgtatgcatttaaaaggacaaaaattctgcattaagaacttgggagaggggttaaaaaaactcaaatttaactgtttaaagagctcctaagaaaagcattgcgatattttgataaaagatcaaaaacattctaatagacaattttttaaaatatggctttacttttgcctaatgttgcattgggttcattcattacaataaaacttattggccggacacggtggttcacgcctgtaatcccagcactttgggagtctgaggcaggtggatcacctgaggtcgtgggttcgagaccagcctaaccaacgtggagaagccccgcctctactagaaatacaaaattagacgggcatggtggcacatgcctgtaatcccagctacttgggaggctaaggcaggagaactgcttgaacccaggaagcagaggttgcactccagcctgggcaacaagagcgaaactccgtctcaaaaaaatacaaaacttactgagagcttaccatgtatcaggcactgtgattgatgctaccatacaacatagtgcttataattaacaatactgtaatatatacttaaaatatatttttattaataataaatacaacagtgcttttaattaacaatactgtaatatatacttaaaatatatttttattaatacttaataaaaatattttttaagtatatgttacagataaatcttacatgtaagtttttaaatcacaaaacaatagaggctgagaggaaattttgggcatgatatgtttatggcattgtgatgggttcatgggtggatacttatctccaaactcctcaagttgtatactttagatatgtacagcttttttgtatgtcaatcatacctcaataaagtgctttttta

SEQ ID NO: 25227 - DNA, 1633 bp, Homo sapiens
agtacaaacaaaaagccttaattcccataggagaactgagacttacaagtgggaaagggagtgcaaaacagatacaagttcagaatttatacagcagaaacaatctaacattgtagaggttctttttttttttttctttttctttttgagacggagtctttcattctatcacccaggatggagcacagtggcgcaatctcggctcactgcaatctccgccacctagattcaagcaattctgtctcggcctcctgagtagctgggattacagacaggcaccaccatgcccagctattttttgtacttttagtggagacggggtttcaccatgttgaccggcctcttctcgaacttctggcctcaggtgatcctcccacctcggcctcccaaagtgctgggattacaggcgtgagccactgtgcccaacctaacattgtagaggttctgattccatcatacgtagcttgtgtccctggactcaatgtagcttatctcattctaaatggcctttttcatgctacagtttaaaaacagactagctccgctctggtgacagctagagatcatatcatcagacaaatgagtgacctacttcacaacttgaccttttgcatcaggatccaaagagtaaattctttccttcatcattttagtttctgattaacagttcttccccagatgatgtactagggggacttgattcagtttgttttacatataagcaaatctgtatgaccttggttacaattatctgcaagtttcctgattgtcttacttgctttgttatagttacaacagtgctaactccttcaagtgtaacttccacaactgctcagtacctactagcttggtcttttcttgccaaacctttcttccctacatagaattgtctagagtcccttcacagcaaatggaagtttagcctatataatgtaccctgggacaagtttagaatgtggattatcaccaatcattgacatttaaaaaaaaaacaacaacaacaaaaggtgctccttgtaacttgcagggcatagtacactgccttatgtgaaatttggtcatggaatgtactcataagagataagtgctgacagttaaaaagatgagtatggcccttccctggagatgcttaacagtctagtagaaaataaacataacatttttttcaattcccatgagatactatgttggcatgagaggcatatttttacagaattttgaagacgacttatttaaattagttttgagttttggttctattactacaaacaaaatgagtaattattgtgtcatatggttatttagacatctaagagtgaacaaaaatgataagtgtgcttagagaattaaatatctccactgaggcatggtagcaccacaggaaagatgtgtcccgtagcagatatgagataacttagctattggaaataatctaggactaaagtaattgatcaaaacaaaaactggggggaaataactgaacatgtagcccaactccagagctttgcaaatttataagcttaagtggtggtcacgcctgtagtcccagcactttgggaggctgaggcggggtttcaccgtgttagccaggatggtctcgatctcctgacctcatgatccacccgccgtcgac

SEQ ID NO: 25228 - DNA, 483 bp, Homo sapiens
agcccaggagttcaaggatgcagtgagctatgactgtaccactgtactcttgcctgggtaatagacggagtctgtctcttaaagcaacaacaacaacaacaacaaaaagcgaaaaaccaaaaaacaagggtcacaaaacccaaacattaaagtgaatggagttcatttatcttttagaccaaattctagaaagattaattagcaagtttatcaacaaattaaaaacaagaagaaaaagcagattgtgtgtggtggcagcaacacaggattgctaaaaggaaaggcactgacaggaagggatatagacaatagtatggtgtgacaatgggagcccaaataaaagggagcgaaaaggggaaaaaaagcaagcattaaaaaaattcacacaagcaagccagaagcgaggattctggccattggttgtacagtgggagaaaacaatgctatttatttcatctacctctcatggtcatgagaacaacc

SEQ ID NO: 25229 - DNA, 405 bp, Homo sapiens
acaccagaggggcctgatgtcaggcaggaactggaaggggtggatgtctaagctacctttgccctgctgaaccctgatgggcagcatttcttttctgaaagcaaaactcaaaagaagaattcaggcgggatgtgaactcacccctgtaatctcagcactttgggaggccaatgcgggcagatcacctgaggtcaggagttcaagaccagcctggccaacatggtgaaaccctgtctctacaaaaatacaaaaattagccaggcatgatggcaggtgcctgtaatcccagctacttggtaggctgtggtgggagaattgctggaacccaggaggcataagtggcagtgagctgagatcgcgccattgccctccagcctgggcaaatagagtgagactccgtctcta

SEQ ID NO: 25230 - DNA, 940 bp, Homo sapiens
caaaaagaaagaaaaaaatttgtcactttgggtaaataatcccacactttttacttctcagatgtgtctttgtgtaggggtgaggacgggtagggactctcaatacttactgataacatgggaaactcaggaatagggactatttttttgaggaatagggatattttaagaggccagccagacaacaggtcaaacaaaaggagagaatccgccattatatagagaacagagtagggaaggaagctcgagttaccgtgtcactggaatagcttcttcaggagaaactgccatctgaaataaagttttgtgaaggaagtaggaatgccaggacttgttcagaggagtgcctctttccccattaagctcatcactagaaattcagctgaggggcattgtgcaggctgcagccatgctctctaacaaacggaacaaccacaacgagatgttcaacacttcagtggaagcatctcttccagctatagtttaaaactcttcttggttcaccaaaaggccggaatgccacagggattaatgatatttgattgagcttcatccactcagcagtttgcttttggagtgggctttatgttctcacgagcaatttcctggtagcaggcacataagattttatttttcttattactattattatttttttgagacggggtctcactctgtctctcaggctggagtgcagtggcacgatctcagctcactgcaacctctgccgcctgggttcaagcgattctcctgcctgcctcagcctcccgaatagctgggattataggcccctgccactgtgcctgcctaatttttatagttttttagtagggatgcggtttcaccctgttggccaggctggtcttgaacacctgacttcatgatccaccaacctcagcctcccagagtgctgggattacaggcgtgagccaccgcgccc

SEQ ID NO: 25231 - DNA, 437 bp, Homo sapiens
tataaaaattatgatagtgagccgcacacagtggctcacgcctgtaatcccagcactttgggaggccgaggcgggcggatcacgaggtcaagagattgggaccatcctggccaacatggtgaaaccttgtctctactaaaaatacaaaagctagttgggcatgatggcgggcgcctgtaatcccagctactcgcgaggttgagacaggagaattgcttgaacccgggtggcggaggttgcagtgagccgagatcacgccactgcactccaccctgggcaacagagtgggactctgtctcaaacaaaaaaataaattatgatagtaacatggggaaaaagtcttgtaatacaatgttatgtgagaagaagttagaaaaagtgtatgtcaaatatatatttattagtccatacatacataaataaatgaccaaataaat

SEQ ID NO: 25232 - DNA, 350 bp, Homo sapiens
tgagacagagtctcgctctgtcgcccaggctggagtgcagtggcatgatctcagctcactgcaagctctgcctcccaggttcacgccattctcctgcctcagcctcttgagtagctgggactgcaggtgcccaccaccatgcctggttaattttttgtatttttaatagagacggggtttcaccgtgttagccaggatggtctccatctcctgacgttgtgatctgcccgcctcagcctcccaaagtgctgggattacaggcatgagccaccatgcccagcaaaatttgccaatttttgcatattctctgagcatgttaaaagtctcaggtggggtgtaaacattttaag

SEQ ID NO: 25233 - DNA, 416 bp, Homo sapiens
taggctgtgctgtttgcagtttgtgccaatttagtacaagccagcagcaaacacctttctggagtctcctgcagcaggcttggggttccctgctggaacctgctggtcacaggatgggtgacctttttagttttcacagccattgtccaatcaattagtccaggcctcaccaatgttatttgctgtgacaaggttcaatgctgccttttctgatgggtccagtggggtcttggggatgggtgtgtcttaaggggatgtgtctgtagtgtgtttgttccagccccatcttcagtcccatcactttcagtccccagccccacggtggccgggcaccggaaacccccaagaggcccgggcgggggcgggggtcggccaagccgcttcccgcggaaggaagggcccggcggttcctgcga

SEQ ID NO: 25234 - DNA, 387 bp, Homo sapiens
gatgtaaaaatgacatggccattggaatttgcctagaatcccggccctaggtccaaaagtatattttgcaagatgatttcaatgctaatttcaaaaaacacgttgatgaagagaaggaaatgtatgaagaaggaagtgggttagctcaggaaatgaataactgcctctataagagtttattctgtgactgtttggtttttcactctgtgggagccttgagaaacgatacccagagaagcccatttgaggtctttcaaacaccctcaactaaattttagtagaagagaatctgtaccactagtgacaacaaagtatgaacacaaattctggcaccaacaaaagagggcattttattcttaaaataaatacgttattaaatttgattta

SEQ ID NO: 25235 - DNA, 387 bp, Homo sapiens
tgcacagggcttgaaatttagtcaatgaaaaattatagacctaaaatattgtcagtgtaaatatatatcacttcatataagtattaaaaaaccaagctgataaggatgaaatgacattaatggtaattaataattacaaaccccaaagagcagttttctgaattccaactatctgtgggtatttgtgggtactcagctttgtatataatattgcaaattggtgcttggtgatcaagatttttacaagattagtcaagtagagtgagtcttcagtaaactctaatagtgcttatttttgatgtgtaaatgaatagtaaactttattaactatcattaacttagtaataataatgagcatttagtctcaagcaaaaaggatattttttt

SEQ ID NO: 25236 - DNA, 547 bp, Homo sapiens
gagcaaatgggccagcgaggtcctggttaggcccgagaccatctcagcagaagggctgtgggtggagcccccagcagagaggtatggggcgtggagcacctcagggccatgtttgctgggtccagatcaggtatggaagacaggtaggcatgcttcctctcccacccccactgctctcctggaaaccagcgtcattgttcccacccggcagtgtgtcctggtgttctgggaaatgccactccagggaggtggtaggtggtgcagtgacctgtgacatcccaacccacatccaccactgtccgttgggggaacacagcccaggtaggtgtctgaaggagagctgagtccatttcaggagccccagaaccctggtagctaaaaacctgtgtgagtcccaggtggcccctcagtacagcaaggcctcacttaaggttgttggtaggttcttggaaaccatgactttgagggaaacagcagaagatgaaaaacaatttccccacaggctaatggatataaacaagacttaagttcctaaggcatatttctg

SEQ ID NO: 25237 - DNA, 383 bp, Homo sapiens
cttcaacctgaactaccacaataatctcctaactgatctccctgcctccagcctcctcttctccaatatgttctctttgttacaacagctcaagacagtacctatttacaaagcatgtaagatgtattcagcactgttctttgggttataaggagggaactattcttcggtatagaatgtacatccacttctcctccctaattgtatgcctggtggctgtgctagagcctttcaaaactaattcaggtatcacctcctatattgcctgcctatgttcacttactactacatttttagaaggcataagtacctactgtcggttcaatactatatatgtacatattatatattttatatatatataatatatatatataaaataa

SEQ ID NO: 25238 - DNA, 458 bp, Homo sapiens
gatcatttatcccaaaacacatacatcagtcctaattttaaattgacagagtttaggcttctgatgtttctctgttgcttgttaataaatctacatttaaaaagcccacagttatcagatcgccatgagcatcttaacagagtttaaaaacgtaaaaattcaaggattgtcacttaggttgaattgtttatgaaaaggaatgtggtatcattagaatgcatttggctacaagtaaccagaaactagattcaaaacggaaaaattagagaatgtattatattacacagcaagaagtttagagttagggtagctctagggcaggctggttgatctagtggctctgtgatgtccttcaacacctaggttctgtcttctgctactatcttagtcctaccctcctcagtatattggctgcattcttggactggatctacttatggtcacagataacctgccag

SEQ ID NO: 25239 - DNA, 463 bp, Homo sapiens
tttcgagcggccgcccgggcaggtacgcgggcagtcctaattttaaattgacagagtttaggcttctgatgtttctctgttgcttgttaataaatctacatttaaaaagcccacagttatcagatcgccatgagcatcttaacagagtttaaaaacgtaaaaattcaaggattgtcacttaggttgaattgtttatgaaaaggaatgtggtatcattagaatgcatttggctacaagtaaccagaaactagattcaaaacggaaaaattagagaatgtattatattacacagcaagaagtttagagttagggtagctctagggcaggctggttgatctagtggctctgtgatgtccttcaacacctaggttctgtcttctgctactatcttagtcctaccctcctcagtatattggctgcattcttggactggatctacttatggtcacagataacctgccag

SEQ ID NO: 25240 - DNA, 585 bp, Homo sapiens
gaagctctgaaggctgctaggagggccacgggagctgtgggagagggtgaggctggagccctgtgggctaacagacagggctctaattcgtgacatcgtggcaacaaactattagaaatgaggctagacctggaagccctgggggcacagtctggaggggagacagacgagagctaagtagaatgcaggcaatgacgccgtaacagagatctgcacagcgaccattgcacagcgtgggggcaggcttctgagaggaggtaacatgctgaaaagacaacgtgtacagctgacattagtacacaacctcatcggagagagaagaagcggagggaatcccaggagcaggggccatcatgctcaaaggttccaaggtacggaatccaaccacagtgcccactgtggtgaagccactgcgctggtccgagaagaaagtgacaaacaaaatgacatggagcccaattcatcctgagagcagaacctcggagccatgtggttaagatggaaattccacttttagtccaagcaaatcttctgatgtatcaagtttgagggtgaggtttcattaaaggaatttaaaataaaaaa

SEQ ID NO: 25241 - DNA, 338 bp, Homo sapiens
tcaatatttagtagagatggggtttcaccatgttggccaggctggtctcgaactcctgacctcaagtgatccacttgcctcagctcccaaagtgctgggattacaggcatgagccaccgtgcccagcctactgaggggtttttatggacatgggacttttaatgctaacactaggacagtctctgtcagactgagatgatggtcactctttggccaaacacctccaccactgccccgcaacatccataatagcaacagtttgagtaaagacacaagtaccatttgcggtccaaatacttgagtgtgtaaacggtgcattgggtgtgcacagcggtacc

SEQ ID NO: 25242 - DNA, 495 bp, Homo sapiens
ggtattctgcaggaggcttcttgcagtggtattgcataactgcccttgacttaggaagattttcatcctgcatatcctaaatggttgacttgctcacagtcaaaaatgtctaagtacatttagatttagctaatgtagattcagattctgaatgtcttttagaatattttgggctttggtatagactcaaagaatttcacatttttggctgggcacagtggttcacgcctgttatttcagcactttgggaggccgaggcgggcggatcacctgaggtcaggagttcgagaccagcctgactaacatggtgaaacctcgtctctactaatattacaaaaattagctgggcatgttggcaggcgcctataatttctttgggaggctgaggcaggagaatcacttgaacccgggaggcggaggttgcagtgagccgagtcgtgccattgcagtccacccagcctaggcgacagagtgaaactccacctcaaaaaaaaa

SEQ ID NO: 25243 - DNA, 415 bp, Homo sapiens
cttgcacaagcctctacatggttttgggccttggtacctatcttggttgattgattaagatgccctacaagttcccttttagttttgatagtgtttcctgtattcacctagggcagggattctaaaccaattttagatattaggggcctctttgagaattgtttgcccttttcttagaaacatgcttggccgggcacagtggctcacacctgtaatcccagcactttgggagggggaggcaggcagatcacttgaggccaggagttcgagaccagcctggccaacatggtgaaagcctgtctctactaaaaatacaaaaagtagctgggtgtggtggcatgtgccaataatcccagctattcagaaggctgaggcaggagagtcacttgaacccgagaggtggaggttgcaatga

SEQ ID NO: 25244 - DNA, 255 bp, Homo sapiens
aagataaaaattagatagtcatttttggttctactgtcttaatgttcacagaggagatagtaaaaaattccccaaatgagaacaaagtgtattaattgacgtcagtaactcatacccctctgctctacccagtgtcatttctgcttttaccgtgtcttctatctctaattatcctaccccccatctactgattaagggcttcccccttcctgttttccctaaaacccaatatattttttatgaaagcacttatta

SEQ ID NO: 25245 - DNA, 4244 bp, Homo sapiens
agcgggctttcggtgcgggccccgccccggctgtggccaccggctgcggaggagtccgagacgcagctgccgcgccggggcctgagctgccgcctcctccgccgcccgaaaacccggagtgccccgcacaggtttagacccagtgtgcctggtgggctgtgcccaggttcagagtcatgccactctgtgggtgaagcttgaggcaaaaatggagccacttcagcagcagcagcagcagcagcagcaacaacagaagcagccacacctggctcctctgcagatggatgccagagagaagcagggccagcagatgagagaagcccagttcttgtatgcccaaaagctggtcacacagccgactctcctttccgccacagctgggagaccttctggcagcactcccttaggtcccttagccagagttccacccaccgcagcagtggcccaagtgtttgaacggggcaacatgaactcagagcctgaggaagaggacggaggtttggaagatgaggatggggatgatgaagttgcagaggtggctgagaaagaaacccaggctgcttcaaaatattttcatgtgcagaaagtagctcgccaagatcccagagtggcacccatgtccaatctacttccagcaccagggctcccaccacatggacaacaagctaaagaagaccataccaaagatgcttccaaggcctcaccttctgtctccacagcaggacagccgaactggaatctggatgagcagctcaagcagaatggtggtttggcctggagtgatgatgcagatggaggccggggaagagagatctctcgagattttgccaagctgtatgaactggacggtgatcctgaaaggaaagagttcctggatgacctcttcgtctttatgcagaagagggggacccccatcaaccgaatccccatcatggccaaacagatcctggacctgtacatgctgtataagctggtgaccgagaagggaggcctggtggagatcatcaacaagaagatctggagggagatcaccaaaggcctaaacctgcccacatccatcaccagcgccgccttcaccctcaggacgcagtacatgaagtatctgtatgcctatgagtgtgagaagaaagccttgagttccccagccgagctccaggcagcaattgatggcaaccgcagggagggccggcggcccagctacagctcctccctctttggctactcacctgctgcggctactgctgctgccgctgccggggcccctgcccttctctccccacccaagatccgctttcccatccttgggcttggctccagcagtggtaccaataccagtagccctcggatatccccagcaaccactctcaggaaaggtgatggagccccagtgacaacagtgcctgtgccaaatcgtctggctgtgcccgtgaccttggcaagccagcaggctggtactcggaccgccgcactggagcagctgcgggagcggctggagtcaggggagcctgctgagaagaaggcatcgaggctgtctgaggaggagcagcgcctggtgcagcaggccttccagcgcaactttttcagcatggcacggcagctccccatgaagatcaggatcaacggcagggaagacagagcagaggcctcggctgcagcactgaacctgaccacgagtagcattgggagcattaacatgtctgtggacatcgatggcaccacctatgcaggtgtgctgtttgcccagaagcctgtggtccacctcatcacggggtctgctccccagagcctcggcagcagcgccagcagcagcagcagctctcactgttcaccaagtcctacctcatcccggggcacccccagcgcagagccctccaccagctggtccctctgatgggcaggacccagcttcccacttgccactctcctgtcgagagtgaaggaagttgatgcacagaatttacctcatctcacagagcccacgtcgacgagcaccatttggccagacattgagagtttggacgtgtccgtctgtccaggctccattcaggtcctgctgtactctgggggcagggagaggctagaggggcaggacagacagcgttgtccaatcagggattgtcctggagaactgggtgggggtctgtgggtgtccagcttcctccagggttccccagccacctcccagctcagggcacagtgtatcgacaatctgtcagccgacgcagggctggaggccctccatttccctccccttttaatttatttccctgaccctgccttctgccatgaccccagggccactagtctcttcccctgtttttaagtcccatgtggggctgccaggagccaagagcatgccttcatgcccttctctgcagagcatgggatggggcccttccagcccactttgcctactgttaggttcctggggtacgggtccctcaaacacaagtcttgaatcagtcctcagggccccagatcccccttctaatagtctgaaggaagaggctgtgagggcagttcagggccagggcccacagggcatctgctgatgggaaggcagagcctcggggctgcccagccctggcacctgcttcacacggaccattctctgaccgcccccgccaaacctcatgctccccacttgcccttattggcctgctttcccaaaaacagcccactcatcctttccccagccctcttcagccctccccagtcctccccagccttcttcagccttcttcagctcagccctcttctatttcttatggggccatcttggcctcaccatccccacacgtgccgatgtcaggttcattgaaatacctcagatttgtaattgttgatgtttgagtcttcaggaagtatttgcatctctgaaatcttttttatatgtgttttgctgacttttgttttttttttattttaaaatttttatcgtagcaccaaagaaatgaaaacagatcacccccaaagccaagcaagtgattgggtaacccggcccctctggcccttccctcaagcccagtgaggaggtgggtggaggcatgcaggggagacgactcagggatcgcgggggcggggaggtggagtggagaggcccgctctcacaccgggtcgggccctgaaaccgtaccagttctgaagaccgttttctgccacacccccacccccagctgaccagggaggcagaggacacctccccatcactcagcattcccagctcagggcacaggcaggctggggtcctcgctggccttgccagaggttgagccgccccagggtatgaggagatgaataactccacagctcctcctggaccctgcgcgggagcaggcagctcctgtgctgtaaagaaaattgattcgcttgcggctcacctcagtcgaggaagccctggaatgttcagcagaacaccaccactgtgacatggggctgtggcagtgggagacaccgcgcgtggcgtgggtgtgtgtggcagcgtggctcgcattcagtcctgtgtaggagaggaaagggaatcaaaagcttgagcacaaacagatacctcagcccggtaagctgcagctctgctcaactgcgtcttctctcagccctccacacacactcacccccactcccacacacatacacacacacacacacataccccatctcccgagggctgacctcctctggcctcagcctgcagggtgtgggcagagaagggcatctgggacgtggtgccagtgaggagcccagttggctggcactgggcccatttgaaggtgtctcagacatttggccagtatgtctttctcaggggtttggtcacaaaggatggactcttcccacccagaggatgcagggaaagcacactgtgtctttccggtcattggatcctctccctttccccaggcagctcgcctggccacaccgttggagtgaaccctcactgccctcaaggacaacagcagggtgtcacccagagcccgatgaggggtgccagcaggtgcccccacgagtggggccttggcccaagcagagcttcccctgaaggtgccatcagccagggcagctctgtcccctcctgctctccatcttatatgtattctaaccaggaaaaatgtgatagcacatgggtagcctaggcagtgagtaaatacctcagatgtcctcctgcagcaagtgtctatatgttgtggttattttctatcttacatgttctcgaatgtttatatttcaataaacctctacctcttcac

SEQ ID NO: 25246 - DNA, 3638 bp, Homo sapiens
taaaaacattttgcagtattttattctttcgtttaagaagctataacttaaaccatcttcagaaacaagatctgtcacccgtagagcttagagtccaaatagacacctatgaggcgagcacaaggggcggtgtgaggcagctgcaggggcctgaccaggggccggggttggctgtgtcctaggcggctgggcagccactggcccccactgccccgtggcccgaagttaaagcaaaatggtggtttggcctgaagggaaagagttccgggatgaccttttcttttttttgcaaaaaagggggacccccatcaaccgaatccccatcatggccaaacagatcctggacctgtacatgctgtataagctggtgaccgagaagggaggcctggtggagatcatcaacaagaagatctggagggagatcaccaaaggcctaaacctgcccacatccatcaccagcgccgccttcaccctcaggacgcagtacatgaagtatctgtatgcctatgagtgtgagaagaaagccttgagttccccagccgagctccaggcagcaattgatggcaaccgcagggagggccggcggcccagctacagctcctccctctttggctactcacctgctgcggctactgctgctgccgctgccggggcccctgcccttctctccccacccaagatccgctttcccatccttgggcttggctccagcagtggtaccaataccagtagccctcggatatccccagcaaccactctcaggaaaggtgatggagccccagtgacaacagtgcctgtgccaaatcgtctggctgtgcccgtgaccttggcaagccagcaggctggtactcggaccgccgcactggagcagctgcgggagcggctggagtcaggggagcctgctgagaagaaggcatcgaggctgtctgaggaggagcagcgcctggtgcagcaggccttccagcgcaactttttcagcatggcacggcagctccccatgaagatcaggatcaacggcagggaagacagagcagaggcctcggctgcagcactgaacctgaccacgagtagcattgggagcattaacatgtctgtggacatcgatggcaccacctatgcaggtgtgctgtttgcccagaagcctgtggtccacctcatcacggggtctgctccccagagcctcggcagcagcgccagcagcagcagcagctctcactgttcaccaagtcctacctcatcccggggcacccccagcgcagagccctccaccagctggtccctctgatgggcaggacccagcttcccacttgccactctcctgtcgagagtgaaggaagttgatgcacagaatttacctcatctcacagagcccacgtcgacgagcaccatttggccagacattgagagtttggacgtgtccgtctgtccaggctccattcaggtcctgctgtactctgggggcagggagaggctagaggggcaggacagacagcgttgtccaatcagggattgtcctggagaactgggtgggggtctgtgggtgtccagcttcctccagggttccccagccacctcccagctcagggcacagtgtatcgacaatctgtcagccgacgcagggctggaggccctccatttccctccccttttaatttatttccctgaccctgccttctgccatgaccccagggccactagtctcttcccctgtttttaagtcccatgtggggctgccaggagccaagagcatgccttcatgcccttctctgcagagcatgggatggggcccttccagcccactttgcctactgttaggttcctggggtacgggtccctcaaacacaagtcttgaatcagtcctcagggccccagatcccccttctaatagtctgaaggaagaggctgtgagggcagttcagggccagggcccacagggcatctgctgatgggaaggcagagcctcggggctgcccagccctggcacctgcttcacacggaccattctctgaccgcccccgccaaacctcatgctccccacttgcccttattggcctgctttcccaaaaacagcccactcatcctttccccagccctcttcagccctccccagtcctccccagccttcttcagccttcttcagctcagccctcttctatttcttatggggccatcttggcctcaccatccccacacgtgccgatgtcaggttcattgaaatacctcagatttgtaattgttgatgtttgagtcttcaggaagtatttgcatctctgaaatcttttttatatgtgttttgctgacttttgttttttttttattttaaaatttttatcgtagcaccaaagaaatgaaaacagatcacccccaaagccaagcaagtgattgggtaacccggcccctctggcccttccctcaagcccagtgaggaggtgggtggaggcatgcaggggagacgactcagggatcgcgggggcggggaggtggagtggagaggcccgctctcacaccgggtcgggccctgaaaccgtaccagttctgaagaccgttttctgccacacccccacccccagctgaccagggaggcagaggacacctccccatcactcagcattcccagctcagggcacaggcaggctggggtcctcgctggccttgccagaggttgagccgccccagggtatgaggagatgaataactccacagctcctcctggaccctgcgcgggagcaggcagctcctgtgctgtaaagaaaattgattcgcttgcggctcacctcagtcgaggaagccctggaatgttcagcagaacaccaccactgtgacatggggctgtggcagtgggagacaccgcgcgtggcgtgggtgtgtgtggcagcgtggctcgcattcagtcctgtgtaggagaggaaagggaatcaaaagcttgagcacaaacagatacctcagcccggtaagctgcagctctgctcaactgcgtcttctctcagccctccacacacactcacccccactcccacacacatacacacacacacacacataccccatctcccgagggctgacctcctctggcctcagcctgcagggtgtgggcagagaagggcatctgggacgtggtgccagtgaggagcccagttggctggcactgggcccatttgaaggtgtctcagacatttggccagtatgtctttctcaggggtttggtcacaaaggatggactcttcccacccagaggatgcagggaaagcacactgtgtctttccggtcattggatcctctccctttccccaggcagctcgcctggccacaccgttggagtgaaccctcactgccctcaaggacaacagcagggtgtcacccagagcccgatgaggggtgccagcaggtgcccccacgagtggggccttggcccaagcagagcttcccctgaaggtgccatcagccagggcagctctgtcccctcctgctctccatcttatatgtattctaaccaggaaaaatgtgatagcacatgggtagcctaggcagtgagtaaatacctcagatgtcctcctgcagcaagtgtctatatgttgtggttattttctatcttacatgttctcgaatgtttatatttcaataaacctctacctcttcac

SEQ ID NO: 25247 - DNA, 3535 bp, Homo sapiens
agcgggctttcggtgcgggccccgccccggctgtggccaccggctgcggaggagtccgagacgcagctgccgcgccggggcctgagctgccgcctcctccgccgcccgaaaacccggagtgccccgcacaggtttagacccagtgtgcctggtgggctgtgcccaggttcagagtcatgccactctgtgggtgaagcttgaggcaaaaatggagccacttcagcagcagcagcagcagcagcagcaacaacagaagcagccacacctggctcctctgcagatggatgccagagagaagcagggccagcagatgagagaagcccagttcttgtatgcccaaaagctggtcacacagccgactctcctttccgccacagctgggagaccttctggcagcactcccttaggtcccttagccagagttccacccaccgcagcagtggcccaagtgtttgaacggggcaacatgaactcagagcctgaggaagaggacggaggtttggaagatgaggatggggatgatgaagttgcagaggtggctgagaaagaaacccaggctgcttcaaaatattttcatgtgcagaaagtagctcgccaagatcccagagtggcacccatgtccaatctacttccagcaccagggctcccaccacatggacaacaagctaaagaagaccataccaaagatgcttccaaggcctcaccttctgtctccacagcaggacagccgaactggaatctggatgagcagctcaagcagaatggtggtttggcctggagtgatgatgcagatggaggccggggaagagagatctctcgagattttgccaagctgtatgaactggacggtgatcctgaaaggaaagagttcctggatgacctcttcgtctttatgcagaagagggggacccccatcaaccgaatccccatcatggccaaacagatcctggacctgtacatgctgtataagctggtgaccgagaagggaggcctggtggagatcatcaacaagaagatctggagggagatcaccaaaggcctaaacctgcccacatccatcaccagcgccgccttcaccctcaggacgcagtacatgaagtatctgtatgcctatgagtgtgagaagaaagccttgagttccccagccgagctccaggcagcaattgatggcaaccgcagggagggccggcggcccagctacagctcctccctctttggctactcacctgctgcggctactgctgctgccgctgccggggcccctgcccttctctccccacccaagatccgctttcccatccttgggcttggctccagcagtggtaccaataccagtagccctcggatatccccagcaaccactctcaggaaaggtgatggagccccagtgacaacagtgcctgtgccaaatcgtctggctgtgcccgtgaccttggcaagccagcaggctggtactcggaccgccgcactggagcagctgcgggagcggctggagtcaggggagcctgctgagaagaaggcatcgaggctgtctgaggaggagcagcgcctggtgcagcaggccttccagcgcaactttttcagcatggcacggcagctccccatgaagatcaggatcaacggcagggaagacagagcagaggcctcggctgcagcactgaacctgaccacgagtagcattgggagcattaacatgtctgtggacatcgatggcaccacctatgcaggtgtgctgtttgcccagaagcctgtggtccacctcatcacggggtctgctccccagagcctcggcagcagcgccagcagcagcagcagctctcactgttcaccaagtcctacctcatcccggggcacccccagcgcagagccctccaccagctggtccctctgatgggcaggacccagcttcccacttgccactctcctgtcgagagtgaaggaagttgatgcacagaatttacctcatctcacagagcccacgtcgacgagcaccatttggccagacattgagagtttggacgtgtccgtctgtccaggctccattcaggtcctgctgtactctgggggcagggagaggctagaggggcaggacagacagcgttgtccaatcagggattgtcctggagaactgggtgggggtctgtgggtgtccagcttcctccagggttccccagccacctcccagctcagggcacagtgtatcgacaatctgtcagccgacgcagggctggaggccctccatttccctccccttttaatttatttccctgaccctgccttctgccatgaccccagggccactagtctcttcccctgtttttaagtcccatgtggggctgccaggagccaagagcatgccttcatgcccttctctgcagagcatgggatggggcccttccagcccactttgcctactgttaggttcctggggtacgggtccctcaaacacaagtcttgaatcagtcctcagggccccagatcccccttctaatagtctgaaggaagaggctgtgagggcagttcagggccagggcccacagggcatctgctgatgggaaggcagagcctcggggctgcccagccctggcacctgcttcacacggaccattctctgaccgcccccgccaaacctcatgctccccacttgcccttattggcctgctttcccaaaaacagcccactcatcctttccccagccctcttcagccctccccagtcctccccagccttcttcagccttcttcagctcagccctcttctatttcttatggggccatcttggcctcaccatccccacacgtgccgatgtcaggttcattgaaatacctcagatttgtaattgttgatgtttgagtcttcaggaagtatttgcatctctgaaatcttttttatatgtgttttgctgacttttgttttttttttattttaaaatttttatcgtagcaccaaagaaatgaaaacagatcacccccaaacctgcagggtgtgggcagagaagggcatctgggacgtggtgccagtgaggagcccagttggctggcactgggcccatttgaaggtgtctcagacatttggccagtatgtctttctcaggggtttggtcacaaaggatggactcttcccacccagaggatgcagggaaagcacactgtgtctttccggtcattggatcctctccctttccccaggcagctcgcctggccacaccgttggagtgaaccctcactgccctcaaggacaacagcagggtgtcacccagagcccgatgaggggtgccagcaggtgcccccacgagtggggccttggcccaagcagagcttcccctgaaggtgccatcagccagggcagctctgtcccctcctgctctccatcttatatgtattctaaccaggaaaaatgtgatagcacatgggtagcctaggcagtgagtaaatacctcagatgtcctcctgcagcaagtgtctatatgttgtggttattttctatcttacatgttctcgaatgtttatatttcaataaacctctacctcttcac

SEQ ID NO: 25248 - DNA, 436 bp, Homo sapiens
tagaggatcccatggccggtcagaggtagaggtttattgaaatataaacattcgagaagatgtagatagaaaataaccacaagatatagacacttgctgcaggaggacatctgaggtatttcctcactgccctcaaggacaacagcagggtgtcacccagagcccgatgaggggtgccagcaggtgcccccacgagtggggccttggcccaagcagagcttcccctgaaggtgccatcagccagggcagctctgtcccctcctgctctccatcttatatgtattctaaccaggaaaaatgtgatagcacatgggtagcctaggcagtgagtaaatacctcagatgtcctcctgcagcaagtgtctatatgttgtggttattttctatcttacatgttctcgaatgtttatatttcaataaacctctacctcttcac

SEQ ID NO: 25249 - DNA, 4519 bp, Homo sapiens
agcgggctttcggtgcgggccccgccccggctgtggccaccggctgcggaggagtccgagacgcagctgccgcgccggggcctgagctgccgcctcctccgccgcccgaaaacccggagtgccccgcacaggtttagacccagtgtgcctggtgggctgtgcccaggttcagagtcatgccactctgtgggtgaagcttgaggcaaaaatggagccacttcagcagcagcagcagcagcagcagcaacaacagaagcagccacacctggctcctctgcagatggatgccagagagaagcagggccagcagatgagagaagcccagttcttgtatgcccaaaagctggtcacacagccgactctcctttccgccacagctgggagaccttctggcagcactcccttaggtcccttagccagagttccacccaccgcagcagtggcccaagtgtttgaacggggcaacatgaactcagagcctgaggaagaggacggaggtttggaagatgaggatggggatgatgaagttgcagaggtggctgagaaagaaacccaggctgcttcaaaatattttcatgtgcagaaagtagctcgccaagatcccagagtggcacccatgtccaatctacttccagcaccagggctcccaccacatggacaacaagctaaagaagaccataccaaagatgcttccaaggcctcaccttctgtctccacagcaggacagccgaactggaatctggatgagcagctcaagcagaatggtggtttggcctggagtgatgatgcagatggaggccggggaagagagatctctcgagattttgccaagctgtatgaactggacggtgatcctgaaaggaaagagttcctggatgacctcttcgtctttatgcagaagagggggacccccatcaaccgaatccccatcatggccaaacagatcctggacctgtacatgctgtataagctggtgaccgagaagggaggcctggtggagatcatcaacaagaagatctggagggagatcaccaaaggcctaaacctgcccacatccatcaccagcgccgccttcaccctcaggacgcagtacatgaagtatctgtatgcctatgagtgtgagaagaaagccttgagttccccagccgagctccaggcagcaattgatggcaaccgcagggagggccggcggcccagctacagctcctccctctttggctactcacctgctgcggctactgctgctgccgctgccggggcccctgcccttctctccccacccaagatccgctttcccatccttgggcttggctccagcagtggtaccaataccagtagccctcggatatccccagcaaccactctcaggaaaggtgatggagccccagtgacaacagtgcctgtgccaaatcgtctggctgtgcccgtgaccttggcaagccagcaggctggtactcggaccgccgcactggagcagctgcgggagcggctggagtcaggggagcctgctgagaagaaggcatcgaggctgtctgaggaggagcagcgcctggtgcagcaggccttccagcgcaactttttcagcatggcacggcagctccccatgaagatcaggatcaacggcagggaagacagagcagaggcctcggctgcagcactgaacctgaccacgagtagcattgggagcattaacatgtctgtggacatcgatggcaccacctatgcaggtgtgctgtttgcccagaagcctgtggtccacctcatcacggggtctgctccccagagcctcggcagcagcgccagcagcagcagcagctctcactgttcaccaagtcctacctcatcccggggcacccccagcgcagagccctccaccagctggtccctctgatgggcaggacccagcttcccacttgccactctcctgtcgagagtgaaggaagttgatgcacagaatttacctcatctcacagagcccacgtcgacgagcaccatttggccagacattgagagtttggacgtgtccgtctgtccaggctccattcaggtcctgctgtactctgggggcagggagaggctagaggggcaggacagacagcgttgtccaatcagggattgtcctggagaactgggtgggggtctgtgggtgtccagcttcctccagggttccccagccacctcccagctcagggcacagtgtatcgacaatctgtcagccgacgcagggctggaggccctccatttccctccccttttaatttatttccctgaccctgccttctgccatgaccccagggccactagtctcttcccctgtttttaagtcccatgtggggctgccaggagccaagagcatgccttcatgcccttctctgcagagcatgggatggggcccttccagcccactttgcctactgttaggttcctggggtacgggtccctcaaacacaagtcttgaatcagtcctcagggccccagatcccccttctaatagtctgaaggaagaggctgtgagggcagttcagggccagggcccacagggcatctgctgatgggaaggcagagcctcggggctgcccagccctggcacctgcttcacacggaccattctctgaccgcccccgccaaacctcatgctccccacttgcccttattggcctgctttcccaaaaacagcccactcatcctttccccagccctcttcagccctccccagtcctccccagccttcttcagccttcttcagctcagccctcttctatttcttatggggccatcttggcctcaccatccccacacgtgccgatgtcaggttcattgaaatacctcagatttgtaattgttgatgtttgagtcttcaggaagtatttgcatctctgaaatcttttttatatgtgttttgctgacttttgttttttttttattttaaaatttttatcgtagcaccaaagaaatgaaaacagatcacccccaaagccaagcaagtgattgggtaacccggcccctctggcccttccctcaagcccagtgaggaggtgggtggaggcatgcaggggagacgactcagggatcgcgggggcggggaggtggagtggagaggcccgctctcacaccgggtcgggccctgaaaccgtaccagttctgaagaccgttttctgccacacccccacccccagctgaccagggaggcagaggacacctccccatcactcagcattcccagctcagggcacaggcaggctggggtcctcgctggccttgccagaggttgagccgccccagggtatgaggagatgaataactccacagctcctcctggaccctgcgcgggagcaggcagctcctgtgctgtaaagaaaattgattcgcttgcggctcacctcagtcgaggaagccctggaatgttcagcagaacaccaccactgtgacatggggctgtggcagtgggagacaccgcgcgtggcgtgggtgtgtgtggcagcgtggctcgcattcagtcctgtgtaggagaggaaagggaatcaaaagcttgagcacaaacagatacctcagcccggtaagctgcagctctgctcaactgcgtcttctctcagccctccacacacactcacccccactcccacacacatacacacacacacacacataccccatctcccgagggctgacctcctctggcctcagcctgcagggtgtgggcagagaagggcatctgggacgtggtgccagtgaggagcccagttggctggcactgggcccatttgaaggtgtctcagacatttggccagtatgtctttctcaggggtttggtcacaaaggatggactcttcccacccagaggatgcagggaaagcacactgtgtctttccggtcattggatcctctccctttccccaggcagctcgcctggccacaccgttggagtgaaccctcactgccctcaaggacaacagcagggtgtcacccagagcccgatgaggggtgccagcaggtgcccccacgagtggggccttggcccaagcagagcttcccctgaaggtgccatcagccagggcagctctgtcccctcctgctctccatcttatatgtattctaaccaggaaaaatgtgatagcacatgggtagcctaggcagtgagtaaatacctcagatgtcctcctgcagcaagtgtctatatgttgtggttattttctatcttacatgttctcgaatgtttatatttcaataaacctctacctcttcacacaaaaaaaatctctctcagttgctttgagtggcctttccactggacagtactggggagaggtgagctccttcagagtgaaaggggactgagtgaactactcctgaccccttgatttctcctgaaccttctccccttcacccacgccttcttcaaagggaaagctcactgagctcactctcagctaaccttgtgtgttagcaggtttctctggcgttaccccagaagctcctagaaaagcctgcccggcagcaagccacaggccccgccacgcca

SEQ ID NO: 25250 - DNA, 958 bp, Homo sapiens
  misc_feature (835)..(835): n is a, c, g, or t
  misc_feature (888)..(888): n is a, c, g, or t
  misc_feature (934)..(934): n is a, c, g, or t
aagcagtggtatcaacgcagagtggccattacggccggggggttggggtgtgagaggttttctcgctctagggagattcttcaagcaatcactatgtcaacagacacaggtgtttcccttccttcatatgaggaagatcagggatcaaaactcattcgaaaagctaaagaggcaccattcgtacccgttggaatagcgggttttgcagcaattgttgcatatggattatataaactgaagagcaggggaaatactaaaatgtccattcatctgatccacatgcgtgtggcagcccaaggctttgttgtaggagcaatgactgttggtatgggctattccatgtatcgggaattctgggcaaaacctaagccttagaagaagagatgctgtcttggtcttgttggaggagcttgctttagttagatgtcttattattaaagttacctattattgttggaaataaactaatttgtatgggtttagatggtaacatggcattttgaatattggcttcctttcttgcaggcttgatttgcttggtgaccgaattactagtgactagtttactaactaggtcattcaaggaagtcaagttaacttaaacatgtcacctaaatgcacttgatggtgttgaaatgtccaccttcttaaatttttaagatgaacttagttctaaagaagataacaggccaatcctgaaggtactccctgtttgctgcagaatgtcagatatttgggatgttgcataagagtcctatttggcccagttaattcaacttttggtctgcggttggggacggtggttgtaaactctgccaagggtggatataatggnggtccccatgcaaatttcgtgtttccccccagtacaggggtgttttaacccgnggaaaagtacgagggaatggggaaaatccataacgcgccgtgtggncgcacgcgtgaagtgcgtatattg

SEQ ID NO: 25251 - DNA, 831 bp, Homo sapiens
  misc_feature (765)..(765): n is a, c, g, or t
  misc_feature (767)..(768): n is a, c, g, or t
  misc_feature (778)..(778): n is a, c, g, or t
  misc_feature (784)..(784): n is a, c, g, or t
  misc_feature (793)..(793): n is a, c, g, or t
aagggagaagccgggaggactgggtgcgcctgcagggatcggaagccggttggggtgtgagaggttttctcgctctagagaacctcatagaaattctttctcggagattcttcaagcaatcactatgtcaacagacacaggtgtttcccttccttcatatgaggaagatcagggatcaaaactcattcgaaaagctaaagaggcaccattcgtacccgttggaatagcgggttttgcagcaattgttgcatatggattatataaactgaagagcaggggaaatactaaaatgtccattcatctgatccacatgcgtgtggcagcccaaggctttgttgtaggagcaatgactgttggtatgggctattccatgtatcgggaattctgggcaaaacctaagccttagaagaagagatgctgtcttggtcttgttggaggagcttgctttagttagatgtcttattattaaagttacctattattgttggaaataaactaatttgtatgggtttagatggtaacatggcattttgaatattggcttcctttcttgcaggcttgatttgcttggtgaccgaattactagtgactagtttactaactaggtcattcaaggaagtcaagttaacttaaacatgtcacctaaatgcacttgatggtgttgaaatgtccaccttcttaaatttttaagatgaacttagttctaaagaagataacaggccaatcctgaaggtactccctgtttgctgcgtcgaaattgggggngnnaaagcctatngcccgnaatcacttngtggccgttgggacggggggccggtaaactgtgcaagg

SEQ ID NO: 25252 - DNA, 1485 bp, Homo sapiens
  misc_feature (1416)..(1416): n is a, c, g, or t
  misc_feature (1422)..(1422): n is a, c, g, or t
aagggagaagccgggaggactgggtgcgcctgcagggatcggaagccggttggggtgtgagaggttttctcgctctagggagattcttcaagcaatcactatgtcaacagacacaggtgtttcccttccttcatatgaggaagatcagggatcaaaactcattcgaaaagctaaagaggcaccattcgtacccgttggaatagcgggttttgcagcaattgttgcatatggattatataaactgaagagcaggggaaatactaaaatgtccattcatctgatccacatgcgtgtggcagcccaaggctttgttgtaggagcaatgactgttggtatgggctattccatgtatcgggaattctgggcaaaacctaagccttagaagaagagatgctgtcttggtcttgttggaggagcttgctttagttagatgtcttattattaaagttacctattattgttggaaataaactaatttgtatgggtttagatggtaacatggcattttgaatattggcttcctttcttgcaggcttgatttgcttggtgaccgaattactagtgactagtttactaactaggtcattcaaggaagtcaagttaacttaaacatgtcacctaaatgcacttgatggtgttgaaatgtccaccttcttaaatttttaagatgaacttagttctaaagaagataacaggccaatcctgaaggtactccctgtttgctgcagaatgtcagatatttgggatgttgcataagagtcctatttggcccagttaattcaacttttgtctgcctgttttgtggactggctggctctgttagaactctgtccaaaaagtgcatggaatataacttgtaaagcttcccacaattgacaatatatatgcatgtgtttaaaccaaatccagaaagcttaaacaatagagctgcataatagtatttattaaagaatcacaactgtaaacatgagaataacttaaggattctagtttagttttttgtaattgcaaattatatttttgctgctgatatattagaataatttttaaatgtcatcttgaaatagaaatatgtattttaagcactcacgcaaaggtaaatgaacacgttttaaatgtgtgtgttgctaattttttccataagaattgtaaacattgaactgaacaaattacctataatggatttggttaatgacttatgagcaagctggtttggccagacagtatacccaaacttttatataatatacagaaggctatcacacttgtgaaattctcttgtctaatctgaatttgcattccatggtgttaacatggtatatgtattgttattaaagtaagtgacccatgtcacgagcaccaccaatacacacacacacacacacacaccctgagagagagaaagagagagagatnactaangagagagaactaggtgcggcaaataatacatgctctaatgaaggttattagtgattatctact

SEQ ID NO: 25253 - DNA, 1752 bp, Homo sapiens
aagggagaagccgggaggactgggtgcgcctgcagggatcggaagccggttggggtgtgagaggttttctcgctctagggagattcttcaagcaatcactatgtcaacagacacaggtgtttcccttccttcatatgaggaagatcagggatcaaaactcattcgaaaagctaaagaggcaccattcgtacccgttggaatagcgggttttgcagcaattgttgcatatggattatataaactgaagagcaggggaaatactaaaatgtccattcatctgatccacatgcgtgtggcagcccaaggctttgttgtaggagcaatgactgttggtatgggctattccatgtatcgggaattctgggcaaaacctaagccttagaagaagagatgctgtcttggtcttgttggaggagcttgctttagttagatgtcttattattaaagttacctattattgttggaaataaactaatttgtatgggtttagatggtaacatggcattttgaatattggcttcctttcttgcaggcttgatttgcttggtgaccgaattactagtgactagtttactaactaggtcattcaaggaagtcaagttaacttaaacatgtcacctaaatgcacttgatggtgttgaaatgtccaccttcttaaatttttaagatgaacttagttctaaagaagataacaggccaatcctgaaggtactccctgtttgctgcagaatgtcagatatttgggatgttgcataagagtcctatttggcccagttaattcaacttttgtctgcctgttttgtggactggctggctctgttagaactctgtccaaaaagtgcatggaatataacttgtaaagcttcccacaattgacaatatatatgcatgtgtttaaaccaaatccagaaagcttaaacaatagagctgcataatagtatttattaaagaatcacaactgtaaacatgagaataacttaaggattctagtttagttttttgtaattgcaaattatatttttgctgctgatatattagaataatttttaaatgtcatcttgaaatagaaatatgtattttaagcactcacgcaaaggtaaatgaacacgttttaaatgtgtgtgttgctaattttttccataagaattgtaaacattgaactgaacaaattacctataatggatttggttaatgacttatgagcaagctggtttggccagacagtatacccaaacttttatataatatacagaaggctatcacacttgtgaaattctcttgtctaatctgaatttgcattccatggtgttaacatggtatatgtattgttattaaagtaagtgacccatgtcacacaaaaaaaaaaaaaaaaaaaaaaaaacaacacaacaaaaaaaagaaaaacaaaaagaaaaacaaaaaaagcacacaaaaaaaaaagaaacacaacgaaaacaaaatgagagaacaaaagaaaaaaagcaggaggaggacagaagaaacacagggagcgagaggaaaagaagaagagaggagaagaagcaggaagaaaagaaaaagagagagggaagagaagaaaaaggagagaagaggcagaaaggaagagaaaagaagaagagaaagcaaaaaaggaggaagaaaaaaagaaacaacaaaagagagagaaagaaaagagaagaaaacaaaaaagaagaaaagaaggcaaaaaaagaaaaggagaaagagaagaaaaaaaagaagaaaaaaaagaaa

SEQ ID NO: 25254 - DNA, 972 bp, Homo sapiens
aagggagaagccgggaggactgggtgcgcctgcagggatcggaagccggttggggtgtgagaggttttctcgctctagggagattcttcaagcaatcactatgtcaacagacacaggtgtttcccttccttcatatgaggaagatcagggatcaaaactcattcgaaaagctaaagaggcaccattcgtacccgttggaatagcgggttttgcagcaattgttgcatatggattatataaactgaagagcaggggaaatactaaaatgtccattcatctgatccacatgcgtgtggcagcccaaggctttgttgtaggagcaatgactgttggtatgggctattccatgtatcgggaattctgggcaaaacctaagccttagaagaagagatgctgtcttggtcttgttggaggagcttgctttagttagatgtcttattattaaagttacctattattgttggaaataaactaatttgtatgggtttagatggtaacatggcattttgaatattggcttcctttcttgcaggcttgatttgcttggtgaccgaattactagtgactagtttactaactaggtcattcaaggaagtcaagttaacttaaacatgtcacctaaatgcacttgatggtgttgaaatgtccaccttcttaaatttttaagatgaacttagttctaaagaagataacaggccaatcctgaaggtactccctgtttgctgcagaatgtcagatatttgggatgttgcataagagtcctatttggcccagttaattcaacttttgtctgcctgttttgtggactggctggctctgttagaactctgtccaaagggtggattaatgggaggttcccatggatatttgctgtgtaccttcgaagtaaaaagcgggagttttttaaacacggcggaaaaaagtgtgggggagaatgcgggataaaaaagttgaaaatttcgagaatatggt

SEQ ID NO: 25255 - DNA, 1346 bp, Homo sapiens
aagcagtggtatcaacgcagagtggccattacggccggggggttggggtgtgagaggttttctcgctctagggagattcttcaagcaatcactatgtcaacagacacaggtgtttcccttccttcatatgaggaagatcagggatcaaaactcattcgaaaagctaaagaggcaccattcgtacccgttggaatagcgggttttgcagcaattgttgcatatggattatataaactgaagagcaggggaaatactaaaatgtccattcatctgatccacatgcgtgtggcagcccaaggctttgttgtaggagcaatgactgttggtatgggctattccatgtatcgggaattctgggcaaaacctaagccttagaagaagagatgctgtcttggtcttgttggaggagcttgctttagttagatgtcttattattaaagttacctattattgttggaaataaactaatttgtatgggtttagatggtaacatggcattttgaatattggcttcctttcttgcaggcttgatttgcttggtgaccgaattactagtgactagtttactaactaggtcattcaaggaagtcaagttaacttaaacatgtcacctaaatgcacttgatggtgttgaaatgtccaccttcttaaatttttaagatgaacttagttctaaagaagataacaggccaatcctgaaggtactccctgtttgctgcagaatgtcagatatttgggatgttgcataagagtcctatttggcccagttaattcaacttttgtctgcctgttttgtggactggctggctctgttagaactctgtccaaaaagtgcatggaatataacttgtaaagcttcccacaattgacaatatatatgcatgtgtttaaaccaaatccagaaagcttaaacaatagagctgcataatagtatttattaaagaatcacaactgtaaacatgagaataacttaaggattctagtttagttttttgtaattgcaaattatatttttgctgctgatatattagaataatttttaaatgtcatcttgaaatagaaatatgtattttaagcactcacgcaaaggtaaatgaacacgttttaaatgtgtgtgttgctaattttttccataagaattgtaaacattgaactgaacaaattacctataatggatttggttaatgacttatgagcaagctggtttggccagacagtatacccaaacttttatataatatacagaaggctatcacacttgtgaaattctcttgtctaatctgaatttgcattccatggtgttaacatggtatatgtattgttattaaagtaagtgacccatgtca

SEQ ID NO: 25256 - DNA, 1377 bp, Homo sapiens
aagggagaagccgggaggactgggtgcgcctgcagggatcggaagccggttggggtgtgagaggttttctcgctctagagaacctcatagaaattctttctcggagattcttcaagcaatcactatgtcaacagacacaggtgtttcccttccttcatatgaggaagatcagggatcaaaactcattcgaaaagctaaagaggcaccattcgtacccgttggaatagcgggttttgcagcaattgttgcatatggattatataaactgaagagcaggggaaatactaaaatgtccattcatctgatccacatgcgtgtggcagcccaaggctttgttgtaggagcaatgactgttggtatgggctattccatgtatcgggaattctgggcaaaacctaagccttagaagaagagatgctgtcttggtcttgttggaggagcttgctttagttagatgtcttattattaaagttacctattattgttggaaataaactaatttgtatgggtttagatggtaacatggcattttgaatattggcttcctttcttgcaggcttgatttgcttggtgaccgaattactagtgactagtttactaactaggtcattcaaggaagtcaagttaacttaaacatgtcacctaaatgcacttgatggtgttgaaatgtccaccttcttaaatttttaagatgaacttagttctaaagaagataacaggccaatcctgaaggtactccctgtttgctgcagaatgtcagatatttgggatgttgcataagagtcctatttggcccagttaattcaacttttgtctgcctgttttgtggactggctggctctgttagaactctgtccaaaaagtgcatggaatataacttgtaaagcttcccacaattgacaatatatatgcatgtgtttaaaccaaatccagaaagcttaaacaatagagctgcataatagtatttattaaagaatcacaactgtaaacatgagaataacttaaggattctagtttagttttttgtaattgcaaattatatttttgctgctgatatattagaataatttttaaatgtcatcttgaaatagaaatatgtattttaagcactcacgcaaaggtaaatgaacacgttttaaatgtgtgtgttgctaattttttccataagaattgtaaacattgaactgaacaaattacctataatggatttggttaatgacttatgagcaagctggtttggccagacagtatacccaaacttttatataatatacagaaggctatcacacttgtgaaattctcttgtctaatctgaatttgcattccatggtgttaacatggtatatgtattgttattaaagtaagtgacccatgtca

SEQ ID NO: 25257 - DNA, 1314 bp, Homo sapiens
agacggagccagcgaggagatggagcagaagcttgtggaggagattcttcaagcaatcactatgtcaacagacacaggtgtttcccttccttcatatgaggaagatcagggatcaaaactcattcgaaaagctaaagaggcaccattcgtacccgttggaatagcgggttttgcagcaattgttgcatatggattatataaactgaagagcaggggaaatactaaaatgtccattcatctgatccacatgcgtgtggcagcccaaggctttgttgtaggagcaatgactgttggtatgggctattccatgtatcgggaattctgggcaaaacctaagccttagaagaagagatgctgtcttggtcttgttggaggagcttgctttagttagatgtcttattattaaagttacctattattgttggaaataaactaatttgtatgggtttagatggtaacatggcattttgaatattggcttcctttcttgcaggcttgatttgcttggtgaccgaattactagtgactagtttactaactaggtcattcaaggaagtcaagttaacttaaacatgtcacctaaatgcacttgatggtgttgaaatgtccaccttcttaaatttttaagatgaacttagttctaaagaagataacaggccaatcctgaaggtactccctgtttgctgcagaatgtcagatatttgggatgttgcataagagtcctatttggcccagttaattcaacttttgtctgcctgttttgtggactggctggctctgttagaactctgtccaaaaagtgcatggaatataacttgtaaagcttcccacaattgacaatatatatgcatgtgtttaaaccaaatccagaaagcttaaacaatagagctgcataatagtatttattaaagaatcacaactgtaaacatgagaataacttaaggattctagtttagttttttgtaattgcaaattatatttttgctgctgatatattagaataatttttaaatgtcatcttgaaatagaaatatgtattttaagcactcacgcaaaggtaaatgaacacgttttaaatgtgtgtgttgctaattttttccataagaattgtaaacattgaactgaacaaattacctataatggatttggttaatgacttatgagcaagctggtttggccagacagtatacccaaacttttatataatatacagaaggctatcacacttgtgaaattctcttgtctaatctgaatttgcattccatggtgttaacatggtatatgtattgttattaaagtaagtgacccatgtca

SEQ ID NO: 25258 - DNA, 1299 bp, Homo sapiens
aagggagaagccgggaggactgggtgcgcctgcagggatcggaagccggttggggtgtgagaggttttctcgctctagggagattcttcaagcaatcactatgtcaacagacacaggtgtttcccttccttcatatgaggaagatcagggatcaaaactcattcgaaaagctaaagaggcaccattcgtacccgttggaatagcgggttttgcagcaattgttgcatatggattatataaactgaagagcaggggaaatactaaaatgtccattcatctgatccacatgcgtgtggcagcccaaggctttgttgtaggagcaatgactgttggtatgggctattccatgtatcgggaattctgggcctttagttagatgtcttattattaaagttacctattattgttggaaataaactaatttgtatgggtttagatggtaacatggcattttgaatattggcttcctttcttgcaggcttgatttgcttggtgaccgaattactagtgactagtttactaactaggtcattcaaggaagtcaagttaacttaaacatgtcacctaaatgcacttgatggtgttgaaatgtccaccttcttaaatttttaagatgaacttagttctaaagaagataacaggccaatcctgaaggtactccctgtttgctgcagaatgtcagatatttgggatgttgcataagagtcctatttggcccagttaattcaacttttgtctgcctgttttgtggactggctggctctgttagaactctgtccaaaaagtgcatggaatataacttgtaaagcttcccacaattgacaatatatatgcatgtgtttaaaccaaatccagaaagcttaaacaatagagctgcataatagtatttattaaagaatcacaactgtaaacatgagaataacttaaggattctagtttagttttttgtaattgcaaattatatttttgctgctgatatattagaataatttttaaatgtcatcttgaaatagaaatatgtattttaagcactcacgcaaaggtaaatgaacacgttttaaatgtgtgtgttgctaattttttccataagaattgtaaacattgaactgaacaaattacctataatggatttggttaatgacttatgagcaagctggtttggccagacagtatacccaaacttttatataatatacagaaggctatcacacttgtgaaattctcttgtctaatctgaatttgcattccatggtgttaacatggtatatgtattgttattaaagtaagtgacccatgtca

SEQ ID NO: 25259 - DNA, 1190 bp, Homo sapiens
ctagttttagaagtttcaatagcactagcaacagacgctaaaccccaggcagcaattgttgcatatggattatataaactgaagagcaggggaaatactaaaatgtccattcatctgatccacatgcgtgtggcagcccaaggctttgttgtaggagcaatgactgttggtatgggctattccatgtatcgggaattctgggcaaaacctaagccttagaagaagagatgctgtcttggtcttgttggaggagcttgctttagttagatgtcttattattaaagttacctattattgttggaaataaactaatttgtatgggtttagatggtaacatggcattttgaatattggcttcctttcttgcaggcttgatttgcttggtgaccgaattactagtgactagtttactaactaggtcattcaaggaagtcaagttaacttaaacatgtcacctaaatgcacttgatggtgttgaaatgtccaccttcttaaatttttaagatgaacttagttctaaagaagataacaggccaatcctgaaggtactccctgtttgctgcagaatgtcagatatttgggatgttgcataagagtcctatttggcccagttaattcaacttttgtctgcctgttttgtggactggctggctctgttagaactctgtccaaaaagtgcatggaatataacttgtaaagcttcccacaattgacaatatatatgcatgtgtttaaaccaaatccagaaagcttaaacaatagagctgcataatagtatttattaaagaatcacaactgtaaacatgagaataacttaaggattctagtttagttttttgtaattgcaaattatatttttgctgctgatatattagaataatttttaaatgtcatcttgaaatagaaatatgtattttaagcactcacgcaaaggtaaatgaacacgttttaaatgtgtgtgttgctaattttttccataagaattgtaaacattgaactgaacaaattacctataatggatttggttaatgacttatgagcaagctggtttggccagacagtatacccaaacttttatataatatacagaaggctatcacacttgtgaaattctcttgtctaatctgaatttgcattccatggtgttaacatggtatatgtattgttattaaagtaagtgacccatgtca

SEQ ID NO: 25260 - DNA, 1242 bp, Homo sapiens
attcggcagataacaagggactgcccggcggataccgagccgttctgaaggaaactcactagcagtggccgctgtctgaggtcatgactgtgagtctgatcaacggggagtcctaggcgagtctcgatctcaagattccgccccgcctactaaaatgtccattcatctgatccacatgcgtgtggcagcccaaggctttgttgtaggagcaatgactgttggtatgggctattccatgtatcgggaattctgggcaaaacctaagccttagaagaagagatgctgtcttggtcttgttggaggagcttgctttagttagatgtcttattattaaagttacctattattgttggaaataaactaatttgtatgggtttagatggtaacatggcattttgaatattggcttcctttcttgcaggcttgatttgcttggtgaccgaattactagtgactagtttactaactaggtcattcaaggaagtcaagttaacttaaacatgtcacctaaatgcacttgatggtgttgaaatgtccaccttcttaaatttttaagatgaacttagttctaaagaagataacaggccaatcctgaaggtactccctgtttgctgcagaatgtcagatatttgggatgttgcataagagtcctatttggcccagttaattcaacttttgtctgcctgttttgtggactggctggctctgttagaactctgtccaaaaagtgcatggaatataacttgtaaagcttcccacaattgacaatatatatgcatgtgtttaaaccaaatccagaaagcttaaacaatagagctgcataatagtatttattaaagaatcacaactgtaaacatgagaataacttaaggattctagtttagttttttgtaattgcaaattatatttttgctgctgatatattagaataatttttaaatgtcatcttgaaatagaaatatgtattttaagcactcacgcaaaggtaaatgaacacgttttaaatgtgtgtgttgctaattttttccataagaattgtaaacattgaactgaacaaattacctataatggatttggttaatgacttatgagcaagctggtttggccagacagtatacccaaacttttatataatatacagaaggctatcacacttgtgaaattctcttgtctaatctgaatttgcattccatggtgttaacatggtatatgtattgttattaaagtaagtgacccatgtca

SEQ ID NO: 25261 - DNA, 541 bp, Homo sapiens
aagggagaagccgggaggactgggtgcgcctgcagggatcggaagccggttggggtgtgagaggttttctcgctctagggagattcttcaagcaatcactatgtcaacagacacaggtgtttcccttccttcatatgaggaagatcagggatcaaaactcattcgaaaagctaaagaggcaccattcgtacccgttgtttttggagacagtcccgctctgtcgcccaggctggagtgcagtggcaggatctcggctcactgcagcctctgcctcctgggttcaagtgattctcctacctcagcttcctgagtagctgggactactcccgccaccacaccaggctgatttttgtgtttttagtagagacggggtttcaccattttggccaggctagtctcgaactcctgttttcaagtgattcacctgcctcggcctcccaaagtgcttggattacaggtgtgagccactgcacccagcctcttatgttatcttaattttgttttggtatcagggatttgttttcttggaaaatatattgga

SEQ ID NO: 25262 - DNA, 1353 bp, Homo sapiens
aagggagaagccgggaggactgggtgcgcctgcagggatcggaagccggttggggtgtgagaggttttctcgctctagggagattcttcaagcaatcactatgtcaacagacacaggtgtttcccttccttcatatgaggaagatcagggatcaaaactcattcgaaaagctaaagaggcaccattcgtacccgttggaatagcgggttttgcagcaattgttgcatatggattatataaactgaagagcaggggaaatactaaaatgtccattcatctgatccacatgcgtgtggcagcccaaggctttgttgtaggagcaatgactgttggtatgggctattccatgtatcgggaattctgggcaaaacctaagccttagaagaagagatgctgtcttggtcttgttggaggagcttgctttagttagatgtcttattattaaagttacctattattgttggaaataaactaatttgtatgggtttagatggtaacatggcattttgaatattggcttcctttcttgcaggcttgatttgcttggtgaccgaattactagtgactagtttactaactaggtcattcaaggaagtcaagttaacttaaacatgtcacctaaatgcacttgatggtgttgaaatgtccaccttcttaaatttttaagatgaacttagttctaaagaagataacaggccaatcctgaaggtactccctgtttgctgcagaatgtcagatatttgggatgttgcataagagtcctatttggcccagttaattcaacttttgtctgcctgttttgtggactggctggctctgttagaactctgtccaaaaagtgcatggaatataacttgtaaagcttcccacaattgacaatatatatgcatgtgtttaaaccaaatccagaaagcttaaacaatagagctgcataatagtatttattaaagaatcacaactgtaaacatgagaataacttaaggattctagtttagttttttgtaattgcaaattatatttttgctgctgatatattagaataatttttaaatgtcatcttgaaatagaaatatgtattttaagcactcacgcaaaggtaaatgaacacgttttaaatgtgtgtgttgctaattttttccataagaattgtaaacattgaactgaacaaattacctataatggatttggttaatgacttatgagcaagctggtttggccagacagtatacccaaacttttatataatatacagaaggctatcacacttgtgaaattctcttgtctaatctgaatttgcattccatggtgttaacatggtatatgtattgttattaaagtaagtgacccatgtca

SEQ ID NO: 25263 - DNA, 904 bp, Homo sapiens
  misc_feature (796)..(796): n is a, c, g, or t
  misc_feature (824)..(824): n is a, c, g, or t
  misc_feature (826)..(826): n is a, c, g, or t
  misc_feature (828)..(829): n is a, c, g, or t
aagggagaagccgggaggactgggtgcgcctgcagggatcggaagccggttggggtgtgagaggttttctcgctctagggagattcttcaagcaatcactatgtcaacagacacaggtgtttcccttccttcatatgaggaagatcagggatcaaaactcattcgaaaagctaaagaggcaccattcgtacccgttggaatagcgggttttgcagcaattgttgcatatggattatataaactgaagagcaggggaaatactaaaatgtccattcatctgatccacatgcgtgtggcagcccaaggctttgttgtaggagcaatgactgttggtatgggctattccatgtatcgggaattctgggcaaaacctaagccttagaagaagagatgctgtcttggtcttgttggaggagcttgctttagttagatgtcttattattaaagttacctattattgttggaaataaactaatttgtatgggtttagatggtaacatggcattttgaatattggcttcctttcttgcaggcttgatttgcttggtgaccgaattactagtgactagtttactaactaggtcattcaaggaagtcaagttaacttaaacatgtcacctaaatgcacttgatggtgttgaaatgtccaccttcttaaatttttaagatgaacttagttctaaagaagataacaggccaatcctgaaggtactccctgtttgctgctggcgaatgtcgatattgggggtggcaagagtctattgggccagttattcactttggttgcggttgggangggggctgtgaccggccaaggggggtantngnngtcccatggattttggtttcccgcacggtaaaagggtgagttttaaccgggggaaagagagtgggggacatggga

SEQ ID NO: 25264 - DNA, 1382 bp, Homo sapiens
aagggagaagccgggaggactgggtgcgcctgcagggatcggaagccggttggggtgtgagaggttttctcgctctagggagattcttcaagcaatcactatgtcaacagacacaggtgtttcccttccttcatatgaggaagatcagggatcaaaactcattcgaaaagctaaagaggcaccattcgtacccgttggaatagcgggttttgcagcaattgttgcatatggattatataaactgaagagcaggggaaatactaaaatgtccattcatctgatccacatgcgtgtggcagcccaaggctttgttgtaggagcaatgactgttggtatgggctattccatgtatcgggaattctgggcaaaacctaagccttagaagaagagatgctgtcttggtcttgttggaggagcttgctttagttagatgtcttattattaaagttacctattattgttggaaataaactaatttgtatgggtttagatggtaacatggcattttgaatattggcttcctttcttgcaggcttgatttgcttggtgaccgaattactagtgactagtttactaactaggtcattcaaggaagtcaagttaacttaaacatgtcacctaaatgcacttgatggtgttgaaatgtccaccttcttaaatttttaagatgaacttagttctaaagaagataacaggccaatcctgaaggtactccctgtttgctgcagaatgtcagatatttgggatgttgcataagagtcctatttggcccagttaattcaacttttgtctgcctgttttgtggactggctggctctgttagaactctgtccaaaaagtgcatggaatataacttgtaaagcttcccacaattgacaatatatatgcatgtgtttaaaccaaatccagaaagcttaaacaatagagctgcataatagtatttattaaagaatcacaactgtaaacatgagaataacttaaggattctagtttagttttttgtaattgcaaattatatttttgctgctgatatattagaataatttttaaatgtcatcttgaaatagaaatatgtattttaagcactcacgcaaaggtaaatgaacacgttttaaatgtgtgtgttgctaattttttccataagaattgtaaacattgaactgaacaaattacctataatggatttggttaatgacttatgagcaagctggtttggccagacagtatacccaaacttttatataatatacagaaggctatcacacttgtgaaattctcttgtctaatctgaatttgcattccatggtgttaacatggtatatgtattgttattaaagtaagtgacccatgtcaaaaaaaaaaaaaaaaaaagctacatacct

SEQ ID NO: 25265 - DNA, 1745 bp, Homo sapiens
aagggagaagccgggaggactgggtgcgcctgcagggatcggaagccggttggggtgtgagaggttttctcgctctagggagattcttcaagcaatcactatgtcaacagacacaggtgtttcccttccttcatatgaggaagatcagggatcaaaactcattcgaaaagctaaagaggcaccattcgtacccgttggaatagcgggttttgcagcaattgttgcatatggattatataaactgaagagcaggggaaatactaaaatgtccattcatctgatccacatgcgtgtggcagcccaaggctttgttgtaggagcaatgactgttggtatgggctattccatgtatcgggaattctgggcaaaacctaagccttagaagaagagatgctgtcttggtcttgttggaggagcttgctttagttagatgtcttattattaaagttacctattattgttggaaataaactaatttgtatgggtttagatggtaacatggcattttgaatattggcttcctttcttgcaggcttgatttgcttggtgaccgaattactagtgactagtttactaactaggtcattcaaggaagtcaagttaacttaaacatgtcacctaaatgcacttgatggtgttgaaatgtccaccttcttaaatttttaagatgaacttagttctaaagaagataacaggccaatcctgaaggtactccctgtttgctgcagaatgtcagatatttgggatgttgcataagagtcctatttggcccagttaattcaacttttgtctgcctgttttgtggactggctggctctgttagaactctgtccaaaaagtgcatggaatataacttgtaaagcttcccacaattgacaatatatatgcatgtgtttaaaccaaatccagaaagcttaaacaatagagctgcataatagtatttattaaagaatcacaactgtaaacatgagaataacttaaggattctagtttagttttttgtaattgcaaattatatttttgctgctgatatattagaataatttttaaatgtcatcttgaaatagaaatatgtattttaagcactcacgcaaaggtaaatgaacacgttttaaatgtgtgtgttgctaattttttccataagaattgtaaacattgaactgaacaaattacctataatggatttggttaatgacttatgagcaagctggtttggccagacagtatacccaaacttttatataatatacagaaggctatcacacttgtgaaattctcttgtctaatctgaatttgcattccatggtgttaacatggtatatgtattgttattaaagtaagtgacccatgtcatgtctttatttatttcatgaggaaaagctttctgtagaggaacaaatttgagaacagttcaggaaatgtctttttgtgttgttctctaatcatgttctcctttctgttcaacgattttaaaatattttactttatggtatggtctcattcttttcctttgggggtaattgggtccatggattatccatataactttctcttttttcgagaagggatattcccggcacacggcgggcggcaaggcacacttgggccagtgagtccacccagaaaggctttgtgtgggaaaacagaggtgcggcccccacaaaaatcacacaacacaaaaaaaaggggcggcaataaagggcacagaacatttaagaggcagagaatataaacgggcaacaaaa

SEQ ID NO: 25266 - DNA, 965 bp, Homo sapiens
  misc_feature (842)..(842): n is a, c, g, or t
  misc_feature (895)..(895): n is a, c, g, or t
  misc_feature (941)..(941): n is a, c, g, or t
aagggagaagccgggaggactgggtgcgcctgcagggatcggaagccggttggggtgtgagaggttttctcgctctagggagattcttcaagcaatcactatgtcaacagacacaggtgtttcccttccttcatatgaggaagatcagggatcaaaactcattcgaaaagctaaagaggcaccattcgtacccgttggaatagcgggttttgcagcaattgttgcatatggattatataaactgaagagcaggggaaatactaaaatgtccattcatctgatccacatgcgtgtggcagcccaaggctttgttgtaggagcaatgactgttggtatgggctattccatgtatcgggaattctgggcaaaacctaagccttagaagaagagatgctgtcttggtcttgttggaggagcttgctttagttagatgtcttattattaaagttacctattattgttggaaataaactaatttgtatgggtttagatggtaacatggcattttgaatattggcttcctttcttgcaggcttgatttgcttggtgaccgaattactagtgactagtttactaactaggtcattcaaggaagtcaagttaacttaaacatgtcacctaaatgcacttgatggtgttgaaatgtccaccttcttaaatttttaagatgaacttagttctaaagaagataacaggccaatcctgaaggtactccctgtttgctgcagaatgtcagatatttgggatgttgcataagagtcctatttggcccagttaattcaacttttggtctgcggttggggacggtggttgtaaactctgccaagggtggatataatggnggtccccatgcaaatttcgtgtttccccccagtacaggggtgttttaacccgnggaaaagtacgagggaatggggaaaatccataacgcgccgtgtggncgcacgcgtgaagtgcgtatattg

SEQ ID NO: 25267 - DNA, 1613 bp, Homo sapiens
aagggagaagccgggaggactgggtgcgcctgcagggatcggaagccggttggggtgtgagaggttttctcgctctagggagattcttcaagcaatcactatgtcaacagacacaggtgtttcccttccttcatatgaggaagatcagggatcaaaactcattcgaaaagctaaagaggcaccattcgtacccgttgtttttggagacagtcccgctctgtcgcccaggctggagtgcagtggcaggatctcggctcactgcagcctctgcctcctgggttcaagtgattctcctacctcagcttcctgagtagctgggactactcccgccaccacaccaggctgatttttgtgtttttagtagagacggggtttcaccattttggccaggctagtctcgaactcctgttttcaagtgattcacctgcctcggcctcccaaagtgcttggattacaggaatagcgggttttgcagcaattgttgcatatggattatataaactgaagagcaggggaaatactaaaatgtccattcatctgatccacatgcgtgtggcagcccaaggctttgttgtaggagcaatgactgttggtatgggctattccatgtatcgggaattctgggcaaaacctaagccttagaagaagagatgctgtcttggtcttgttggaggagcttgctttagttagatgtcttattattaaagttacctattattgttggaaataaactaatttgtatgggtttagatggtaacatggcattttgaatattggcttcctttcttgcaggcttgatttgcttggtgaccgaattactagtgactagtttactaactaggtcattcaaggaagtcaagttaacttaaacatgtcacctaaatgcacttgatggtgttgaaatgtccaccttcttaaatttttaagatgaacttagttctaaagaagataacaggccaatcctgaaggtactccctgtttgctgcagaatgtcagatatttgggatgttgcataagagtcctatttggcccagttaattcaacttttgtctgcctgttttgtggactggctggctctgttagaactctgtccaaaaagtgcatggaatataacttgtaaagcttcccacaattgacaatatatatgcatgtgtttaaaccaaatccagaaagcttaaacaatagagctgcataatagtatttattaaagaatcacaactgtaaacatgagaataacttaaggattctagtttagttttttgtaattgcaaattatatttttgctgctgatatattagaataatttttaaatgtcatcttgaaatagaaatatgtattttaagcactcacgcaaaggtaaatgaacacgttttaaatgtgtgtgttgctaattttttccataagaattgtaaacattgaactgaacaaattacctataatggatttggttaatgacttatgagcaagctggtttggccagacagtatacccaaacttttatataatatacagaaggctatcacacttgtgaaattctcttgtctaatctgaatttgcattccatggtgttaacatggtatatgtattgttattaaagtaagtgacccatgtca

SEQ ID NO: 25268 - DNA, 1398 bp, Homo sapiens
aagggagaagccgggaggactgggtgcgcctgcagggatcggaagccggttggggtgtgagaggttttctcgctctagggagattcttcaagcaatcactatgtcaacagacacaggtgtttcccttccttcatatgaggaagatcagggatcacaaatcagttccggagaaaacgctaataacgaagaggggagccatttctggtaacgccgattgagcaagtagtccggagttctatatcgcgagacgatactcagtgtcgcagtatcggatatataatataaactgaagagcaggggaaatactaaaatgtccattcatctgatccacatgcgtgtggcagcccaaggctttgttgtaggagcaatgactgttggtatgggctattccatgtatcgggaattctgggcaaaacctaagccttagaagaagagatgctgtcttggtcttgttggaggagcttgctttagttagatgtcttattattaaagttacctattattgttggaaataaactaatttgtatgggtttagatggtaacatggcattttgaatattggcttcctttcttgcaggcttgatttgcttggtgaccgaattactagtgactagtttactaactaggtcattcaaggaagtcaagttaacttaaacatgtcacctaaatgcacttgatggtgttgaaatgtccaccttcttaaatttttaagatgaacttagttctaaagaagataacaggccaatcctgaaggtactccctgtttgctgcagaatgtcagatatttgggatgttgcataagagtcctatttggcccagttaattcaacttttgtctgcctgttttgtggactggctggctctgttagaactctgtccaaaaagtgcatggaatataacttgtaaagcttcccacaattgacaatatatatgcatgtgtttaaaccaaatccagaaagcttaaacaatagagctgcataatagtatttattaaagaatcacaactgtaaacatgagaataacttaaggattctagtttagttttttgtaattgcaaattatatttttgctgctgatatattagaataatttttaaatgtcatcttgaaatagaaatatgtattttaagcactcacgcaaaggtaaatgaacacgttttaaatgtgtgtgttgctaattttttccataagaattgtaaacattgaactgaacaaattacctataatggatttggttaatgacttatgagcaagctggtttggccagacagtatacccaaacttttatataatatacagaaggctatcacacttgtgaaattctcttgtctaatctgaatttgcattccatggtgttaacatggtatatgtattgttattaaagtaagtgacccatgtca

SEQ ID NO: 25269 - DNA, 358 bp, Homo sapiens
aagggagaagccgggaggactgggtgcgcctgcagggatcggaagccggttggggtgtgagaggttttctcgctctagggagattcttcaagcaatcactatgtcaacagacacaggtgtttcccttccttcatatgaggaagatcagggatcaaaactcattcgaaaagctaaagaggcaccattcgtacccgttggaatagcgggttttgcagcaattgttgcatatggattatataaactgaagagcaggggaaatactaaaatgtccattcatctgatccacatgcgtgtggcagcccaaggctttgttgtaggagcaatgactgtgacaaagtgtaagcggagcggctcatca

SEQ ID NO: 25270 - DNA, 624 bp, Homo sapiens
  misc_feature (122)..(122): n is a, c, g, or t
ccagttctgtactcaagaagcgcttgatagagtttatgggttcgtaaggacgtcgaaggtcccagaatttgattttccggtcactccccgcagagacaaggaaatggctgttagctttgcancattgaagggtacgcacagcctggtcatgggctaggaaacactggaaggggtagagctttaaggagccatcagagagccgtatccgctgcaggccagaggctattcataagggtaaccatcatgtatgcccacgagggtgatagtaattcgtgagactgaagttgcttagagtacttctttgaccaaggaataccacagacaccctaccgatagaacagtggctcagatcttacttgctcctgcttacgaagtattcccaatcactggtcatctgaccctacttgaacactcctgaacagtcatgttttttaaaatcttcctttatatcaagtcagagagtatacttctataaatttcactcatggatgttaggaaatctagtcatcttccctgtgattgccctgttaagtatttaaccatagctatcatgtgtttcccaaatcttctctagattaaatatcttcagtatcagcaaaagaaatagtaagaagtgtaggcggg

SEQ ID NO: 25271 - DNA, 531 bp, Homo sapiens
ttttgaatggggtagttctgtcagggcttcttatttatcacaggaataatatagatggattttcactgacctttatttaccttggcctcccaaagtgttgagattacaggcatgagccactgcgcccagcccagcacatgattcttgagccagcagctgtaaataagagcaccttcccagtttgataagcacttgttcctaccaactgtttttccctcaaccctcatcgtgatcatttatttatgcaagtgtttttcagcttgagtgtgcgtcagaatcccctgaagagcttgttaaaacacaaggtgctggccccatccagaattgctgattcggtaggtctggggtagaactaggaatttgcattttaacaaatttgcaggtgatactgatgctgcagtttctggggccacactttgtgaacctctgatatgaactgtttaataccgtgtagtgaattcctttctgcttgaactgattggagaggattctgttctatgcaactgagccaatatggggggaaaaaaaaaa

SEQ ID NO: 25272 - DNA, 5098 bp, Homo sapiens
atggaataatggccaaactcagtgacttacacctgtgatcgcagcactatgggaggctgaggcaagaggatcacttcaggtcaggtgttcaagaccagcctggtcaacataacgagaccccatctctagaaaaaattaaaaaattaggccgggcacggtggctcatgcctgtaatcccagcactttgggaggctgaggcaggcgtatcacaaggtcaggagttcgagaccagcctggccaacatagtgaaaccccttctctactaaaaagacaaaaattatccgggcttgctggcgggcgcctgtaatctcagctactcgggaggctgaggcaggacaattgcttgaacccgggaggcggagtttgcagtgagccgagatcgcgccactgcactccagcctggggacagagcaagactccatctcaggaaaaaataaaaataaaaataaaaacggggtctcactatgttgcccaggctggtatcgaattcctgggctcaagtgatcctcccccgccttggcctcccaaagtgctgggatcacagacaggagccaccatacccagccaaagtcatgcttttctactcctactccttcccttccttgtcctctttccaagctctctcgggcccatccctgacttcactactggcagaatcctccagcggccggcggcgaggacttctttgtctcccagactccgccttgggctcggacgccgccagggttgcaggtacagactctctggtctagctggctcttccggccacaggcgcggcagtccggccggaaaggccggattcagggatccagagcgcgagcccggcctgggagtccgcctactcccggctcccgtcgaggccgcgtgggatcccgttggccgcgcaggcgtcgatctcccctttttgacactgcaactcccatgaggccctgcagcgtccctggcgccgctgaagacgccctggaactcggctggcttcggagggctcggtgactctggccgcgctgcattatggaatacagagtctaagagaaaactagcccggcaccgactccggaccaagcacacgtgtttaccttgtgcactggggtgggggcgtcagtgaagagcagctaacaagatttcgtcataagaccgcgaccagacaggcggcgccatcttcgaacttagacttccggaaggactttggcgaggttcagcttgagtgtgcgtcagaatcccctgaagagcttgttaaaacacaaggtgctggccccatccagaattgctgattcggggcagccattttggggggtgctgatggatacctgcggggtcggctatgttgccctgggggaggccggccccgtggggaacatgactgtggtagactctcctggacaagaggtgctaaatcagcttgatgtcaagacctcttcagaaatgaccagtgcagaggcttccgtagagatgtcattacctacccctttgcctggatttgaggattctcctgatcagaggaggctccctccagagcaggaaagcctctccagactggaacagccagatctttcttcagagatgtcaaaggtctcaaagcctagggcctcaaagcctggccggaagagaggtggtaggacacgaaaaggccccaaaaggccccaacagcctaatcctccatcagccccactggttcctggtctcttagatcaatccaaccctctgtccacccccatgcctaagaaacgaggtcgaaagtccaaggcagagctgctgctgctgaagttgtcaaaagacctagatcggccagaatctcaatctccaaagaggccccctgaggactttgagaccccttctggggaacgaccccgccgaagggctgcccaagtggcacttctgtatcttcaggaactggctgaagagctctcaacagccctgcctgcccctgtgtcctgtcctgagggccccaaggtgagcagccccaccaaaccgaagaagatccggcagccagcagcctgtccaggtggagaagaggtggatggtgctccacgggatgaagacttttttctccaggttgaggctgaagatgtggaagaaagtgagggcccaagtgagagctcatctgaacctgagcctgtagtgccccgaagcaccccacgaggatctacttcagggaaacagaaaccacactgccgaggaatggctcccaatggcttaccaaatcatatcatggctcctgtttggaagtgcctccatctcaccaaggacttccgagagcagaaacattcatactgggagtttgctgagtggattcctttagcctggaagtggcacttgttatctgagcttgaggccgctccctacctgccccaggaggagaagtctccattgttttctgtacaacgtgaagggctacctgaagatggcaccctctaccgaataaacagatttagctcgatcacagcacatccagagcgctgggatgtgtccttcttcacggggggaccgctctgggctctggactggtgcccagtgccagagggggcaggagcctcgcaatatgtggctcttttctccagccctgacatgaatgagacacacccactgagccagcttcattcgggtcctgggctgctccagctctggggccttgggaccttgcagcaagaaagctgtcctggcaacagggcccactttgtctatgggattgcttgtgacaacggctgcatctgggacctcaagttctgccccagtggagcatgggaacttccaggcacccctcggaaggctcctctcctgccccggttgggtctcttggctctggcctgctcagacgggaaagtactgctattcagtctaccccatccggaggccctgctggctcagcaacccccagatgcagtgaagcctgccatatataaggtacaatgtgtggcaactctgcaggtggggtctatgcaagctacagacccctctgagtgtggtcagtgccttagcctggcctggatgcctaccaggccccaccaacacctagctgctggatattataatggcatggtggttttctggaaccttcccactaactcacccctgcagcggatacggctctctgatggctccttaaagctctaccccttccagtgtttcctagcccatgaccaggctgtgcgtacccttcaatggtgcaaagctaacagccatttccttgtctctgcggggagtgaccggaaaatcaaattctgggaccttcgacgtccttacgaacccataaactctatcaagcgcttcttgagtacagaactggcctggctgcttccctacaatggtgtcactgtggctcaggacaactgctatgcctcttatggactctgtgggattcattatattgacgctggttaccttggtttcaaggcctacttcactgctcctcgaaaaggcaccgtttggagtctttcaggatccgactggcttgggacaatagctgcaggagatatatccggggagctcattgctgctatattaccagatatggcactgaatccaataaatgtcaagcgacctgtagagcgaagatttcctatatataaagcagatctgataccgtatcaggacagtcctgaaggtccagaccattcttctgcttcatctggggtccccaaccctcccaaggctcgaacttacactgaaactgtcaaccatcactacttgctctttcaagacacagatttgggttcattccatgatctgctccgtagagaaccaatgctgcgcatgcaggagggagaggggcattctcaactctgcctggacaggctgcagctggaggctattcataaggtacgtttcagcccaaacctggactcctatggatggctggtatctggggggcagtcagggctggttcgaatccattttgtccgtggactcgcctccccactgggccaccgtatgcagcttgaaagccgagcccacttcaatgctatgttccaaccatcctcccccactagacggcctggcttctctccaaccagccatcgccttctgcccactccctagccttggcccacaccagatccttggagtgaagtcggtcaagaacaaatggcccctatgcacagagccataggaactgggggccttccctggacagtgatcatgccaggcctggacctttaggcctgcctccccaggactccttagatcccactctttctacagacttctgtgatcacagccccctgcgggcaggggggctctccctccaccaactctcaaggctcctcagcctaagactatggctcatgagaaacactcaggcctgacctaggcttgggagtcaaactgctcatattgagcatattgttaagtgggtaaagccaagtaaaggtactgggtgtttttgtgaccacttgtgaatgggtgtatggagaactgaaaagggtatctgcatgaaggctcctgtctgactattccaggatccaatattactgccttctgaaacttcctctttagggtaaccatcatgtatgcccacgagggtgatagtaattcgtgagactgaagttgcttagagtacttctttgaccaaggaataccacagacaccctaccgatagaacagtggctcagatcttacttgctcctgcttacgaagtattcccaatcactggtcatctgaccctacttgaacactcctgaacagtcatgttttttaaaatcttcctttatatcaagtcagagagtatacttctataaatttcactcatggatgttaggaaatctagtcatcttccctgtgattgccctgttaagtatttaaccatagctatcatgtgtttcccaaatcttctctagattaaatatcttcagttacttcaaccattcttttacacgtcatgatttttgatccttcatgatactgtcacattgttgactcattagaatgtttacctacttcagttctatgtataggaggtgtttagaacccaagtactgtaatgtattgttatatctcatcttgttagagtcctcttgtgggatgctgcagactcacagtgactatgatactgcctcctaagcaaggacacaccccagtgatgagaaataggcaaaccatggtc

SEQ ID NO: 25273 - DNA, 2421 bp, Homo sapiens
ggacgcgtgggtcgcggacgcgtgggtgcatctgggacctcaagttctgccccagtggagcatgggaacttccaggcacccctcggaaggctcctctcctgccccggttgggtctcttggctctggcctgctcagacgggaaagtactgctattcagtctaccccatccggaggccctgctggctcagcaacccccagatgcagtgaagcctgccatatataaggtacaatgtgtggcaactctgcaggtggggtctatgcaagctacagacccctctgagtgtggtcagtgccttagcctggcctggatgcctaccaggccccaccaacacctagctgctggatattataatggcatggtggttttctggaaccttcccactaactcacccctgcagcggatacggctctctgatggctccttaaagctctaccccttccagtgtttcctagcccatgaccaggctgtgcgtacccttcaatggtgcaaagctaacagccatttccttgtctctgcggggagtgaccggaaaatcaaattctgggaccttcgacgtccttacgaacccataaactctatcaagcgcttcttgagtacagaactggcctggctgcttccctacaatggtgtcactgtggctcaggacaactgctatgcctcttatggactctgtgggattcattatattgacgctggttaccttggtttcaaggcctacttcactgctcctcgaaaaggcaccgtttggagtctttcaggatccgactggcttgggacaatagctgcaggagatatatccggggagctcattgctgctatattaccagatatggcactgaatccaataaatgtcaagcgacctgtagagcgaagatttcctatatataaagcagatctgataccgtatcaggacagtcctgaaggtccagaccattcttctgcttcatctggggtccccaaccctcccaaggctcgaacttacactgaaactgtcaaccatcactacttgctctttcaagacacagatttgggttcattccatgatctgctccgtagagaaccaatgctgcgcatgcaggagggagaggggcattctcaactctgcctggacaggctgcagctggaggctattcataaggtacgtttcagcccaaacctggactcctatggatggctggtatctggggggcagtcagggctggttcgaatccattttgtccgtggactcgcctccccactgggccaccgtatgcagcttgaaagccgagcccacttcaatgctatgttccaaccatcctcccccactagacggcctggcttctctccaaccagccatcgccttctgcccactccctagccttggcccacaccagatccttggagtgaagtcggtcaagaacaaatggcccctatgcacagagccataggaactgggggccttccctggacagtgatcatgccaggcctggacctttaggcctgcctccccaggactccttagatcccactctttctacagacttctgtgatcacagccccctgcgggcaggggggctctccctccaccaactctcaaggctcctcagcctaagactatggctcatgagaaacactcaggcctgacctaggcttgggagtcaaactgctcatattgagcatattgttaagtgggtaaagccaagtaaaggtactgggtgtttttgtgaccacttgtgaatgggtgtatggagaactgaaaagggtatctgcatgaaggctcctgtctgactattccaggatccaatattactgccttctgaaacttcctctttagggtaaccatcatgtatgcccacgagggtgatagtaattcgtgagactgaagttgcttagagtacttctttgaccaaggaataccacagacaccctaccgatagaacagtggctcagatcttacttgctcctgcttacgaagtattcccaatcactggtcatctgaccctacttgaacactcctgaacagtcatgttttttaaaatcttcctttatatcaagtcagagagtatacttctataaatttcactcatggatgttaggaaatctagtcatcttccctgtgattgccctgttaagtatttaaccatagctatcatgtgtttcccaaatcttctctagattaaatatcttcagttacttcaaccattcttttacacgtcatgatttttgatccttcatgatactgtcacattgttgactcattagaatgtttacctacttcagttctatgtataggaggtgtttagaacccaagtactgtaatgtattgttatatctcatcttgttagagtcctcttgtgggatgctgcagactcacagtgactatgatactgcctcctaagcaaggacacaccccagtgatgagaaataggcaaaccatggtc

SEQ ID NO: 25274 - DNA, 5294 bp, Homo sapiens
atggaataatggccaaactcagtgacttacacctgtgatcgcagcactatgggaggctgaggcaagaggatcacttcaggtcaggtgttcaagaccagcctggtcaacataacgagaccccatctctagaaaaaattaaaaaattaggccgggcacggtggctcatgcctgtaatcccagcactttgggaggctgaggcaggcgtatcacaaggtcaggagttcgagaccagcctggccaacatagtgaaaccccttctctactaaaaagacaaaaattatccgggcttgctggcgggcgcctgtaatctcagctactcgggaggctgaggcaggacaattgcttgaacccgggaggcggagtttgcagtgagccgagatcgcgccactgcactccagcctggggacagagcaagactccatctcaggaaaaaataaaaataaaaataaaaacggggtctcactatgttgcccaggctggtatcgaattcctgggctcaagtgatcctcccccgccttggcctcccaaagtgctgggatcacagacaggagccaccatacccagccaaagtcatgcttttctactcctactccttcccttccttgtcctctttccaagctctctcgggcccatccctgacttcactactggcagaatcctccagcggccggcggcgaggacttctttgtctcccagactccgccttgggctcggacgccgccagggttgcaggtacagactctctggtctagctggctcttccggccacaggcgcggcagtccggccggaaaggccggattcagggatccagagcgcgagcccggcctgggagtccgcctactcccggctcccgtcgaggccgcgtgggatcccgttggccgcgcaggcgtcgatctcccctttttgacactgcaactcccatgaggccctgcagcgtccctggcgccgctgaagacgccctggaactcggctggcttcggagggctcggtgactctggccgcgctgcattatggaatacagagtctaagagaaaactagcccggcaccgactccggaccaagcacacgtgtttaccttgtgcactggggtgggggcgtcagtgaagagcagctaacaagatttcgtcataagaccgcgaccagacaggcggcgccatcttcgaacttagacttccggaaggactttggcgaggggcagccattttggggggtgctgatggatacctgcggggtcggctatgttgccctgggggaggccggccccgtggggaacatgactgtggtagactctcctggacaagaggtgctaaatcagcttgatgtcaagacctcttcagaaatgaccagtgcagaggcttccgtagagatgtcattacctacccctttgcctggatttgaggattctcctgatcagaggaggctccctccagagcaggaaagcctctccagactggaacagccagatctttcttcagagatgtcaaaggtctcaaagcctagggcctcaaagcctggccggaagagaggtggtaggacacgaaaaggccccaaaaggccccaacagcctaatcctccatcagccccactggttcctggtctcttagatcaatccaaccctctgtccacccccatgcctaagaaacgaggtcgaaagtccaaggcagagctgctgctgctgaagttgtcaaaagacctagatcggccagaatctcaatctccaaagaggccccctgaggactttgagaccccttctggggaacgaccccgccgaagggctgcccaagtggcacttctgtatcttcaggaactggctgaagagctctcaacagccctgcctgcccctgtgtcctgtcctgagggccccaaggtgagcagccccaccaaaccgaagaagatccggcagccagcagcctgtccaggtggagaagaggtggatggtgctccacgggatgaagacttttttctccaggttgaggctgaagatgtggaagaaagtgagggcccaagtgagagctcatctgaacctgagcctgtagtgccccgaagcaccccacgaggatctacttcagggaaacagaaaccacactgccgaggaatggctcccaatggcttaccaaatcatatcatggctcctgtttggaagtgcctccatctcaccaaggacttccgagagcagaaacattcatactgggagtttgctgagtggattcctttagcctggaagtggcacttgttatctgagcttgaggccgctccctacctgccccaggaggagaagtctccattgttttctgtacaacgtgaagggctacctgaagatggcaccctctaccgaataaacagatttagctcgatcacagcacatccagagcgctgggatgtgtccttcttcacggggggaccgctctgggctctggactggtgcccagtgccagagggggcaggagcctcgcaatatgtggctcttttctccagccctgacatgaatgagacacacccactgagccagcttcattcgggtcctgggctgctccagctctggggccttgggaccttgcagcaagaaagctgtcctggcaacagggcccactttgtctatgggattgcttgtgacaacggctgcatctgggacctcaagttctgccccagtggagcatgggaacttccaggcacccctcggaaggctcctctcctgccccggttgggtctcttggctctggcctgctcagacgggaaagtactgctattcagtctaccccatccggaggccctgctggctcagcaacccccagatgcagtgaagcctgccatatataaggtacaatgtgtggcaactctgcaggtggggtctatgcaagctacagacccctctgagtgtggtcagtgccttagcctggcctggatgcctaccaggccccaccaacacctagctgctggatattataatggcatggtggttttctggaaccttcccactaactcacccctgcagcggatacggctctctgatggctccttaaagctctaccccttccagtgtttcctagcccatgaccaggctgtgcgtacccttcaatggtgcaaagctaacagccatttccttgtctctgcggggagtgaccggaaaatcaaattctgggaccttcgacgtccttacgaacccataaactctatcaagcgcttcttgagtacagaactggcctggctgcttccctacaatggtgtcactgtggctcaggacaactgctatgcctcttatggactctgtgggattcattatattgacgctggttaccttggtttcaaggcctacttcactgctcctcgaaaaggcaccgtttggagtctttcaggatccgactggcttgggacaatagctgcaggagatatatccggggagctcattgctgctatattaccagatatggcactgaatccaataaatgtcaagcgacctgtagagcgaagatttgtacgtatacgaacatctaacagcagctgttggatcctaacccacatgccctcccaaattctggtagagtacaaactagtgtcaggtctcccggccctgatatcccagaaaatcttagcacagagttgtatataatcttccctaccgtactgcatctgagcatatatttaaagatactacttttttccatctttaagcctttcctgcccaaaccactttcctctgcttttattctgtcttgagtattatagaacctaatttcatggtctcctttccagcctatatataaagcagatctgataccgtatcaggacagtcctgaaggtccagaccattcttctgcttcatctggggtccccaaccctcccaaggctcgaacttacactgaaactgtcaaccatcactacttgctctttcaagacacagatttgggttcattccatgatctgctccgtagagaaccaatgctgcgcatgcaggagggagaggggcattctcaactctgcctggacaggctgcagctggaggctattcataaggtacgtttcagcccaaacctggactcctatggatggctggtatctggggggcagtcagggctggttcgaatccattttgtccgtggactcgcctccccactgggccaccgtatgcagcttgaaagccgagcccacttcaatgctatgttccaaccatcctcccccactagacggcctggcttctctccaaccagccatcgccttctgcccactccctagccttggcccacaccagatccttggagtgaagtcggtcaagaacaaatggcccctatgcacagagccataggaactgggggccttccctggacagtgatcatgccaggcctggacctttaggcctgcctccccaggactccttagatcccactctttctacagacttctgtgatcacagccccctgcgggcaggggggctctccctccaccaactctcaaggctcctcagcctaagactatggctcatgagaaacactcaggcctgacctaggcttgggagtcaaactgctcatattgagcatattgttaagtgggtaaagccaagtaaaggtactgggtgtttttgtgaccacttgtgaatgggtgtatggagaactgaaaagggtatctgcatgaaggctcctgtctgactattccaggatccaatattactgccttctgaaacttcctctttagggtaaccatcatgtatgcccacgagggtgatagtaattcgtgagactgaagttgcttagagtacttctttgaccaaggaataccacagacaccctaccgatagaacagtggctcagatcttacttgctcctgcttacgaagtattcccaatcactggtcatctgaccctacttgaacactcctgaacagtcatgttttttaaaatcttcctttatatcaagtcagagagtatacttctataaatttcactcatggatgttaggaaatctagtcatcttccctgtgattgccctgttaagtatttaaccatagctatcatgtgtttcccaaatcttctctagattaaatatcttcagttacttcaaccattcttttacacgtcatgatttttgatccttcatgatactgtcacattgttgactcattagaatgtttacctacttcagttctatgtataggaggtgtttagaacccaagtactgtaatgtattgttatatctcatcttgttagagtcctcttgtgggatgctgcagactcacagtgactatgatactgcctcctaagcaaggacacaccccagtgatgagaaataggcaaaccatggtc

SEQ ID NO: 25275 - DNA, 5067 bp, Homo sapiens
atggaataatggccaaactcagtgacttacacctgtgatcgcagcactatgggaggctgaggcaagaggatcacttcaggtcaggtgttcaagaccagcctggtcaacataacgagaccccatctctagaaaaaattaaaaaattaggccgggcacggtggctcatgcctgtaatcccagcactttgggaggctgaggcaggcgtatcacaaggtcaggagttcgagaccagcctggccaacatagtgaaaccccttctctactaaaaagacaaaaattatccgggcttgctggcgggcgcctgtaatctcagctactcgggaggctgaggcaggacaattgcttgaacccgggaggcggagtttgcagtgagccgagatcgcgccactgcactccagcctggggacagagcaagactccatctcaggaaaaaataaaaataaaaataaaaacggggtctcactatgttgcccaggctggtatcgaattcctgggctcaagtgatcctcccccgccttggcctcccaaagtgctgggatcacagacaggagccaccatacccagccaaagtcatgcttttctactcctactccttcccttccttgtcctctttccaagctctctcgggcccatccctgacttcactactggcagaatcctccagcggccggcggcgaggacttctttgtctcccagactccgccttgggctcggacgccgccagggttgcaggtacagactctctggtctagctggctcttccggccacaggcgcggcagtccggccggaaaggccggattcagggatccagagcgcgagcccggcctgggagtccgcctactcccggctcccgtcgaggccgcgtgggatcccgttggccgcgcaggcgtcgatctcccctttttgacactgcaactcccatgaggccctgcagcgtccctggcgccgctgaagacgccctggaactcggctggcttcggagggctcggtgactctggccgcgctgcattatggaatacagagtctaagagaaaactagcccggcaccgactccggaccaagcacacgtgtttaccttgtgcactggggtgggggcgtcagtgaagagcagctaacaagatttcgtcataagaccgcgaccagacaggcggcgccatcttcgaacttagacttccggaaggactttggcgaggggcagccattttggggggtgctgatggatacctgcggggtcggctatgttgccctgggggaggccggccccgtggggaacatgactgtggtagactctcctggacaagaggtgctaaatcagcttgatgtcaagacctcttcagaaatgaccagtgcagaggcttccgtagagatgtcattacctacccctttgcctggatttgaggattctcctgatcagaggaggctccctccagagcaggaaagcctctccagactggaacagccagatctttcttcagagatgtcaaaggtctcaaagcctagggcctcaaagcctggccggaagagaggtggtaggacacgaaaaggccccaaaaggccccaacagcctaatcctccatcagccccactggttcctggtctcttagatcaatccaaccctctgtccacccccatgcctaagaaacgaggtcgaaagtccaaggcagagctgctgctgctgaagttgtcaaaagacctagatcggccagaatctcaatctccaaagaggccccctgaggactttgagaccccttctggggaacgaccccgccgaagggctgcccaagtggcacttctgtatcttcaggaactggctgaagagctctcaacagccctgcctgcccctgtgtcctgtcctgagggccccaaggtgagcagccccaccaaaccgaagaagatccggcagccagcagcctgtccaggtggagaagaggtggatggtgctccacgggatgaagacttttttctccaggttgaggctgaagatgtggaagaaagtgagggcccaagtgagagctcatctgaacctgagcctgtagtgccccgaagcaccccacgaggatctacttcagggaaacagaaaccacactgccgaggaatggctcccaatggcttaccaaatcatatcatggctcctgtttggaagtgcctccatctcaccaaggacttccgagagcagaaacattcatactgggagtttgctgagtggattcctttagcctggaagtggcacttgttatctgagcttgaggccgctccctacctgccccaggaggagaagtctccattgttttctgtacaacgtgaagggctacctgaagatggcaccctctaccgaataaacagatttagctcgatcacagcacatccagagcgctgggatgtgtccttcttcacggggggaccgctctgggctctggactggtgcccagtgccagagggggcaggagcctcgcaatatgtggctcttttctccagccctgacatgaatgagacacacccactgagccagcttcattcgggtcctgggctgctccagctctggggccttgggaccttgcagcaagaaagctgtcctggcaacagggcccactttgtctatgggattgcttgtgacaacggctgcatctgggacctcaagttctgccccagtggagcatgggaacttccaggcacccctcggaaggctcctctcctgccccggttgggtctcttggctctggcctgctcagacgggaaagtactgctattcagtctaccccatccggaggccctgctggctcagcaacccccagatgcagtgaagcctgccatatataaggtacaatgtgtggcaactctgcaggtggggtctatgcaagctacagacccctctgagtgtggtcagtgccttagcctggcctggatgcctaccaggccccaccaacacctagctgctggatattataatggcatggtggttttctggaaccttcccactaactcacccctgcagcggatacggctctctgatggctccttaaagctctaccccttccagtgtttcctagcccatgaccaggctgtgcgtacccttcaatggtgcaaagctaacagccatttccttgtctctgcggggagtgaccggaaaatcaaattctgggaccttcgacgtccttacgaacccataaactctatcaagcgcttcttgagtacagaactggcctggctgcttccctacaatggtgtcactgtggctcaggacaactgctatgcctcttatggactctgtgggattcattatattgacgctggttaccttggtttcaaggcctacttcactgctcctcgaaaaggcaccgtttggcggtgccttttcgaggagcagtgaagtaggccttgaaacggcaccgtttggagtctttcaggatccgactggcttgggacaatagctgcaggagatatatccggggagctcattgctgctatattaccagatatggcactgaatccaataaatgtcaagcgacctgtagagcgaagatttcctatatataaagcagatctgataccgtatcaggacagtcctgaaggtccagaccattcttctgcttcatctggggtccccaaccctcccaaggctcgaacttacactgaaactgtcaaccatcactacttgctctttcaagacacagatttgggttcattccatgatctgctccgtagagaaccaatgctgcgcatgcaggagggagaggggcattctcaactctgcctggacaggctgcagctggaggctattcataaggtacgtttcagcccaaacctggactcctatggatggctggtatctggggggcagtcagggctggttcgaatccattttgtccgtggactcgcctccccactgggccaccgtatgcagcttgaaagccgagcccacttcaatgctatgttccaaccatcctcccccactagacggcctggcttctctccaaccagccatcgccttctgcccactccctagccttggcccacaccagatccttggagtgaagtcggtcaagaacaaatggcccctatgcacagagccataggaactgggggccttccctggacagtgatcatgccaggcctggacctttaggcctgcctccccaggactccttagatcccactctttctacagacttctgtgatcacagccccctgcgggcaggggggctctccctccaccaactctcaaggctcctcagcctaagactatggctcatgagaaacactcaggcctgacctaggcttgggagtcaaactgctcatattgagcatattgttaagtgggtaaagccaagtaaaggtactgggtgtttttgtgaccacttgtgaatgggtgtatggagaactgaaaagggtatctgcatgaaggctcctgtctgactattccaggatccaatattactgccttctgaaacttcctctttagggtaaccatcatgtatgcccacgagggtgatagtaattcgtgagactgaagttgcttagagtacttctttgaccaaggaataccacagacaccctaccgatagaacagtggctcagatcttacttgctcctgcttacgaagtattcccaatcactggtcatctgaccctacttgaacactcctgaacagtcatgttttttaaaatcttcctttatatcaagtcagagagtatacttctataaatttcactcatggatgttaggaaatctagtcatcttccctgtgattgccctgttaagtatttaaccatagctatcatgtgtttcccaaatcttctctagattaaatatcttcagttacttcaaccattcttttacacgtcatgatttttgatccttcatgatactgtcacattgttgactcattagaatgtttacctacttcagttctatgtataggaggtgtttagaacccaagtactgtaatgtattgttatatctcatcttgttagagtcctcttgtgggatgctgcagactcacagtgactatgatactgcctcctaagcaaggacacaccccagtgatgagaaataggcaaaccatggtc

SEQ ID NO: 25276 - DNA, 4302 bp, Homo sapiens
atggaataatggccaaactcagtgacttacacctgtgatcgcagcactatgggaggctgaggcaagaggatcacttcaggtcaggtgttcaagaccagcctggtcaacataacgagaccccatctctagaaaaaattaaaaaattaggccgggcacggtggctcatgcctgtaatcccagcactttgggaggctgaggcaggcgtatcacaaggtcaggagttcgagaccagcctggccaacatagtgaaaccccttctctactaaaaagacaaaaattatccgggcttgctggcgggcgcctgtaatctcagctactcgggaggctgaggcaggacaattgcttgaacccgggaggcggagtttgcagtgagccgagatcgcgccactgcactccagcctggggacagagcaagactccatctcaggaaaaaataaaaataaaaataaaaacggggtctcactatgttgcccaggctggtatcgaattcctgggctcaagtgatcctcccccgccttggcctcccaaagtgctgggatcacagacaggagccaccatacccagccaaagtcatgcttttctactcctactccttcccttccttgtcctctttccaagctctctcgggcccatccctgacttcactactggcagaatcctccagcggccggcggcgaggacttctttgtctcccagactccgccttgggctcggacgccgccagggttgcaggtacagactctctggtctagctggctcttccggccacaggcgcggcagtccggccggaaaggccggattcagggatccagagcgcgagcccggcctgggagtccgcctactcccggctcccgtcgaggccgcgtgggatcccgttggccgcgcaggcgtcgatctcccctttttgacactgcaactcccatgaggccctgcagcgtccctggcgccgctgaagacgccctggaactcggctggcttcggagggctcggtgactctggccgcgctgcattatggaatacagagtctaagagaaaactagcccggcaccgactccggaccaagcacacgtgtttaccttgtgcactggggtgggggcgtcagtgaagagcagctaacaagatttcgtcataagaccgcgaccagacaggcggcgccatcttcgaacttagacttccggaaggactttggcgaggggcagccattttggggggtgctgatggatacctgcggggtcggctatgttgccctgggggaggccggccccgtggggaacatgactgtggtagactctcctggacaagaggtgctaaatcagcttgatgtcaagacctcttcagaaatgaccagtgcagaggcttccgtagagatgtcattacctacccctttgcctggatttgaggattctcctgatcagaggaggctccctccagagcaggaaagcctctccagactggaacagccagatctttcttcagagatgtcaaaggtctcaaagcctagggcctcaaagcctggccggaagagaggtggtaggacacgaaaaggccccaaaaggccccaacagcctaatcctccatcagccccactggttcctggtctcttagatcaatccaaccctctgtccacccccatgcctaagaaacgaggtcgaaagtccaaggcagagctgctgctgctgaagttgtcaaaagacctagatcggccagaatctcaatctccaaagaggccccctgaggactttgagaccccttctggggaacgaccccgccgaagggctgcccaagtggcacttctgtatcttcaggaactggctgaagagctctcaacagccctgcctgcccctgtgtcctgtcctgagggccccaaggtgagcagccccaccaaaccgaagaagatccggcagccagcagcctgtccaggtggagaagaggtggatggtgctccacgggatgaagacttttttctccaggttgaggctgaagatgtggaagaaagtgagggcccaagtgagagctcatctgaacctgagcctgtagtgccccgaagcaccccacgaggatctacttcagggaaacagaaaccacactgccgaggaatggctcccaatggcttaccaaatcatatcatggctcctgtttggaagtgcctccatctcaccaaggacttccgagagcagaaacattcatactgggagtttgctgagtggattcctttagcctggaagtggcacttgttatctgagcttgaggccgctccctacctgccccaggaggagaagtctccattgttttctgtacaacgtgaagggctacctgaagatggcaccctctaccgaataaacagatttagctcgatcacagcacatccagagcgctgggatgtgtccttcttcacggggggaccgctctgggctctggactggtgcccagtgccagagggggcaggagcctcgcaatatgtggctcttttctccagccctgacatgaatgagacacacccactgagccagcttcattcgggtcctgggctgctccagctctggggccttgggaccttgcagcaagaaagctgtcctggcaacagggcccactttgtctatgggattgcttgtgacaacggctgcatctgggacctcaagttctgccccagtggagcatgggaacttccaggcacccctcggaaggctcctctcctgccccggttgggtctcttggctctggcctgctcagacgggaaagtactgctattcagtctaccccatccggaggccctgctggctcagcaacccccagatgcagtgaagcctgccatatataaggtacaatgtgtggcaactctgcaggtggggtctatgcaagctacagacccctctgagtgtggtcagtgccttagcctggcctggatgcctaccaggccccaccaacacctagctgctggatattataatggcatggtggttttctggaaccttcccactaactcacccctgcagcggatacggctctctgatggctccttaaagctctaccccttccagtgtttcctagcccatgaccaggctgtgcgtacccttcaatggtgcaaagctaacagccatttccttgtctctgcggggagtgaccggaaaatcaaattctgggaccttcgacgtccttacgaacccataaactctatcaagcgcttcttgagtacagaactggcctggctgcttccctacaatggtgtcactgtggctcaggacaactgctatgcctcttatggactctgtgggattcattatattgacgctggttaccttggtttcaaggcctacttcactgctcctcgaaaaggcaccgtttggagtctttcaggatccgactggcttgggacaatagctgcaggagatatatccggggagctcattgctgctatattaccagatatggcactgaatccaataaatgtcaagcgacctgtagagcgaagatttcctatatataaagcagatctgataccgtatcaggacagtcctgaaggtccagaccattcttctgcttcatctggggtccccaaccctcccaaggctcgaacttacactgaaactgtcaaccatcactacttgctctttcaagacacagatttgggttcattccatgatctgctccgtagagaaccaatgctgcgcatgcaggagggagaggggcattctcaactctgcctggacaggctgcagctggaggctattcataaggtacgtttcagcccaaacctggactcctatggatggctggtatctggggggcagtcagggctggttcgaatccattttgtccgtggactcgcctccccactgggccaccgtatgcagcttgaaagccgagcccacttcaatgctatgttccaaccatcctcccccactagacggcctggcttctctccaaccagccatcgccttctgcccactccctagccttggcccacaccagatccttggagtgaagtcggtcaagaacaaatggcccctatgcacagagccataggaactgggggccttccctggacagtgatcatgccaggcctggacctttaggcctgcctccccaggactccttagatcccactctttctacagacttctgtgatcacagccccctgcgggcaggggggctctccctccaccaactctcaaggctcctcagcctaagactatggctcatgagaaacactcaggcctgacctaggcttgggagtcaaactgctcatattgagcatattgttaagtgggtaaagccaagtaaaggtactgggtgtttttgtga

SEQ ID NO: 25277 - DNA, 4341 bp, Homo sapiens
atggaataatggccaaactcagtgacttacacctgtgatcgcagcactatgggaggctgaggcaagaggatcacttcaggtcaggtgttcaagaccagcctggtcaacataacgagaccccatctctagaaaaaattaaaaaattaggccgggcacggtggctcatgcctgtaatcccagcactttgggaggctgaggcaggcgtatcacaaggtcaggagttcgagaccagcctggccaacatagtgaaaccccttctctactaaaaagacaaaaattatccgggcttgctggcgggcgcctgtaatctcagctactcgggaggctgaggcaggacaattgcttgaacccgggaggcggagtttgcagtgagccgagatcgcgccactgcactccagcctggggacagagcaagactccatctcaggaaaaaataaaaataaaaataaaaacggggtctcactatgttgcccaggctggtatcgaattcctgggctcaagtgatcctcccccgccttggcctcccaaagtgctgggatcacagacaggagccaccatacccagccaaagtcatgcttttctactcctactccttcccttccttgtcctctttccaagctctctcgggcccatccctgacttcactactggcagaatcctccagcggccggcggcgaggacttctttgtctcccagactccgccttgggctcggacgccgccagggttgcaggtacagactctctggtctagctggctcttccggccacaggcgcggcagtccggccggaaaggccggattcagggatccagagcgcgagcccggcctgggagtccgcctactcccggctcccgtcgaggccgcgtgggatcccgttggccgcgcaggcgtcgatctcccctttttgacactgcaactcccatgaggccctgcagcgtccctggcgccgctgaagacgccctggaactcggctggcttcggagggctcggtgactctggccgcgctgcattatggaatacagagtctaagagaaaactagcccggcaccgactccggaccaagcacacgtgtttaccttgtgcactggggtgggggcgtcagtgaagagcagctaacaagatttcgtcataagaccgcgaccagacaggcggcgccatcttcgaacttagacttccggaaggactttggcgaggggcagccattttggggggtgctgatggatacctgcggggtcggctatgttgccctgggggaggccggccccgtggggaacatgactgtggtagactctcctggacaagaggtgctaaatcagcttgatgtcaagacctcttcagaaatgaccagtgcagaggcttccgtagagatgtcattacctacccctttgcctggatttgaggattctcctgatcagaggaggctccctccagagcaggaaagcctctccagactggaacagccagatctttcttcagagatgtcaaaggtctcaaagcctagggcctcaaagcctggccggaagagaggtggtaggacacgaaaaggccccaaaaggccccaacagcctaatcctccatcagccccactggttcctggtctcttagatcaatccaaccctctgtccacccccatgcctaagaaacgaggtcgaaagtccaaggcagagctgctgctgctgaagttgtcaaaagacctagatcggccagaatctcaatctccaaagaggccccctgaggactttgagaccccttctggggaacgaccccgccgaagggctgcccaagtggcacttctgtatcttcaggaactggctgaagagctctcaacagccctgcctgcccctgtgtcctgtcctgagggccccaaggtgagcagccccaccaaaccgaagaagatccggcagccagcagcctgtccaggtggagaagaggtggatggtgctccacgggatgaagacttttttctccaggttgaggctgaagatgtggaagaaagtgagggcccaagtgagagctcatctgaacctgagcctgtagtgccccgaagcaccccacgaggatctacttcagggaaacagaaaccacactgccgaggaatggctcccaatggcttaccaaatcatatcatggctcctgtttggaagtgcctccatctcaccaaggacttccgagagcagaaacattcatactgggagtttgctgagtggattcctttagcctggaagtggcacttgttatctgagcttgaggccgctccctacctgccccaggaggagaagtctccattgttttctgtacaacgtgaagggctacctgaagatggcaccctctaccgaataaacagatttagctcgatcacagcacatccagagcgctgggatgtgtccttcttcacggggggaccgctctgggctctggactggtgcccagtgccagagggggcaggagcctcgcaatatgtggctcttttctccagccctgacatgaatgagacacacccactgagccagcttcattcgggtcctgggctgctccagctctggggccttgggaccttgcagcaagaaagctgtcctggcaacagggcccactttgtctatgggattgcttgtgacaacggctgcatctgggacctcaagttctgccccagtggagcatgggaacttccaggcacccctcggaaggctcctctcctgccccggttgggtctcttggctctggcctgctcagacgggaaagtactgctattcagtctaccccatccggaggccctgctggctcagcaacccccagatgcagtgaagcctgccatatataaggtacaatgtgtggcaactctgcaggtggggtctatgcaagctacagacccctctgagtgtggtcagtgccttagcctggcctggatgcctaccaggccccaccaacacctagctgctggatattataatggcatggtggttttctggaaccttcccactaactcacccctgcagcggatacggctctctgatggctccttaaagctctaccccttccagtgtttcctagcccatgaccaggctgtgcgtacccttcaatggtgcaaagctaacagccatttccttgtctctgcggggagtgaccggaaaatcaaattctgggaccttcgacgtccttacgaacccataaactctatcaagcgcttcttgagtacagaactggcctggctgcttccctacaatggtgtcactgtggctcaggacaactgctatgcctcttatggactctgtgggattcattatattgacgctggttaccttggtttcaaggcctacttcactgctcctcgaaaaggcaccgtttggagtctttcaggatccgactggcttgggacaatagctgcaggagatatatccggggagctcattgctgctatattaccagatatggcactgaatccaataaatgtcaagcgacctgtagagcgaagatttcctatatataaagcagatctgataccgtatcaggacagtcctgaaggtccagaccattcttctgcttcatctggggtccccaaccctcccaaggctcgaacttacactgaaactgtcaaccatcactacttgctctttcaagacacagatttgggttcattccatgatctgctccgtagagaaccaatgctgcgcatgcaggagggagaggggcattctcaactctgcctggacaggctgcagctggaggctattcataagggtaaccatcatgtatgcccacgagggtgatagtaattcgtgagactgaagttgcttagagtacttctttgaccaaggaataccacagacaccctaccgatagaacagtggctcagatcttacttgctcctgcttacgaagtattcccaatcactggtcatctgaccctacttgaacactcctgaacagtcatgttttttaaaatcttcctttatatcaagtcagagagtatacttctataaatttcactcatggatgttaggaaatctagtcatcttccctgtgattgccctgttaagtatttaaccatagctatcatgtgtttcccaaatcttctctagattaaatatcttcagttacttcaaccattcttttacacgtcatgatttttgatccttcatgatactgtcacattgttgactcattagaatgtttacctacttcagttctatgtataggaggtgtttagaacccaagtactgtaatgtattgttatatctcatcttgttagagtcctcttgtgggatgctgcagactcacagtgactatgatactgcctcctaagcaaggacacaccccagtgatgagaaataggcaaaccatggtc

SEQ ID NO: 25278 - DNA, 3364 bp, Homo sapiens
atggaataatggccaaactcagtgacttacacctgtgatcgcagcactatgggaggctgaggcaagaggatcacttcaggtcaggtgttcaagaccagcctggtcaacataacgagaccccatctctagaaaaaattaaaaaattaggccgggcacggtggctcatgcctgtaatcccagcactttgggaggctgaggcaggcgtatcacaaggtcaggagttcgagaccagcctggccaacatagtgaaaccccttctctactaaaaagacaaaaattatccgggcttgctggcgggcgcctgtaatctcagctactcgggaggctgaggcaggacaattgcttgaacccgggaggcggagtttgcagtgagccgagatcgcgccactgcactccagcctggggacagagcaagactccatctcaggaaaaaataaaaataaaaataaaaacggggtctcactatgttgcccaggctggtatcgaattcctgggctcaagtgatcctcccccgccttggcctcccaaagtgctgggatcacagacaggagccaccatacccagccaaagtcatgcttttctactcctactccttcccttccttgtcctctttccaagctctctcgggcccatccctgacttcactactggcagaatcctccagcggccggcggcgaggacttctttgtctcccagactccgccttgggctcggacgccgccagggttgcaggtacagactctctggtctagctggctcttccggccacaggcgcggcagtccggccggaaaggccggattcagggatccagagcgcgagcccggcctgggagtccgcctactcccggctcccgtcgaggccgcgtgggatcccgttggccgcgcaggcgtcgatctcccctttttgacactgcaactcccatgaggccctgcagcgtccctggcgccgctgaagacgccctggaactcggctggcttcggagggctcggtgactctggccgcgctgcattatggaatacagagtctaagagaaaactagcccggcaccgactccggaccaagcacacgtgtttaccttgtgcactggggtgggggcgtcagtgaagagcagctaacaagatttcgtcataagaccgcgaccagacaggcggcgccatcttcgaacttagacttccggaaggactttggcgaggggcagccattttggggggtgctgatggatacctgcggggtcggctatgttgccctgggggaggccggccccgtggggaacatgactgtggtagactctcctggacaagaggtgctaaatcagcttgatgtcaagacctcttcagaaatgaccagtgcagaggcttccgtagagatgtcattacctacccctttgcctggatttgaggattctcctgatcagaggaggctccctccagagcaggaaagcctctccagactggaacagccagatctttcttcagagatgtcaaaggtctcaaagcctagggcctcaaagcctggccggaagagaggtggtaggacacgaaaaggccccaaaaggccccaacagcctaatcctccatcagccccactggttcctggtctcttagatcaatccaaccctctgtccacccccatgcctaagaaacgaggtcgaaagtccaaggcagagctgctgctgctgaagttgtcaaaagacctagatcggccagaatctcaatctccaaagaggccccctgaggactttgagaccccttctggggaacgaccccgccgaagggctgcccaagtggcacttctgtatcttcaggaactggctgaagagctctcaacagccctgcctgcccctgtgtcctgtcctgagggccccaaggtgagcagccccaccaaaccgaagaagatccggcagccagcagcctgtccaggtggagaagaggtggatggtgctccacgggatgaagacttttttctccaggttgaggctgaagatgtggaagaaagtgagggcccaagtgagagctcatctgaacctgagcctgtagtgccccgaagcaccccacgaggatctacttcagggaaacagaaaccacactgccgaggaatggctcccaatggcttaccaaatcatatcatggctcctgtttggaagtgcctccatctcaccaaggacttccgagagcagaaacattcatactgggagtttgctgagtggattcctttagcctggaagtggcacttgttatctgagcttgaggccgctccctacctgccccaggaggagaagtctccattgttttctgtacaacgtgaagggctacctgaagatggcaccctctaccgaataaacagatttagctcgatcacagcacatccagagcgctgggatgtgtccttcttcacggggggaccgctctgggctctggactggtgcccagtgccagagggggcaggagcctcgcaatatgtggctcttttctccagccctgacatgaatgagacacacccactgagccagcttcattcgggtcctgggctgctccagctctggggccttgggaccttgcagcaagaaagctgtcctggcaacagggcccactttgtctatgggattgcttgtgacaacggctgcatctgggacctcaagttctgccccagtggagcatgggaacttccaggcacccctcggaaggctcctctcctgccccggttgggtctcttggctctggcctgctcagacgggaaagtactgctattcagtctaccccatccggaggccctgctggctcagcaacccccagatgcagtgaagcctgccatatataaggtacaatgtgtggcaactctgcaggtggggtctatgcaagctacagacccctctgagtgtggtcagtgccttagcctggcctggatgcctaccaggccccaccaacacctagctgctggatattataatggcatggtggttttctggaaccttcccactaactcacccctgcagcggatacggctctctgatggctccttaaagctctaccccttccagtgtttcctagcccatgaccaggctgtgcgtacccttcaatggtgcaaagctaacagccatttccttgtctctgcggggagtgaccggcgcttcttgagtacagaactggcctggctgcttccctacaatggtgtcactgtggctcaggacaactgctatgcctcttatggactctgtgggattcattatattgacgctggttaccttggtttcaaggcctacttcactgctcctcgaaaaggcaccgtttggggcaccggttggagtttttcagatccgctggcttggacaatgcttgcagtaatatacgcgaactattgtgtttc

SEQ ID NO: 25279 - DNA, 1641 bp, Homo sapiens
atggaataatggccaaactcagtgacttacacctgtgatcgcagcactatgggaggctgaggcaagaggatcacttcaggtcaggtgttcaagaccagcctggtcaacataacgagaccccatctctagaaaaaattaaaaaattaggccgggcacggtggctcatgcctgtaatcccagcactttgggaggctgaggcaggcgtatcacaaggtcaggagttcgagaccagcctggccaacatagtgaaaccccttctctactaaaaagacaaaaattatccgggcttgctggcgggcgcctgtaatctcagctactcgggaggctgaggcaggacaattgcttgaacccgggaggcggagtttgcagtgagccgagatcgcgccactgcactccagcctggggacagagcaagactccatctcaggaaaaaataaaaataaaaataaaaacggggtctcactatgttgcccaggctggtatcgaattcctgggctcaagtgatcctcccccgccttggcctcccaaagtgctgggatcacagacaggagccaccatacccagccaaagtcatgcttttctactcctactccttcccttccttgtcctctttccaagctctctcgggcccatccctgacttcactactggcagaatcctccagcggccggcggcgaggacttctttgtctcccagactccgccttgggctcggacgccgccagggttgcaggtacagactctctggtctagctggctcttccggccacaggcgcggcagtccggccggaaaggccggattcagggatccagagcgcgagcccggcctgggagtccgcctactcccggctcccgtcgaggccgcgtgggatcccgttggccgcgcaggcgtcgatctcccctttttgacactgcaactcccatgaggccctgcagcgtccctggcgccgctgaagacgccctggaactcggctggcttcggagggctcggtgactctggccgcgctgcattatggaatacagagtctaagagaaaactagcccggcaccgactccggaccaagcacacgtgtttaccttgtgcactggggtgggggcgtcagtgaagagcagctaacaagatttcgtcataagaccgcgaccagacaggcggcgccatcttcgaacttagacttccggaaggactttggcgagggtgagtgtatcgccgcagcgggtgtgtggggggccccacaattactcctcccccttcttttgccatagcactaagatattgggaacaaactcctggctccgctcttctcccagccacagcagcgcgcctttcagcgtctgcgctcctacagagcaccatcatgctccgcaccttccctactgtggccaccgtgcaccccccatctctgcaagcctcgggtcttgccctcctcccccacgcggtgtcggtaacgcggaagcctgtgtccgggcgtaggcgctgcatacgtagcgtccctcgaactcggcgaacctacagtagtccttgttagaaaaccagggctcctctcccgcacaggctaggggagaaatctaccttcacgcccaggactgaagaagggcaggtgatggcccctagagtggttgtgggtcaatctctttcagctgt

SEQ ID NO: 25280 - DNA, 166 bp, Homo sapiens
actgtggctcaggacaactgctatgcctcgtacggcaagatggagataggacctctagggacaggccctaagggttggaatgcaaagcatgccagattgttgtggggagaggagggtagagagttggttcactgaggtggtttaaattctggaagaggttaagaag

SEQ ID NO: 25281 - DNA, 3083 bp, Homo sapiens
atggaataatggccaaactcagtgacttacacctgtgatcgcagcactatgggaggctgaggcaagaggatcacttcaggtcaggtgttcaagaccagcctggtcaacataacgagaccccatctctagaaaaaattaaaaaattaggccgggcacggtggctcatgcctgtaatcccagcactttgggaggctgaggcaggcgtatcacaaggtcaggagttcgagaccagcctggccaacatagtgaaaccccttctctactaaaaagacaaaaattatccgggcttgctggcgggcgcctgtaatctcagctactcgggaggctgaggcaggacaattgcttgaacccgggaggcggagtttgcagtgagccgagatcgcgccactgcactccagcctggggacagagcaagactccatctcaggaaaaaataaaaataaaaataaaaacggggtctcactatgttgcccaggctggtatcgaattcctgggctcaagtgatcctcccccgccttggcctcccaaagtgctgggatcacagacaggagccaccatacccagccaaagtcatgcttttctactcctactccttcccttccttgtcctctttccaagctctctcgggcccatccctgacttcactactggcagaatcctccagcggccggcggcgaggacttctttgtctcccagactccgccttgggctcggacgccgccagggttgcaggtacagactctctggtctagctggctcttccggccacaggcgcggcagtccggccggaaaggccggattcagggatccagagcgcgagcccggcctgggagtccgcctactcccggctcccgtcgaggccgcgtgggatcccgttggccgcgcaggcgtcgatctcccctttttgacactgcaactcccatgaggccctgcagcgtccctggcgccgctgaagacgccctggaactcggctggcttcggagggctcggtgactctggccgcgctgcattatggaatacagagtctaagagaaaactagcccggcaccgactccggaccaagcacacgtgtttaccttgtgcactggggtgggggcgtcagtgaagagcagctaacaagatttcgtcataagaccgcgaccagacaggcggcgccatcttcgaacttagacttccggaaggactttggcgaggttcagcttgagtgtgcgtcagaatcccctgaagagcttgttaaaacacaaggtgctggccccatccagaattgctgattcggggcagccattttggggggtgctgatggatacctgcggggtcggctatgttgccctgggggaggccggccccgtggggaacatgactgtggtagactctcctggacaagaggtgctaaatcagcttgatgtcaagacctcttcagaaatgaccagtgcagaggcttccgtagagatgtcattacctacccctttgcctggatttgaggattctcctgatcagaggaggctccctccagagcaggaaagcctctccagactggaacagccagatctttcttcagagatgtcaaaggtctcaaagcctagggcctcaaagcctggccggaagagaggtggtaggacacgaaaaggccccaaaaggccccaacagcctaatcctccatcagccccactggttcctggtctcttagatcaatccaaccctctgtccacccccatgcctaagaaacgaggtcgaaagtccaaggcagagctgctgctgctgaagttgtcaaaagacctagatcggccagaatctcaatctccaaagaggccccctgaggactttgagaccccttctggggaacgaccccgccgaagggctgcccaagtggcacttctgtatcttcaggaactggctgaagagctctcaacagccctgcctgcccctgtgtcctgtcctgagggccccaaggtgagcagccccaccaaaccgaagaagatccggcagccagcagcctgtccaggtggagaagaggtggatggtgctccacgggatgaagacttttttctccaggttgaggctgaagatgtggaagaaagtgagggcccaagtgagagctcatctgaacctgagcctgtagtgccccgaagcaccccacgaggatctacttcagggaaacagaaaccacactgccgaggaatggctcccaatggcttaccaaatcatatcatggctcctgtttggaagtgcctccatctcaccaaggacttccgagagcagaaacattcatactgggagtttgctgagtggattcctttagcctggaagtggcacttgttatctgagcttgaggccgctccctacctgccccaggaggagaagtctccattgttttctgtacaacgtgaagggctacctgaagatggcaccctctaccgaataaacagatttagctcgatcacagcacatccagagcgctgggatgtgtccttcttcacggggggaccgctctgggctctggactggtgcccagtgccagagggggcaggagcctcgcaatatgtggctcttttctccagccctgacatgaatgagacacacccactgagccagcttcattcgggtcctgggctgctccagctctggggccttgggaccttgcagcaagaaagctgtcctggcaacagggcccactttgtctatgggattgcttgtgacaacggctgcatctgggacctcaagttctgccccagtggagcatgggaacttccaggcacccctcggaaggctcctctcctgccccggttgggtctcttggctctggcctgctcagacgggaaagtactgctattcagtctaccccatccggaggccctgctggctcagcaacccccagatgcagtgaagcctgccatatataaggtacaatgtgtggcaactctgcaggtggggtctatgcaagctacagacccctctgagtgtggtcagtgccttagcctggcctggatgcctaccaggccccaccaacacctagctgctggatattataatggtaaaaaaaccaaaataaaacataaggaactattgctctttaaattttttat

SEQ ID NO: 25282 - DNA, 5336 bp, Homo sapiens
atggaataatggccaaactcagtgacttacacctgtgatcgcagcactatgggaggctgaggcaagaggatcacttcaggtcaggtgttcaagaccagcctggtcaacataacgagaccccatctctagaaaaaattaaaaaattaggccgggcacggtggctcatgcctgtaatcccagcactttgggaggctgaggcaggcgtatcacaaggtcaggagttcgagaccagcctggccaacatagtgaaaccccttctctactaaaaagacaaaaattatccgggcttgctggcgggcgcctgtaatctcagctactcgggaggctgaggcaggacaattgcttgaacccgggaggcggagtttgcagtgagccgagatcgcgccactgcactccagcctggggacagagcaagactccatctcaggaaaaaataaaaataaaaataaaaacggggtctcactatgttgcccaggctggtatcgaattcctgggctcaagtgatcctcccccgccttggcctcccaaagtgctgggatcacagacaggagccaccatacccagccaaagtcatgcttttctactcctactccttcccttccttgtcctctttccaagctctctcgggcccatccctgacttcactactggcagaatcctccagcggccggcggcgaggacttctttgtctcccagactccgccttgggctcggacgccgccagggttgcaggtacagactctctggtctagctggctcttccggccacaggcgcggcagtccggccggaaaggccggattcagggatccagagcgcgagcccggcctgggagtccgcctactcccggctcccgtcgaggccgcgtgggatcccgttggccgcgcaggcgtcgatctcccctttttgacactgcaactcccatgaggccctgcagcgtccctggcgccgctgaagacgccctggaactcggctggcttcggagggctcggtgactctggccgcgctgcattatggaatacagagtctaagagaaaactagcccggcaccgactccggaccaagcacacgtgtttaccttgtgcactggggtgggggcgtcagtgaagagcagctaacaagatttcgtcataagaccgcgaccagacaggcggcgccatcttcgaacttagacttccggaaggactttggcgaggagacaaagtcttgctgtgttgcccaggctgatcttgaactcctggcctcaagcgatcctcccaccttggcctcccaaagtgttgagattacaggcatgagccactgcgcccagcccagcacatgattcttgagccagcagctgtaaataagagcaccttcccagtttgataagcacttgttcctaccaactgtttttccctcaaccctcatcgtgatcatttatttatgcaagtgtttttcagcttgagtgtgcgtcagaatcccctgaagagcttgttaaaacacaaggtgctggccccatccagaattgctgattcggggcagccattttggggggtgctgatggatacctgcggggtcggctatgttgccctgggggaggccggccccgtggggaacatgactgtggtagactctcctggacaagaggtgctaaatcagcttgatgtcaagacctcttcagaaatgaccagtgcagaggcttccgtagagatgtcattacctacccctttgcctggatttgaggattctcctgatcagaggaggctccctccagagcaggaaagcctctccagactggaacagccagatctttcttcagagatgtcaaaggtctcaaagcctagggcctcaaagcctggccggaagagaggtggtaggacacgaaaaggccccaaaaggccccaacagcctaatcctccatcagccccactggttcctggtctcttagatcaatccaaccctctgtccacccccatgcctaagaaacgaggtcgaaagtccaaggcagagctgctgctgctgaagttgtcaaaagacctagatcggccagaatctcaatctccaaagaggccccctgaggactttgagaccccttctggggaacgaccccgccgaagggctgcccaagtggcacttctgtatcttcaggaactggctgaagagctctcaacagccctgcctgcccctgtgtcctgtcctgagggccccaaggtgagcagccccaccaaaccgaagaagatccggcagccagcagcctgtccaggtggagaagaggtggatggtgctccacgggatgaagacttttttctccaggttgaggctgaagatgtggaagaaagtgagggcccaagtgagagctcatctgaacctgagcctgtagtgccccgaagcaccccacgaggatctacttcagggaaacagaaaccacactgccgaggaatggctcccaatggcttaccaaatcatatcatggctcctgtttggaagtgcctccatctcaccaaggacttccgagagcagaaacattcatactgggagtttgctgagtggattcctttagcctggaagtggcacttgttatctgagcttgaggccgctccctacctgccccaggaggagaagtctccattgttttctgtacaacgtgaagggctacctgaagatggcaccctctaccgaataaacagatttagctcgatcacagcacatccagagcgctgggatgtgtccttcttcacggggggaccgctctgggctctggactggtgcccagtgccagagggggcaggagcctcgcaatatgtggctcttttctccagccctgacatgaatgagacacacccactgagccagcttcattcgggtcctgggctgctccagctctggggccttgggaccttgcagcaagaaagctgtcctggcaacagggcccactttgtctatgggattgcttgtgacaacggctgcatctgggacctcaagttctgccccagtggagcatgggaacttccaggcacccctcggaaggctcctctcctgccccggttgggtctcttggctctggcctgctcagacgggaaagtactgctattcagtctaccccatccggaggccctgctggctcagcaacccccagatgcagtgaagcctgccatatataaggtacaatgtgtggcaactctgcaggtggggtctatgcaagctacagacccctctgagtgtggtcagtgccttagcctggcctggatgcctaccaggccccaccaacacctagctgctggatattataatggcatggtggttttctggaaccttcccactaactcacccctgcagcggatacggctctctgatggctccttaaagctctaccccttccagtgtttcctagcccatgaccaggctgtgcgtacccttcaatggtgcaaagctaacagccatttccttgtctctgcggggagtgaccggaaaatcaaattctgggaccttcgacgtccttacgaacccataaactctatcaagcgcttcttgagtacagaactggcctggctgcttccctacaatggtgtcactgtggctcaggacaactgctatgcctcttatggactctgtgggattcattatattgacgctggttaccttggtttcaaggcctacttcactgctcctcgaaaaggcaccgtttggagtctttcaggatccgactggcttgggacaatagctgcaggagatatatccggggagctcattgctgctatattaccagatatggcactgaatccaataaatgtcaagcgacctgtagagcgaagatttcctatatataaagcagatctgataccgtatcaggacagtcctgaaggtccagaccattcttctgcttcatctggggtccccaaccctcccaaggctcgaacttacactgaaactgtcaaccatcactacttgctctttcaagacacagatttgggttcattccatgatctgctccgtagagaaccaatgctgcgcatgcaggagggagaggggcattctcaactctgcctggacaggctgcagctggaggctattcataaggtacgtttcagcccaaacctggactcctatggatggctggtatctggggggcagtcagggctggttcgaatccattttgtccgtggactcgcctccccactgggccaccgtatgcagcttgaaagccgagcccacttcaatgctatgttccaaccatcctcccccactagacggcctggcttctctccaaccagccatcgccttctgcccactccctagccttggcccacaccagatccttggagtgaagtcggtcaagaacaaatggcccctatgcacagagccataggaactgggggccttccctggacagtgatcatgccaggcctggacctttaggcctgcctccccaggactccttagatcccactctttctacagacttctgtgatcacagccccctgcgggcaggggggctctccctccaccaactctcaaggctcctcagcctaagactatggctcatgagaaacactcaggcctgacctaggcttgggagtcaaactgctcatattgagcatattgttaagtgggtaaagccaagtaaaggtactgggtgtttttgtgaccacttgtgaatgggtgtatggagaactgaaaagggtatctgcatgaaggctcctgtctgactattccaggatccaatattactgccttctgaaacttcctctttagggtaaccatcatgtatgcccacgagggtgatagtaattcgtgagactgaagttgcttagagtacttctttgaccaaggaataccacagacaccctaccgatagaacagtggctcagatcttacttgctcctgcttacgaagtattcccaatcactggtcatctgaccctacttgaacactcctgaacagtcatgttttttaaaatcttcctttatatcaagtcagagagtatacttctataaatttcactcatggatgttaggaaatctagtcatcttccctgtgattgccctgttaagtatttaaccatagctatcatgtgtttcccaaatcttctctagattaaatatcttcagttacttcaaccattcttttacacgtcatgatttttgatccttcatgatactgtcacattgttgactcattagaatgtttacctacttcagttctatgtataggaggtgtttagaacccaagtactgtaatgtattgttatatctcatcttgttagagtcctcttgtgggatgctgcagactcacagtgactatgatactgcctcctaagcaaggacacaccccagtgatgagaaataggcaaaccatggtc

SEQ ID NO: 25283 - DNA, 5016 bp, Homo sapiens
atggaataatggccaaactcagtgacttacacctgtgatcgcagcactatgggaggctgaggcaagaggatcacttcaggtcaggtgttcaagaccagcctggtcaacataacgagaccccatctctagaaaaaattaaaaaattaggccgggcacggtggctcatgcctgtaatcccagcactttgggaggctgaggcaggcgtatcacaaggtcaggagttcgagaccagcctggccaacatagtgaaaccccttctctactaaaaagacaaaaattatccgggcttgctggcgggcgcctgtaatctcagctactcgggaggctgaggcaggacaattgcttgaacccgggaggcggagtttgcagtgagccgagatcgcgccactgcactccagcctggggacagagcaagactccatctcaggaaaaaataaaaataaaaataaaaacggggtctcactatgttgcccaggctggtatcgaattcctgggctcaagtgatcctcccccgccttggcctcccaaagtgctgggatcacagacaggagccaccatacccagccaaagtcatgcttttctactcctactccttcccttccttgtcctctttccaagctctctcgggcccatccctgacttcactactggcagaatcctccagcggccggcggcgaggacttctttgtctcccagactccgccttgggctcggacgccgccagggttgcaggtacagactctctggtctagctggctcttccggccacaggcgcggcagtccggccggaaaggccggattcagggatccagagcgcgagcccggcctgggagtccgcctactcccggctcccgtcgaggccgcgtgggatcccgttggccgcgcaggcgtcgatctcccctttttgacactgcaactcccatgaggccctgcagcgtccctggcgccgctgaagacgccctggaactcggctggcttcggagggctcggtgactctggccgcgctgcattatggaatacagagtctaagagaaaactagcccggcaccgactccggaccaagcacacgtgtttaccttgtgcactggggtgggggcgtcagtgaagagcagctaacaagatttcgtcataagaccgcgaccagacaggcggcgccatcttcgaacttagacttccggaaggactttggcgaggggcagccattttggggggtgctgatggatacctgcggggtcggctatgttgccctgggggaggccggccccgtggggaacatgactgtggtagactctcctggacaagaggtgctaaatcagcttgatgtcaagacctcttcagaaatgaccagtgcagaggcttccgtagagatgtcattacctacccctttgcctggatttgaggattctcctgatcagaggaggctccctccagagcaggaaagcctctccagactggaacagccagatctttcttcagagatgtcaaaggtctcaaagcctagggcctcaaagcctggccggaagagaggtggtaggacacgaaaaggccccaaaaggccccaacagcctaatcctccatcagccccactggttcctggtctcttagatcaatccaaccctctgtccacccccatgcctaagaaacgaggtcgaaagtccaaggcagagctgctgctgctgaagttgtcaaaagacctagatcggccagaatctcaatctccaaagaggccccctgaggactttgagaccccttctggggaacgaccccgccgaagggctgcccaagtggcacttctgtatcttcaggaactggctgaagagctctcaacagccctgcctgcccctgtgtcctgtcctgagggccccaaggtgagcagccccaccaaaccgaagaagatccggcagccagcagcctgtccaggtggagaagaggtggatggtgctccacgggatgaagacttttttctccaggttgaggctgaagatgtggaagaaagtgagggcccaagtgagagctcatctgaacctgagcctgtagtgccccgaagcaccccacgaggatctacttcagggaaacagaaaccacactgccgaggaatggctcccaatggcttaccaaatcatatcatggctcctgtttggaagtgcctccatctcaccaaggacttccgagagcagaaacattcatactgggagtttgctgagtggattcctttagcctggaagtggcacttgttatctgagcttgaggccgctccctacctgccccaggaggagaagtctccattgttttctgtacaacgtgaagggctacctgaagatggcaccctctaccgaataaacagatttagctcgatcacagcacatccagagcgctgggatgtgtccttcttcacggggggaccgctctgggctctggactggtgcccagtgccagagggggcaggagcctcgcaatatgtggctcttttctccagccctgacatgaatgagacacacccactgagccagcttcattcgggtcctgggctgctccagctctggggccttgggaccttgcagcaagaaagctgtcctggcaacagggcccactttgtctatgggattgcttgtgacaacggctgcatctgggacctcaagttctgccccagtggagcatgggaacttccaggcacccctcggaaggctcctctcctgccccggttgggtctcttggctctggcctgctcagacgggaaagtactgctattcagtctaccccatccggaggccctgctggctcagcaacccccagatgcagtgaagcctgccatatataaggtacaatgtgtggcaactctgcaggtggggtctatgcaagctacagacccctctgagtgtggtcagtgccttagcctggcctggatgcctaccaggccccaccaacacctagctgctggatattataatggcatggtggttttctggaaccttcccactaactcacccctgcagcggatacggctctctgatggctccttaaagctctaccccttccagtgtttcctagcccatgaccaggctgtgcgtacccttcaatggtgcaaagctaacagccatttccttgtctctgcggggagtgaccggaaaatcaaattctgggaccttcgacgtccttacgaacccataaactctatcaagcgcttcttgagtacagaactggcctggctgcttccctacaatggtgtcactgtggctcaggacaactgctatgcctcttatggactctgtgggattcattatattgacgctggttaccttggtttcaaggcctacttcactgctcctcgaaaaggcaccgtttggagtctttcaggatccgactggcttgggacaatagctgcaggagatatatccggggagctcattgctgctatattaccagatatggcactgaatccaataaatgtcaagcgacctgtagagcgaagatttcctatatataaagcagatctgataccgtatcaggacagtcctgaaggtccagaccattcttctgcttcatctggggtccccaaccctcccaaggctcgaacttacactgaaactgtcaaccatcactacttgctctttcaagacacagatttgggttcattccatgatctgctccgtagagaaccaatgctgcgcatgcaggagggagaggggcattctcaactctgcctggacaggctgcagctggaggctattcataaggtacgtttcagcccaaacctggactcctatggatggctggtatctggggggcagtcagggctggttcgaatccattttgtccgtggactcgcctccccactgggccaccgtatgcagcttgaaagccgagcccacttcaatgctatgttccaaccatcctcccccactagacggcctggcttctctccaaccagccatcgccttctgcccactccctagccttggcccacaccagatccttggagtgaagtcggtcaagaacaaatggcccctatgcacagagccataggaactgggggccttccctggacagtgatcatgccaggcctggacctttaggcctgcctccccaggactccttagatcccactctttctacagacttctgtgatcacagccccctgcgggcaggggggctctccctccaccaactctcaaggctcctcagcctaagactatggctcatgagaaacactcaggcctgacctaggcttgggagtcaaactgctcatattgagcatattgttaagtgggtaaagccaagtaaaggtactgggtgtttttgtgaccacttgtgaatgggtgtatggagaactgaaaagggtatctgcatgaaggctcctgtctgactattccaggatccaatattactgccttctgaaacttcctctttagggtaaccatcatgtatgcccacgagggtgatagtaattcgtgagactgaagttgcttagagtacttctttgaccaaggaataccacagacaccctaccgatagaacagtggctcagatcttacttgctcctgcttacgaagtattcccaatcactggtcatctgaccctacttgaacactcctgaacagtcatgttttttaaaatcttcctttatatcaagtcagagagtatacttctataaatttcactcatggatgttaggaaatctagtcatcttccctgtgattgccctgttaagtatttaaccatagctatcatgtgtttcccaaatcttctctagattaaatatcttcagttacttcaaccattcttttacacgtcatgatttttgatccttcatgatactgtcacattgttgactcattagaatgtttacctacttcagttctatgtataggaggtgtttagaacccaagtactgtaatgtattgttatatctcatcttgttagagtcctcttgtgggatgctgcagactcacagtgactatgatactgcctcctaagcaaggacacaccccagtgatgagaaataggcaaaccatggtc

SEQ ID NO: 25284 - DNA, 2212 bp, Homo sapiens
  misc_feature (122)..(122): n is a, c, g, or t
ccagttctgtactcaagaagcgcttgatagagtttatgggttcgtaaggacgtcgaaggtcccagaatttgattttccggtcactccccgcagagacaaggaaatggctgttagctttgcancattgaagggtacgcacagcctggcatggtggttttctggaaccttcccactaactcacccctgcagcggatacggctctctgatggctccttaaagctctaccccttccagtgtttcctagcccatgaccaggctgtgcgtacccttcaatggtgcaaagctaacagccatttccttgtctctgcggggagtgaccggaaaatcaaattctgggaccttcgacgtccttacgaacccataaactctatcaagcgcttcttgagtacagaactggcctggctgcttccctacaatggtgtcactgtggctcaggacaactgctatgcctcttatggactctgtgggattcattatattgacgctggttaccttggtttcaaggcctacttcactgctcctcgaaaaggcaccgtttggagtctttcaggatccgactggcttgggacaatagctgcaggagatatatccggggagctcattgctgctatattaccagatatggcactgaatccaataaatgtcaagcgacctgtagagcgaagatttcctatatataaagcagatctgataccgtatcaggacagtcctgaaggtccagaccattcttctgcttcatctggggtccccaaccctcccaaggctcgaacttacactgaaactgtcaaccatcactacttgctctttcaagacacagatttgggttcattccatgatctgctccgtagagaaccaatgctgcgcatgcaggagggagaggggcattctcaactctgcctggacaggctgcagctggaggctattcataaggtacgtttcagcccaaacctggactcctatggatggctggtatctggggggcagtcagggctggttcgaatccattttgtccgtggactcgcctccccactgggccaccgtatgcagcttgaaagccgagcccacttcaatgctatgttccaaccatcctcccccactagacggcctggcttctctccaaccagccatcgccttctgcccactccctagccttggcccacaccagatccttggagtgaagtcggtcaagaacaaatggcccctatgcacagagccataggaactgggggccttccctggacagtgatcatgccaggcctggacctttaggcctgcctccccaggactccttagatcccactctttctacagacttctgtgatcacagccccctgcgggcaggggggctctccctccaccaactctcaaggctcctcagcctaagactatggctcatgagaaacactcaggcctgacctaggcttgggagtcaaactgctcatattgagcatattgttaagtgggtaaagccaagtaaaggtactgggtgtttttgtgaccacttgtgaatgggtgtatggagaactgaaaagggtatctgcatgaaggctcctgtctgactattccaggatccaatattactgccttctgaaacttcctctttagggtaaccatcatgtatgcccacgagggtgatagtaattcgtgagactgaagttgcttagagtacttctttgaccaaggaataccacagacaccctaccgatagaacagtggctcagatcttacttgctcctgcttacgaagtattcccaatcactggtcatctgaccctacttgaacactcctgaacagtcatgttttttaaaatcttcctttatatcaagtcagagagtatacttctataaatttcactcatggatgttaggaaatctagtcatcttccctgtgattgccctgttaagtatttaaccatagctatcatgtgtttcccaaatcttctctagattaaatatcttcagttacttcaaccattcttttacacgtcatgatttttgatccttcatgatactgtcacattgttgactcattagaatgtttacctacttcagttctatgtataggaggtgtttagaacccaagtactgtaatgtattgttatatctcatcttgttagagtcctcttgtgggatgctgcagactcacagtgactatgatactgcctcctaagcaaggacacaccccagtgatgagaaataggcaaaccatggtc

SEQ ID NO: 25285 - DNA, 5079 bp, Homo sapiens
atggaataatggccaaactcagtgacttacacctgtgatcgcagcactatgggaggctgaggcaagaggatcacttcaggtcaggtgttcaagaccagcctggtcaacataacgagaccccatctctagaaaaaattaaaaaattaggccgggcacggtggctcatgcctgtaatcccagcactttgggaggctgaggcaggcgtatcacaaggtcaggagttcgagaccagcctggccaacatagtgaaaccccttctctactaaaaagacaaaaattatccgggcttgctggcgggcgcctgtaatctcagctactcgggaggctgaggcaggacaattgcttgaacccgggaggcggagtttgcagtgagccgagatcgcgccactgcactccagcctggggacagagcaagactccatctcaggaaaaaataaaaataaaaataaaaacggggtctcactatgttgcccaggctggtatcgaattcctgggctcaagtgatcctcccccgccttggcctcccaaagtgctgggatcacagacaggagccaccatacccagccaaagtcatgcttttctactcctactccttcccttccttgtcctctttccaagctctctcgggcccatccctgacttcactactggcagaatcctccagcggccggcggcgaggacttctttgtctcccagactccgccttgggctcggacgccgccagggttgcaggtacagactctctggtctagctggctcttccggccacaggcgcggcagtccggccggaaaggccggattcagggatccagagcgcgagcccggcctgggagtccgcctactcccggctcccgtcgaggccgcgtgggatcccgttggccgcgcaggcgtcgatctcccctttttgacactgcaactcccatgaggccctgcagcgtccctggcgccgctgaagacgccctggaactcggctggcttcggagggctcggtgactctggccgcgctgcattatggaatacagagtctaagagaaaactagcccggcaccgactccggaccaagcacacgtgtttaccttgtgcactggggtgggggcgtcagtgaagagcagctaacaagatttcgtcataagaccgcgaccagacaggcggcgccatcttcgaacttagacttccggaaggactttggcgaggggcagccattttggggggtgctgatggatacctgcggggtcggctatgttgccctgggggaggccggccccgtggggaacatgactgtggtagactctcctggacaagaggtgctaaatcagcttgatgtcaagacctcttcagaaatgaccagtgcagaggcttccgtagagatgtcattacctacccctttgcctggatttgaggattctcctgatcagaggaggctccctccagagcaggaaagcctctccagactggaacagccagatctttcttcagagatgtcaaaggtctcaaagcctagggcctcaaagcctggccggaagagaggtggtaggacacgaaaaggccccaaaaggccccaacagcctaatcctccatcagccccactggttcctggtctcttagatcaatccaaccctctgtccacccccatgcctaagaaacgaggtcgaaagtccaaggcagagctgctgctgctgaagttgtcaaaagacctagatcggccagaatctcaatctccaaagaggccccctgaggactttgagaccccttctggggaacgaccccgccgaagggctgcccaagtggcacttctgtatcttcaggaactggctgaagagctctcaacagccctgcctgcccctgtgtcctgtcctgagggccccaaggtgagcagccccaccaaaccgaagaagatccggcagccagcagcctgtccaggtggagaagaggtggatggtgctccacgggatgaagacttttttctccaggttgaggctgaagatgtggaagaaagtgagggcccaagtgagagctcatctgaacctgagcctgtagtgccccgaagcaccccacgaggatctacttcagggaaacagaaaccacactgccgaggaatggctcccaatggcttaccaaatcatatcatggctcctgtttggaagtgcctccatctcaccaaggacttccgagagcagaaacattcatactgggagtttgctgagtggattcctttagcctggaagtggcacttgttatctgagcttgaggccgctccctacctgccccaggaggagaagtctccattgttttctgtacaacgtgaagggctacctgaagatggcaccctctaccgaataaacagatttagctcgatcacagcacatccagagcgctgggatgtgtccttcttcacggggggaccgctctgggctctggactggtgcccagtgccagagggggcaggagcctcgcaatatgtggctcttttctccagccctgacatgaatgagacacacccactgagccagcttcattcgggtcctgggctgctccagctctggggccttgggaccttgcagcaagaaagctgtcctggcaacagggcccactttgtctatgggattgcttgtgacaacggctgcatctgggacctcaagttctgccccagtggagcatgggaacttccaggcacccctcggaaggctcctctcctgccccggttgggtctcttggctctggcctgctcagacgggaaagtactgctattcagtctaccccatccggaggccctgctggctcagcaacccccagatgcagtgaagcctgccatatataaggtacaatgtgtggcaactctgcaggtggggtctatgcaagctacagacccctctgagtgtggtcagtgccttagcctggcctggatgcctaccaggccccaccaacacctagctgctggatattataatggcatggtggttttctggaaccttcccactaactcacccctgcagcggatacggctctctgatggctccttaaagctctaccccttccagtgtttcctagcccatgaccaggctgtgcgtacccttcaatggtgcaaagctaacagccatttccttgtctctgcggggagtgaccggaaaatcaaattctgggaccttcgacgtccttacgaacccataaactctatcaagcgcttcttgagtacagaactggcctggctgcttccctacaatggtgtcactgtggctcaggacaactgctatgcctcttatggactctgtgggattcattatattgacgctggttaccttggtttcaaggcctacttcactgctcctcgaaaaggcaccgtttggagtctttcaggatccgactggcttgggacaatagctgcaggagatatatccggggagctcattgctgctatattaccagatatggcactgaatccaataaatgtcaagcgacctgtagagcgaagatttgtacgtatacgaacatctaacagcagctgttggatcctaacccacatgccctcccaaattctgcctatatataaagcagatctgataccgtatcaggacagtcctgaaggtccagaccattcttctgcttcatctggggtccccaaccctcccaaggctcgaacttacactgaaactgtcaaccatcactacttgctctttcaagacacagatttgggttcattccatgatctgctccgtagagaaccaatgctgcgcatgcaggagggagaggggcattctcaactctgcctggacaggctgcagctggaggctattcataaggtacgtttcagcccaaacctggactcctatggatggctggtatctggggggcagtcagggctggttcgaatccattttgtccgtggactcgcctccccactgggccaccgtatgcagcttgaaagccgagcccacttcaatgctatgttccaaccatcctcccccactagacggcctggcttctctccaaccagccatcgccttctgcccactccctagccttggcccacaccagatccttggagtgaagtcggtcaagaacaaatggcccctatgcacagagccataggaactgggggccttccctggacagtgatcatgccaggcctggacctttaggcctgcctccccaggactccttagatcccactctttctacagacttctgtgatcacagccccctgcgggcaggggggctctccctccaccaactctcaaggctcctcagcctaagactatggctcatgagaaacactcaggcctgacctaggcttgggagtcaaactgctcatattgagcatattgttaagtgggtaaagccaagtaaaggtactgggtgtttttgtgaccacttgtgaatgggtgtatggagaactgaaaagggtatctgcatgaaggctcctgtctgactattccaggatccaatattactgccttctgaaacttcctctttagggtaaccatcatgtatgcccacgagggtgatagtaattcgtgagactgaagttgcttagagtacttctttgaccaaggaataccacagacaccctaccgatagaacagtggctcagatcttacttgctcctgcttacgaagtattcccaatcactggtcatctgaccctacttgaacactcctgaacagtcatgttttttaaaatcttcctttatatcaagtcagagagtatacttctataaatttcactcatggatgttaggaaatctagtcatcttccctgtgattgccctgttaagtatttaaccatagctatcatgtgtttcccaaatcttctctagattaaatatcttcagttacttcaaccattcttttacacgtcatgatttttgatccttcatgatactgtcacattgttgactcattagaatgtttacctacttcagttctatgtataggaggtgtttagaacccaagtactgtaatgtattgttatatctcatcttgttagagtcctcttgtgggatgctgcagactcacagtgactatgatactgcctcctaagcaaggacacaccccagtgatgagaaataggcaaaccatggtc

SEQ ID NO: 25286 - DNA, 4777 bp, Homo sapiens
atggaataatggccaaactcagtgacttacacctgtgatcgcagcactatgggaggctgaggcaagaggatcacttcaggtcaggtgttcaagaccagcctggtcaacataacgagaccccatctctagaaaaaattaaaaaattaggccgggcacggtggctcatgcctgtaatcccagcactttgggaggctgaggcaggcgtatcacaaggtcaggagttcgagaccagcctggccaacatagtgaaaccccttctctactaaaaagacaaaaattatccgggcttgctggcgggcgcctgtaatctcagctactcgggaggctgaggcaggacaattgcttgaacccgggaggcggagtttgcagtgagccgagatcgcgccactgcactccagcctggggacagagcaagactccatctcaggaaaaaataaaaataaaaataaaaacggggtctcactatgttgcccaggctggtatcgaattcctgggctcaagtgatcctcccccgccttggcctcccaaagtgctgggatcacagacaggagccaccatacccagccaaagtcatgcttttctactcctactccttcccttccttgtcctctttccaagctctctcgggcccatccctgacttcactactggcagaatcctccagcggccggcggcgaggacttctttgtctcccagactccgccttgggctcggacgccgccagggttgcaggtacagactctctggtctagctggctcttccggccacaggcgcggcagtccggccggaaaggccggattcagggatccagagcgcgagcccggcctgggagtccgcctactcccggctcccgtcgaggccgcgtgggatcccgttggccgcgcaggcgtcgatctcccctttttgacactgcaactcccatgaggccctgcagcgtccctggcgccgctgaagacgccctggaactcggctggcttcggagggctcggtgactctggccgcgctgcattatggaatacagagtctaagagaaaactagcccggcaccgactccggaccaagcacacgtgtttaccttgtgcactggggtgggggcgtcagtgaagagcagctaacaagatttcgtcataagaccgcgaccagacaggcggcgccatcttcgaacttagacttccggaaggactttggcgaggggcagccattttggggggtgctgatggatacctgcggggtcggctatgttgccctgggggaggccggccccgtggggaacatgactgtggtagactctcctggacaagaggtgctaaatcagcttgatgtcaagacctcttcagaaatgaccagtgcagaggcttccgtagagatgtcattacctacccctttgcctggatttgaggattctcctgatcagaggaggctccctccagagcaggaaagcctctccagactggaacagccagatctttcttcagagatgtcaaaggtctcaaagcctagggcctcaaagcctggccggaagagaggtggtaggacacgaaaaggccccaaaaggccccaacagcctaatcctccatcagccccactggttcctggtctcttagatcaatccaaccctctgtccacccccatgcctaagaaacgaggtcgaaagtccaaggcagagctgctgctgctgaagttgtcaaaagacctagatcggccagaatctcaatctccaaagaggccccctgaggactttgagaccccttctggggaacgaccccgccgaagggctgcccaagtggcacttctgtatcttcaggaactggctgaagagctctcaacagccctgcctgcccctgtgtcctgtcctgagggccccaaggtgagcagccccaccaaaccgaagaagatccggcagccagcagcctgtccaggtggagaagaggtggatggtgctccacgggatgaagacttttttctccaggttgaggctgaagatgtggaagaaagtgagggcccaagtgagagctcatctgaacctgagcctgtagtgccccgaagcaccccacgaggatctacttcagggaaacagaaaccacactgccgaggaatggctcccaatggcttaccaaatcatatcatggctcctgtttggaagtgcctccatctcaccaaggacttccgagagcagaaacattcatactgggagtttgctgagtggattcctttagcctggaagtggcacttgttatctgagcttgaggccgctccctacctgccccaggaggagaagtctccattgttttctgtacaacgtgaagggctacctgaagatggcaccctctaccgaataaacagatttagctcgatcacagcacatccagagcgctgggatgtgtccttcttcacggggggaccgctctgggctctggactggtgcccagtgccagagggggcaggagcctcgcaatatgtggctcttttctccagccctgacatgaatgagacacacccactgagccagcttcattcgggtcctgggctgctccagctctggggccttgggaccttgcagcaagaaagctgtcctggcaacagggcccactttgtctatgggattgcttgtgacaacggctgcatctgggacctcaagttctgccccagtggagcatgggaacttccaggcacccctcggaaggctcctctcctgccccggttgggtctcttggctctggcctgctcagacgggaaagtactgctattcagtctaccccatccggaggccctgctggctcagcaacccccagatgcagtgaagcctgccatatataaggtacaatgtgtggcaactctgcaggtggggtctatgcaagctacagacccctctgagtgtggtcagtgccttagcctggcctggatgcctaccaggccccaccaacacctagctgctggatattataatggcatggtggttttctggaaccttcccactaactcacccctgcagcggatacggctctctgatggctccttaaagctctaccccttccagtgtttcctagcccatgaccaggctgtgcgtacccttcaatggtgcaaagctaacagccatttccttgtctctgcggggagtgaccggaaaatcaaattctgggaccttcgacgtccttacgaacccataaactctatcaagcgcttcttgagtacagaactggcctggctgcttccctacaatggtgtcactgtggctcaggacaactgctatgcctcttatggactctgtgggattcattatattgacgctggttaccttggtttcaaggcctacttcactgctcctcgaaaaggcaccgtttggagtctttcaggatccgactggcttgggacaatagctgcaggagatatatccggggagctcattgctgctatattaccagatatggcactgaatccaataaatgtcaagcgacctgtagagcgaagatttcctatatataaagcagatctgataccgtatcaggacagtcctgaaggtccagaccattcttctgcttcatctggggtccccaaccctcccaaggctcgaacttacactgaaactgtcaaccatcactacttgctctttcaagacacagatttgggttcattccatgatctgctccgtagagaaccaatgctgcgcatgcaggagggagaggggcattctcaactctgcctggacaggctgcagctggaggctattcataaggtacgtttcagcccaaacctggactcctatggatggctggtatctggggggcagtcagggctggttcgaatccattttgtccgtggactcgcctccccactgggccaccgtatgcagcttgaaagccgagcccacttcaatgctatgttccaaccatcctcccccactagacggcctggcttctctccaaccagccatcgccttctgcccactccctagccttggcccacaccagatccttggagtgaagtcggtcaagaacaaatggcccctatgcacagagccataggaactgggggccttccctggacagtgatcatgccaggcctggacctttaggcctgcctccccaggactccttagatcccactctttctacagacttctgtgatcacagccccctgcgggcaggggggctctccctccaccaactctcaaggctcctcagcctaagactatggctcatgagaaacactcaggcctgacctaggcttgggagtcaaactgctcatattgagcatattgttaagtgggtaaagccaagtaaaggtactgggtgtttttgtgaccacttgtgaatgggtgtatggagaactgaaaagggtatctgcatgaaggctcctgtctgactattccaggatccaatattactgccttctgaaacttcctctttagggtaaccatcatgtatgcccacgagggtgatagtaattcgtgagactgaagttgcttagagtacttctttgaccaaggaataccacagacaccctaccgatagaacagtggctcagatcttacttgctcctgcttacgaagtattcccaatcactggtcatctgaccctacttgaacactcctgaacagtcatgttttttaaaatcttcctttatatcaagtcagagagtatacttctataaatttcactcatggatgttaggaaatctagtcatcttcccaagtttccccgggaaaacttggaatttaagggttagacatactttgcagagtggtatccaaatcattggagaggccaacattaaaaa

SEQ ID NO: 25287 - DNA, 374 bp, Homo sapiens
catcccctgagattcttaccatttttagggccgttgtatagggaatccttttttggatgaatattttctaatttgttatttgtgtatctaccaaaaggctattgatttttctgtgttgctcttgcatccaacatcttactgaattttttattaaatagcatatatatagattcttttttatattctatgtggataatcttaacatctgcaaacaaagatggttttctctctgctttcagttcttactcctcttgtttctcttaagaatactttttaagaatgctttattacattagctagaacctacagaaaatattaaatggcagaaataataatgggattattgtgctattcctgactttaatggaaatgtc

SEQ ID NO: 25288 - DNA, 379 bp, Homo sapiens
gtgggctggtcattgaaatcctgctatgcttattttgctatgagaattgtaagctacagatcctttctactctcctgacactataggagctttcagtcttgttgagatgagataaatagtgttgcaaagaatacttatttctaaacactgaaattatattcagggtggtgatgtgtccacactataaaaggcacataagtgatgggactgactgatggaaaagtaggttcctgcctcaagtcacacttacattggtcatgaggaaggagaaggggaaattgtcttgtactatttcaaaattgttattttgcactttccttctcatctcctctcttgtttttctaattctcctccttctcctccttaccttgtcttctcc

SEQ ID NO: 25289 - DNA, 235 bp, Homo sapiens
ctgaggtaggagaatcgcttgaacccgggttgcagaggctgcagtgagccgaaatcgtgccattgaactccagtctgggcaacagagtgagactctgtcttaaaaaaacccgtaaagaacatataatagatatatctaaatgtgcagaaatactttacatgcatagtgactctgtgaaaaatcacttagtatagtgctttcacttatttttatagacatgattttattaacagag

SEQ ID NO: 25290 - DNA, 434 bp, Homo sapiens
gaaacctttccatctctatgcctgtttgtatccactaaagataaacaaatttaaggattctgaaagctcctacagtaatgtctgtgattttctaatttttcattaatgagatcaacactgcttaataaatacgtatactcatctgttcatagagtagaataatatgaaataacctgaattagctgtgaaaatagcagtgcttcggctgggcgtggtggctcacgcctgtaatcccagcactttgggaggctgaggcgggcggatcacgaggtgaggagatcgagaccatcctggataacacggtgaaaccctgtctctactaaaaatacaaaaaaaatagccgggcgtggtggcaggcgcctgtagtcccagctactcgggaggctgaggcaggagaatggcatgaacccgggaggcggagtttgcagtgagcc

SEQ ID NO: 25291 - DNA, 524 bp, Homo sapiens
tgaagaagtcgagctccttcagcaagttcttgagcgcctcgcccatggctccacgtaaaaagacaaagatccgcggtggtctgccagccttctcagaaatctctcgtcgacctactccggggcctttagctggtctagtgcccagtttgcctccaacaacctgaaggtccctggggctaccacctggttgatctatcgtggcctgctcgtcgcagtccaaacccgcccaagactgcagcccaatcaacgcctggagcctcattctgtttccagctttgtccagggcagcctgttttacccagatgggcctgcacctccagcttctttctgaagcatgacccatctccagagatgggatttgagaaatcagtgagagcttcctataaagaactccaggagacaggcctgaactctagagggaacttgaaatccagggtcaaaggttaaggggcagcagcttggtcttggcccctgaaagccttcacctgatgcctctgcagctacacaatcccaagacagagcta

SEQ ID NO: 25292 - DNA, 303 bp, Homo sapiens
cagcactccaggtgcaaaaccatggtcctgggatgcgtagagatgggaggatatgggtagaatcaggaatatgaagatagagggtagaacttggtcacaggttggaagtggcacatacaaggcaatcatggtttgggaaaggcgagctctggtgtggtcaggtaatggggaaaggctcacagagcagcagagtgcatgctgcgtggctggatgggctctgagggcacaggtagtgaggagggagagagagtttaaggtagaaggtgcagaggtatggacctgggaagcattcagggaatagtg

SEQ ID NO: 25293 - DNA, 476 bp, Homo sapiens
agtacctccccttcctcccagccccccgcagctgtccacaaagacgatggtgggggacggaaggtgacagagatggatagccatatagccatgtccatttctcctcctcctcctccccgccccatatacaaatacgcacgtacacacatatccccccaagctatatctgtcccctcctgagatcaaacaaggacaagaaggggaggcaggaggggatcagagctgtaggaaaacagacacaaacggtgaaggttggagatgttctgagatgccaggatagaaggggatgaaggtacacaggtgataggaggacagagaatgatgaacagaaacccaaggaaaacaaagggaggagagagagcaaaaaagataaagtgaaggagaggagagaaaggacaaaggagggctgggggaaaagtgccaaacaagcagtaagaaaggacgataaaagacaggcaagttaagatattggttca

SEQ ID NO: 25294 - DNA, 447 bp, Homo sapiens
taaaagtaggcttagttatttaagcagtcacatctttgcttcctgaaatttatatttgtaccatttagaagcatctcataaactattgaaaaaaaaaatagaaacatctcagtttggtttaaaagggtgaaggagactgggcgtggtggctcaggcctgtaatcccagcactttgggaggctcgaggcaggtggatgatgaggtcaggaatccaagaccagcctggccaacatggtgaaaccctgtctctactaaaaatacaaaaattagctgggcatggtggtgtacacctctattcccagctactcgggaggctgaggcaggagaatcgcttgaacctgggaggtggaggttgcagtaagccacgatcgcaccactgcacaccagcctgggtgacagagtgagactctgttttgcgggggaaaaaaagggtgagggaagttgagt

SEQ ID NO: 25295 - DNA, 354 bp, Homo sapiens
gaaaggatgaagtcaggaaagtaaggtcaaattaaaattttaaacatcttgtgcatttcccccatttaaaatatagaaaggtaagattactctcatagttggttgattacattcaagagatatctaaatttgaaaagatagacttatccacagaggcataggattcttaggagtttaatccttggctaggtgtggtggctcatgcctgtaatcctagcactttggaaggccaaggcaggcagatcacttgaggtcaggagttcgagaccagcctggctaatatggtgaaaccccatctctactaaaaatacaaaaattagctgggcgtgatgtcgggtgcgtgtaatcccagct

SEQ ID NO: 25296 - DNA, 651 bp, Homo sapiens
aagttgccatacttctgcagtataggctggttgcccacaggaaaatattggagacaaagctgaaagcaatgtaaaaaccttgtgaaaaagcagaatgtatctttgaagaactgcacttaatatgttattcagcctaatttgtgcattttaagtaacatgttgatgagttgtacggtagtttcctttatccatagcccataccacaactccaagtagatgcctgcagatggtactgaacccttatatatactatgtttttcctgtgcatacataccaatgataaagtttaatttataaattaggcacagtaagaaattaataactattgataaaatagaacagttataacatcatactgtaataaaaaaaaactatgtaaatgtggtttctctctctgtgtgtctctctgtcatctcaaaatatcttattatactgtactcacctatttttggactgtgggtgaccacaggtaactgaagctgtggaaagcaaaaccatgaataagtggggactgctgtatgtgttgtagagctgtgctgtccagtctgtcagccactacttacatgtggctactgggaaatggaaatgtgtgcccaaagtgatatgtgctgtaagtgaaaaatgaacattaggtttcagaagataagtaca

SEQ ID NO: 25297 - DNA, 199 bp, Homo sapiens
tgtacatcatctgagatttctctctgtcccccaagcctttctcattcaattatcactaaatcatattgacgatacctctcttctgcctccattttgtattcccactgccactgggaacatgaacatttacaaaatggcttttattaaaaaaaaaaactgccaacaattaatgttatttcttacgggaaaaaaattaagc

SEQ ID NO: 25298 - DNA, 642 bp, Homo sapiens
cattctatctgaattctttcttggcattaatcataccttgcttgctctagtgcactccccatcccttaactgtaggttgtcaaagtgttgtctatacaacagaaactcctgagttataaaaccacaatctcagaaggtagggcctggaaatctgatttttgatatagtcttcagtagggtcttatagacactagagattgagaactggcttaacagttgctcttctacagagtcatgactttgcctcagctctgtactaatcattttctgtgtaaccatttattgaatctagatcatttcatctttatgagacaatctacgataataaaaaacaaaacaaaaagaagcaaaccctggggaaagaagagaatctgacttccagggttactatcttatttgattcaaatgttcggttttcaagaaaaaaatcataaggcataaaagaaaaggaaaatatggctcattcaaaggaaaaaagtaaatcaacagaaactgcctctgaaaaagaagtgatggtggatctattagaactttgaaatagctgtccgaaagatactcaaagaactaaagaaagatgtggagagagtcaagaaaatgatatatgaataaaatgtaaatatcaataaggaaaaatcctaaaaa

SEQ ID NO: 25299 - DNA, 394 bp, Homo sapiens
cgtacttctcaacatcatcaagtctccctcaaatgaaaaataaactaaattgtttttaatattttttaatgccattactaaaatacagtgcactaagaaagaaccaactaaaattcctaaattaatgctttataatattacagtgatgtgtactgtttaattaaggccatagaccagttgattatcaaagattttttttttccttttgatctaatgattgtttgatattttttctaatcccattactaacttgtctcatccattaacctacgtaagtggagtgtgaaaaatgcattcataaatttaagttaaattttttttaaattgcagcatgtgaaatctacttaataaattcacaccaactccacaaagcattggggcaatttataaacaa

SEQ ID NO: 25300 - DNA, 453 bp, Homo sapiens
gagaaggaaaatgctttgggaaattgtatctcaggccagcaggaagtcaactttaaatgcttaggaactgtatctcagtgggcttcctcctctcctctttcaagttactataggtattgccttatggtcagctttggaatgagtcctatttacataatgcattttaaaaatagggtgccttttcattgttcaatgacgagttaggtggggcagcgcaccagcatgtcacatgtatacatatgtaaccctgcacattgtgcacatgtaccctaaaacttaaagtataataatttaaaaaaaaaagggtgcttttttattccaaaaatacgggaacatcaatattgcttttttaaaggaaatttactacaataatattttctttcggttcaactgtattaaaagtggaaactcttcgtcaggtgctccgagaacagtgaacaaacacttcaaatg

SEQ ID NO: 25301 - DNA, 584 bp, Homo sapiens
tatgatcctcacaacaaccctgaaagatagatggggcccattttacagatgagaaaactgagccgcgaacaggtgatgcaactcacccagggccacaagtggcagagccaggactagatcccaggtccctggactcctggtcagtatgattctcttgcctcccatcaagcaccaatagagcagcttggctggggtcggagataggaggtttgggccacgttttgcatcgtaacaatatttctggcttggtaacctttttatctctagcacctagcacagtacctggcaattagcagacaccgtaagtcatttgataaatgaatggatgagctagaccaatgctttgtggttaaaataatggcaactttgggcttaaaagaggaaataattctttgcaactgtggctatccatccttgcaacagatgcctcaggaatcacaggtagatgattaggggctcatcgcttagtggctcaaagaggtgttcatgcctgcttgtatggatgttatagaatccaaacacacagggggaagaaatggaaaaatgagaaaaaaactcagtccaaaagtaggcaagaaagtctc

SEQ ID NO: 25302 - DNA, 419 bp, Homo sapiens
gctgaatgaaatccagaagaattagttgaagctgctgaagaggaaggaaaatgggatgcttgttctaggaggtagaagcagaatgtgcaaagccttaaagctctacattggaagaaatccagataggttagtatagctaaggcttgtggtattcccagtgagcattacagagcctaacattagattttcagcaaatactgaataaataaataaataactgatgtaagggaaggagttttttaagagtaggaagtctgggaaagcagacacatagcagtcacatgcagcctaccttgtgtctagagcaccagaattctagtcaagaaggtacagcaaattcaggtctctacagacttgaccagtttgttcatccgggtgtatggtttctttctgaggtacatagataacccacccaggag

SEQ ID NO: 25303 - DNA, 482 bp, Homo sapiens
aatctgtgcattgttacatttctatagtccaaggatggcaattgatttttaaaacacatgctgcaactttatttggtctgtaattacatggactttatttggaggtcagtgaaggaacaactaaataggaaaatgtagtcttcctcccttgtgcaatgaaaccataaaagttggcagacagaaaggaatgctaaactttttcccagagctctgagtttggtttccactggtccatgttccattgggtgattagagaaagcttttttaaacccttacttcagaatgatcttaattggtgcaaggttgagccctttctaggaggggagggaaaaggttgaatagccttttcaagtcacatgaaagtttctaggatgaatgtacgataattagattaataagtagcttaatttatcacagctgaggatttcaacagccacacattagagcaagaaaaaaagattagtgtgattctagtttgtaaa

SEQ ID NO: 25304 - DNA, 586 bp, Homo sapiens
tgcttccccgtcctcagcaggaactcatttaggaggttgaggctgggcccttcccaggagtgctgcctctcagtcctgaacatgggaggggcccagggtatgttcacggggcgatgctgccctcccagctggcccatgggtgaccctgggaacattaactgcctcacaacgtttgtgcctcagttacccgtagatgtagtgagggtaacaatacttactctcgttggtgataaggaacagctaacacaacacacagggtttttctgctcccaaaatgggattcttcagtgcaccaaatcgaagaaagcactggagctcacgctggtttctccattgtttctccttaacagtggaaaccgtaacttttgttctagtagcatctagcatgctcaataattatttgtaaataaaagttatactttccctccaaaggggacaaggtattgttatgacaaggcttttaaataataaagctcctgcgaatagctaacgttcctagagggctggctgtcttgtgggttgtctgatcactgtgtagccttgaatgaattacctgctatgaccaatagtgaggagggggtcgagc

SEQ ID NO: 25305 - DNA, 515 bp, Homo sapiens
ggaaatcatccaatatctgatctcagacgaaaaggaattaaattacaatttgataacagaaagatagccggaaaatcactgaatacttagacattaaataacacatttctttttttttttttttttttttaagacagagtctcactctgtcacccaggctggagtgcagtggcgcgatcttggctcactgcaacctccacctcccaggttcaagctattctcctgcctcagcctcccgagtacctgggactacaggtgcacaccaccacacctggctaatttttgtatttttagtagagacggggtttcaccatgttggccaggctggtcttgaactcctgacctcaggtgatccgcccaccttggcctcccaaagtgctgggattataggtgtgagccacagcacccagcccaaaatgttttcaaaagacatatatggatggaagactgttatccaaaattacacaaagaactctttaaaacttcaacaaaaagagaggtgggtatgggtgctg

SEQ ID NO: 25306 - DNA, 1373 bp, Homo sapiens
ggggaggggggaaacagaaaagaaaagaccagcactttgggaagccaaggcaggcggatcatgaggtcaggagatcaagaccatcctggctaacacggtgaaaccccgtctctactaaaaatacaaaaaaaaattagccaggagtgatggcgggcacctgtagtcccagctactcaggaggctgaggcaggagaatggcatgaaccccggaggtgaagcttgcagtgagctgagattgtgccactgcactccagcctgggcgacagaacgggactccgtctcaaagaaaaaaaaaaaagaaaagaaagtatttggaatttatttgtgaaatttttaaaagaggtaaagcttgtaaagagccctttgtggtgcctggtacagagtaggtgctcaagaaacactggttcacatccttttgcagctggtgtcagtgaggctggtctagctctcctcgcgtgccctgtggtgtctcaggcttgtgcacaggaggcgggagcctgtgtttattatttgctgtttatcctctccctcctccgtctctttcctgacatggtttctatggagacgagggtccctgagcaattcttctgccagagcctcagtcccatcatcaagatctgccgttgccatcctgacaggctgccgaggtggtgctgtcacccggctgggaacaggagcccctggcctgagctgatgtggttgccatggagacagctctccgctagagagaagggaggtggcagaccctggccgagggctgcggtggcactgttgcccagctaccctctcttccagtgtcacacccctccttgtgttttaggcagaaagccaatacgagtgttgacgtgatttattatggtatagctgctgtgtttgagccctcactctgtgccaggcaccacagaagccttgaccacaccagcacattgtttaaccctccaacagccttcccacggacatggtgtggttgtcttattttataggtgccactgtttgttggcaattttaaaatcatgatttaattcccatatcatacaactcaccatttaaaagtgtacagtttgggctgggcacagtggctcacacctgtaatcccagcactttgggaggccaaggcgggtggatcacctgaggtcaggagttcgagaccagcctgaccaacatggtgaaaccccacttctactacaaatacaaaaattagccaagtgtggtggtgggcgcctgtaatcccagctacctgggaggttgaaataggaggagaattgcttgaacccgggagctggaggttgcagtgagccgacatcccatcattgcactccagcctaggcaacaaagcgagactctgtctcaaaaaaaaaaaaaagtgtacaatt

SEQ ID NO: 25307 - DNA, 1427 bp, Homo sapiens
caatgaagacattttctttgcagaaagaaatttcagagcttccaagaccacaaacttaaaataagtaaagaagagagtaaaattcttaaaaaggctcagaaagatggatttttgcatgagacgcttctggacaggtagctatttacttattttcactatttttcagtagccaatagaaatggcatgtagaaaagctatattctcttaaattactgtagttttcacatttttgtctttatttataatttatgagtgtggcaatattacctagagaggacatcatgagtttgggaaaagactgtcaagaaagaatatctaaaaattataaccgattctaagtatatactttaagaaattcaggtttgactgtatctacttcataaatttatcattatctttttataactattagaaccagagttagaaagaagcagtttgactaatataaaaattctgtggattctgttagagtagttcatgttccttaaaataagcatagatcaactaaaaaactaagtataaaagctaaacaagtgaaattgaagcagttttattgtaagatttggaagagtgcaggatgtttatcatagcacattattaatatttattactcttcctatgtagataagtgatgtcctagatttacaacatagaaaaacaggtagagacgtttagctgtgagtgtacaagtataaatcaattaagtgccagattttgataatcaccagctgctcattcaagtcctatgttgcaaagttacttttaccctttatttacattacttgataaaggcaatgtttaattacatatttcctgttaactagctggtagagttcatacctaaagtcagtaaataatgttaagaattttttccagctgagcaaatgaatatgtatctagttgtaagaaatcaagaagaggatataaaatataatcaggatgtggactctaaaacggaataagctctgtgtcctgtaacttttttcacttgtaataatacagcattctcccctgttaaatggaaacttagagcacccttaaattctggaataattaaaattgctatttagattgaaaagcccttaggcaacatttattgaatattaggaaataacttttataagattagaatccactttatagaaacgaaatttaaaagtatacatgttttaatataagtgttgtggtaatacaataaccaaaattgaacacacagttttaaagctttttatatttagtagcagttgaatatatatggcatgttttacatagattaattttactatttttctttgtttaaacaagagaaccaaattgaaagccgacagatactgcagatgactggaatttttgtttctgtcttatctttttgtgttttttttctgaataaaatattcagaggaaatgcttttacagagttaaaaagt

SEQ ID NO: 25308 - DNA, 2450 bp, Homo sapiens
gcagaaacctggaagtggaaatctcgggcattcaccgtttgggtgaagacggaggcgggttctggacagacgtaggctgtcagggagtgtttacttcgcctccacttctgttcctccctgccctggtgctgctccaggtcacatactcgtcctgagccggcttcagcctgtccgcgcagaagtctcccggagccatggcctagtactcttatgtgaagtctagcaagctcgtgctcaagggaaccgaggtgaagagctgggtcctgcagctctggtgggagcctcctcagttcttttcggatgcactccacccccgcgaatccggtggaagccgtggtgcagagagccggctttgtggcctcccaggcttcgctctgaccctgtctgggctggacggaggccggaccgcggttcctggcgcctgtgcagagaggggcagcctcccgtgctgacgaccctggaaacaggatagacgggcgggtgacccgtggccccgtacccacgagtttgggtcccctgaggcatctctccaggcctctgcctgtaagaagaaaaagagcaaagataagaagagaaaaagagaagatgaagaaacccagcttgatacgttggaatctggtgaacagtaacaaactttggtgaaatttcaggaaccatagccattgaaatggatgagggaacctatatacatgcactcgacaatggtctttttaccctgggagctccacacaaagaagaatcgccctgaaatctggctatggaaaatatcttggtataaattcagatgaacttgttgggcattcagatgcaattggaccaagagaacaatgggaaccagtctttcaaaatgggaaaatggctttgttggcctcaaatagctgctttattagatgcaatgaagcaggggacatagaagcaaaaagtaaaacagcaggagaagaagaaatgatcaagattagatcctgtgctgaaaaagaaaccaagaaaaaagatgacattccagaagaagacaaaggaaatgtaaaacaatgtgaaatcaattatgtaaagaaatttcagagcttccaagaccacaaacttaaaataagtaaagaagagagtaaaattcttaaaaaggctcagaaagatggatttttgcatgagacgcttctggacaggtagctatttacttattttcactatttttcagtagccaatagaaatggcatgtagaaaagctatattctcttaaattactgtagttttcacatttttgtctttatttataatttatgagtgtggcaatattacctagagaggacatcatgagtttgggaaaagactgtcaagaaagaatatctaaaaattataaccgattctaagtatatactttaagaaattcaggtttgactgtatctacttcataaatttatcattatctttttataactattagaaccagagttagaaagaagcagtttgactaatataaaaattctgtggattctgttagagtagttcatgttccttaaaataagcatagatcaactaaaaaactaagtataaaagctaaacaagtgaaattgaagcagttttattgtaagatttggaagagtgcaggatgtttatcatagcacattattaatatttattactcttcctatgtagataagtgatgtcctagatttacaacatagaaaaacaggtagagacgtttagctgtgagtgtacaagtataaatcaattaagtgccagattttgataatcaccagctgctcattcaagtcctatgttgcaaagttacttttaccctttatttacattacttgataaaggcaatgtttaattacatatttcctgttaactagctggtagagttcatacctaaagtcagtaaataatgttaagaattttttccagctgagcaaatgaatatgtatctagttgtaagaaatcaagaagaggatataaaatataatcaggatgtggactctaaaacggaataagctctgtgtcctgtaacttttttcacttgtaataatacagcattctcccctgttaaatggaaacttagagcacccttaaattctggaataattaaaattgctatttagattgaaaagcccttaggcaacatttattgaatattaggaaataacttttataagattagaatccactttatagaaacgaaatttaaaagtatacatgttttaatataagtgttgtggtaatacaataaccaaaattgaacacacagttttaaagctttttatatttagtagcagttgaatatatatggcatgttttacatagattaattttactatttttctttgtttaaacaagagaaccaaattgaaagccgacagatactgcagatgactggaatttttgtttctgtcttatctttttgtgttttttttctgaataaaatattcagaggaaatgcttttacagagttaaaaagt

SEQ ID NO: 25309 - DNA, 2374 bp, Homo sapiens
gcagaaacctggaagtggaaatctcgggcattcaccgtttgggtgaagacggaggcgggttctggacagacgtaggctgtcagggagtgtttacttcgcctccacttctgttcctccctgccctggtgctgctccaggtcacatactcgtcctgagccggcttcagcctgtccgcgcagaagtctcccggagccatggcctagtactcttatgtgaagtctagcaagctcgtgctcaagggaaccgaggtgaagagctgggtcctgcagctctggtgggagcctcctcagttcttttcggatgcactccacccccgcgaatccggtggaagccgtggtgcagagagccggctttgtggcctcccaggcttcgctctgacccctggaaacaggatagacgggcgggtgacccgtggccccgtacccacgagtttgggtcccctgaggcatctctccaggcctctgcctgtaagaagaaaaagagcaaagataagaagagaaaaagagaagatgaagaaacccagcttgatacgttggaatctggtgaacagtaacaaactttggtgaaatttcaggaaccatagccattgaaatggatgagggaacctatatacatgcactcgacaatggtctttttaccctgggagctccacacaaagaagaatcgccctgaaatctggctatggaaaatatcttggtataaattcagatgaacttgttgggcattcagatgcaattggaccaagagaacaatgggaaccagtctttcaaaatgggaaaatggctttgttggcctcaaatagctgctttattagatgcaatgaagcaggggacatagaagcaaaaagtaaaacagcaggagaagaagaaatgatcaagattagatcctgtgctgaaaaagaaaccaagaaaaaagatgacattccagaagaagacaaaggaaatgtaaaacaatgtgaaatcaattatgtaaagaaatttcagagcttccaagaccacaaacttaaaataagtaaagaagagagtaaaattcttaaaaaggctcagaaagatggatttttgcatgagacgcttctggacaggtagctatttacttattttcactatttttcagtagccaatagaaatggcatgtagaaaagctatattctcttaaattactgtagttttcacatttttgtctttatttataatttatgagtgtggcaatattacctagagaggacatcatgagtttgggaaaagactgtcaagaaagaatatctaaaaattataaccgattctaagtatatactttaagaaattcaggtttgactgtatctacttcataaatttatcattatctttttataactattagaaccagagttagaaagaagcagtttgactaatataaaaattctgtggattctgttagagtagttcatgttccttaaaataagcatagatcaactaaaaaactaagtataaaagctaaacaagtgaaattgaagcagttttattgtaagatttggaagagtgcaggatgtttatcatagcacattattaatatttattactcttcctatgtagataagtgatgtcctagatttacaacatagaaaaacaggtagagacgtttagctgtgagtgtacaagtataaatcaattaagtgccagattttgataatcaccagctgctcattcaagtcctatgttgcaaagttacttttaccctttatttacattacttgataaaggcaatgtttaattacatatttcctgttaactagctggtagagttcatacctaaagtcagtaaataatgttaagaattttttccagctgagcaaatgaatatgtatctagttgtaagaaatcaagaagaggatataaaatataatcaggatgtggactctaaaacggaataagctctgtgtcctgtaacttttttcacttgtaataatacagcattctcccctgttaaatggaaacttagagcacccttaaattctggaataattaaaattgctatttagattgaaaagcccttaggcaacatttattgaatattaggaaataacttttataagattagaatccactttatagaaacgaaatttaaaagtatacatgttttaatataagtgttgtggtaatacaataaccaaaattgaacacacagttttaaagctttttatatttagtagcagttgaatatatatggcatgttttacatagattaattttactatttttctttgtttaaacaagagaaccaaattgaaagccgacagatactgcagatgactggaatttttgtttctgtcttatctttttgtgttttttttctgaataaaatattcagaggaaatgcttttacagagttaaaaagt

SEQ ID NO: 25310 - DNA, 2158 bp, Homo sapiens
gcagaaacctggaagtggaaatctcgggcattcaccgtttgggtgaagacggaggcgggttctggacagacgtaggctgtcagggagtgtttacttcgcctccacttctgttcctccctgccctggtgctgctccaggtcacatactcgtcctgagccggcttcagcctgtccgcgcagaagtctcccggagccatggcctagtactcttatgtgaagtctagcaagctcgtgctcaagggaaccgaggtgataagaagaaaaagagcaaagataagaagagaaaaagagaagatgaagaaacccagcttgatacgttggaatctggtgaacagtaacaaactttggtgaaatttcaggaaccatagccattgaaatggatgagggaacctatatacatgcactcgacaatggtctttttaccctgggagctccacacaaagaagaatcgccctgaaatctggctatggaaaatatcttggtataaattcagatgaacttgttgggcattcagatgcaattggaccaagagaacaatgggaaccagtctttcaaaatgggaaaatggctttgttggcctcaaatagctgctttattagatgcaatgaagcaggggacatagaagcaaaaagtaaaacagcaggagaagaagaaatgatcaagattagatcctgtgctgaaaaagaaaccaagaaaaaagatgacattccagaagaagacaaaggaaatgtaaaacaatgtgaaatcaattatgtaaagaaatttcagagcttccaagaccacaaacttaaaataagtaaagaagagagtaaaattcttaaaaaggctcagaaagatggatttttgcatgagacgcttctggacaggtagctatttacttattttcactatttttcagtagccaatagaaatggcatgtagaaaagctatattctcttaaattactgtagttttcacatttttgtctttatttataatttatgagtgtggcaatattacctagagaggacatcatgagtttgggaaaagactgtcaagaaagaatatctaaaaattataaccgattctaagtatatactttaagaaattcaggtttgactgtatctacttcataaatttatcattatctttttataactattagaaccagagttagaaagaagcagtttgactaatataaaaattctgtggattctgttagagtagttcatgttccttaaaataagcatagatcaactaaaaaactaagtataaaagctaaacaagtgaaattgaagcagttttattgtaagatttggaagagtgcaggatgtttatcatagcacattattaatatttattactcttcctatgtagataagtgatgtcctagatttacaacatagaaaaacaggtagagacgtttagctgtgagtgtacaagtataaatcaattaagtgccagattttgataatcaccagctgctcattcaagtcctatgttgcaaagttacttttaccctttatttacattacttgataaaggcaatgtttaattacatatttcctgttaactagctggtagagttcatacctaaagtcagtaaataatgttaagaattttttccagctgagcaaatgaatatgtatctagttgtaagaaatcaagaagaggatataaaatataatcaggatgtggactctaaaacggaataagctctgtgtcctgtaacttttttcacttgtaataatacagcattctcccctgttaaatggaaacttagagcacccttaaattctggaataattaaaattgctatttagattgaaaagcccttaggcaacatttattgaatattaggaaataacttttataagattagaatccactttatagaaacgaaatttaaaagtatacatgttttaatataagtgttgtggtaatacaataaccaaaattgaacacacagttttaaagctttttatatttagtagcagttgaatatatatggcatgttttacatagattaattttactatttttctttgtttaaacaagagaaccaaattgaaagccgacagatactgcagatgactggaatttttgtttctgtcttatctttttgtgttttttttctgaataaaatattcagaggaaatgcttttacagagttaaaaagt

SEQ ID NO: 25311 - DNA, 2679 bp, Homo sapiens
gcagaaacctggaagtggaaatctcgggcattcaccgtttgggtgaagacggaggcgggttctggacagacgtaggctgtcagggagtgtttacttcgcctccacttctgttcctccctgccctggtgctgctccaggtcacatactcgtcctgagccggcttcagcctgtccgcgcagaagtctcccggagccatggcctagtactcttatgtgaagtctagcaagctcgtgctcaagggaaccgaggtgaagagctgggtcctgcagctctggtgggagcctcctcagttcttttcggatgcactccacccccgcgaatccggtggaagccgtggtgcagagagccggctttgtggcctcccaggcttcgctctgaccctgtctgggctggacggaggccggaccgcggttcctggcgcctgtgcagagaggggcagcctcccgtgctgacgaccctggaaacaggatagacgggcgggtgacccgtggccccgtacccacgagtttgggtcccctgaggcatctctccaggcctctgcctggcgagatggaaagaaagtatcaaggagtgagctgaagccactgcccttgagaaccctctcgaggagtctgggctcatgaggatgccagaataagtggcagagctaagaagtgacagaatcaggatttaaaatctggaagtgtggctctacaatctgctttgaactttaacataatatgtacaaagcctgaagcaaattctcagcgctgtatttaagagagcatagcaattaagaagaaaaagagcaaagataagaagagaaaaagagaagatgaagaaacccagcttgatacgttggaatctggtgaacagtaacaaactttggtgaaatttcaggaaccatagccattgaaatggatgagggaacctatatacatgcactcgacaatggtctttttaccctgggagctccacacaaagaagaatcgccctgaaatctggctatggaaaatatcttggtataaattcagatgaacttgttgggcattcagatgcaattggaccaagagaacaatgggaaccagtctttcaaaatgggaaaatggctttgttggcctcaaatagctgctttattagatgcaatgaagcaggggacatagaagcaaaaagtaaaacagcaggagaagaagaaatgatcaagattagatcctgtgctgaaaaagaaaccaagaaaaaagatgacattccagaagaagacaaaggaaatgtaaaacaatgtgaaatcaattatgtaaagaaatttcagagcttccaagaccacaaacttaaaataagtaaagaagagagtaaaattcttaaaaaggctcagaaagatggatttttgcatgagacgcttctggacaggtagctatttacttattttcactatttttcagtagccaatagaaatggcatgtagaaaagctatattctcttaaattactgtagttttcacatttttgtctttatttataatttatgagtgtggcaatattacctagagaggacatcatgagtttgggaaaagactgtcaagaaagaatatctaaaaattataaccgattctaagtatatactttaagaaattcaggtttgactgtatctacttcataaatttatcattatctttttataactattagaaccagagttagaaagaagcagtttgactaatataaaaattctgtggattctgttagagtagttcatgttccttaaaataagcatagatcaactaaaaaactaagtataaaagctaaacaagtgaaattgaagcagttttattgtaagatttggaagagtgcaggatgtttatcatagcacattattaatatttattactcttcctatgtagataagtgatgtcctagatttacaacatagaaaaacaggtagagacgtttagctgtgagtgtacaagtataaatcaattaagtgccagattttgataatcaccagctgctcattcaagtcctatgttgcaaagttacttttaccctttatttacattacttgataaaggcaatgtttaattacatatttcctgttaactagctggtagagttcatacctaaagtcagtaaataatgttaagaattttttccagctgagcaaatgaatatgtatctagttgtaagaaatcaagaagaggatataaaatataatcaggatgtggactctaaaacggaataagctctgtgtcctgtaacttttttcacttgtaataatacagcattctcccctgttaaatggaaacttagagcacccttaaattctggaataattaaaattgctatttagattgaaaagcccttaggcaacatttattgaatattaggaaataacttttataagattagaatccactttatagaaacgaaatttaaaagtatacatgttttaatataagtgttgtggtaatacaataaccaaaattgaacacacagttttaaagctttttatatttagtagcagttgaatatatatggcatgttttacatagattaattttactatttttctttgtttaaacaagagaaccaaattgaaagccgacagatactgcagatgactggaatttttgtttctgtcttatctttttgtgttttttttctgaataaaatattcagaggaaatgcttttacagagttaaaaagt

SEQ ID NO: 25312 - DNA, 2492 bp, Homo sapiens
gcagaaacctggaagtggaaatctcgggcattcaccgtttgggtgaagacggaggcgggttctggacagacgtaggctgtcagggagtgtttacttcgcctccacttctgttcctccctgccctggtgctgctccaggtcacatactcgtcctgagccggcttcagcctgtccgcgcagaagtctcccggagccatggcctagtactcttatgtgaagtctagcaagctcgtgctcaagggaaccgaggtgaagagctgggtcctgcagctctgatttgcctgaggttgactgtacatacaaatattgagcatttcctcctggcctccgtgataaacaggggttttgatattgttaggcgagatggaaagaaagtatcaaggagtgagctgaagccactgcccttgagaaccctctcgaggagtctgggctcatgaggatgccagaataagtggcagagctaagaagtgacagaatcaggatttaaaatctggaagtgtggctctacaatctgctttgaactttaacataatatgtacaaagcctgaagcaaattctcagcgctgtatttaagagagcatagcaattaagaagaaaaagagcaaagataagaagagaaaaagagaagatgaagaaacccagcttgatacgttggaatctggtgaacagtaacaaactttggtgaaatttcaggaaccatagccattgaaatggatgagggaacctatatacatgcactcgacaatggtctttttaccctgggagctccacacaaagaagaatcgccctgaaatctggctatggaaaatatcttggtataaattcagatgaacttgttgggcattcagatgcaattggaccaagagaacaatgggaaccagtctttcaaaatgggaaaatggctttgttggcctcaaatagctgctttattagatgcaatgaagcaggggacatagaagcaaaaagtaaaacagcaggagaagaagaaatgatcaagattagatcctgtgctgaaaaagaaaccaagaaaaaagatgacattccagaagaagacaaaggaaatgtaaaacaatgtgaaatcaattatgtaaagaaatttcagagcttccaagaccacaaacttaaaataagtaaagaagagagtaaaattcttaaaaaggctcagaaagatggatttttgcatgagacgcttctggacaggtagctatttacttattttcactatttttcagtagccaatagaaatggcatgtagaaaagctatattctcttaaattactgtagttttcacatttttgtctttatttataatttatgagtgtggcaatattacctagagaggacatcatgagtttgggaaaagactgtcaagaaagaatatctaaaaattataaccgattctaagtatatactttaagaaattcaggtttgactgtatctacttcataaatttatcattatctttttataactattagaaccagagttagaaagaagcagtttgactaatataaaaattctgtggattctgttagagtagttcatgttccttaaaataagcatagatcaactaaaaaactaagtataaaagctaaacaagtgaaattgaagcagttttattgtaagatttggaagagtgcaggatgtttatcatagcacattattaatatttattactcttcctatgtagataagtgatgtcctagatttacaacatagaaaaacaggtagagacgtttagctgtgagtgtacaagtataaatcaattaagtgccagattttgataatcaccagctgctcattcaagtcctatgttgcaaagttacttttaccctttatttacattacttgataaaggcaatgtttaattacatatttcctgttaactagctggtagagttcatacctaaagtcagtaaataatgttaagaattttttccagctgagcaaatgaatatgtatctagttgtaagaaatcaagaagaggatataaaatataatcaggatgtggactctaaaacggaataagctctgtgtcctgtaacttttttcacttgtaataatacagcattctcccctgttaaatggaaacttagagcacccttaaattctggaataattaaaattgctatttagattgaaaagcccttaggcaacatttattgaatattaggaaataacttttataagattagaatccactttatagaaacgaaatttaaaagtatacatgttttaatataagtgttgtggtaatacaataaccaaaattgaacacacagttttaaagctttttatatttagtagcagttgaatatatatggcatgttttacatagattaattttactatttttctttgtttaaacaagagaaccaaattgaaagccgacagatactgcagatgactggaatttttgtttctgtcttatctttttgtgttttttttctgaataaaatattcagaggaaatgcttttacagagttaaaaagt

SEQ ID NO: 25313 - DNA, 2180 bp, Homo sapiens
gcagaaacctggaagtggaaatctcgggcattcaccgtttgggtgaagacggaggcgggttctggacagacgtaggctgtcagggagtgtttacttcgcctccacttctgttcctccctgccctggtgctgctccaggtcacatactcgtcctgagccggcttcagcctgtccgcgcagaagtctcccggagccatggcctagtactcttatgtgaagtctagcaagctcgtgctcaagggaaccgaggtgaagagctgggtcctgcagctctgtaagaagaaaaagagcaaagataagaagagaaaaagagaagatgaagaaacccagcttgatacgttggaatctggtgaacagtaacaaactttggtgaaatttcaggaaccatagccattgaaatggatgagggaacctatatacatgcactcgacaatggtctttttaccctgggagctccacacaaagaagaatcgccctgaaatctggctatggaaaatatcttggtataaattcagatgaacttgttgggcattcagatgcaattggaccaagagaacaatgggaaccagtctttcaaaatgggaaaatggctttgttggcctcaaatagctgctttattagatgcaatgaagcaggggacatagaagcaaaaagtaaaacagcaggagaagaagaaatgatcaagattagatcctgtgctgaaaaagaaaccaagaaaaaagatgacattccagaagaagacaaaggaaatgtaaaacaatgtgaaatcaattatgtaaagaaatttcagagcttccaagaccacaaacttaaaataagtaaagaagagagtaaaattcttaaaaaggctcagaaagatggatttttgcatgagacgcttctggacaggtagctatttacttattttcactatttttcagtagccaatagaaatggcatgtagaaaagctatattctcttaaattactgtagttttcacatttttgtctttatttataatttatgagtgtggcaatattacctagagaggacatcatgagtttgggaaaagactgtcaagaaagaatatctaaaaattataaccgattctaagtatatactttaagaaattcaggtttgactgtatctacttcataaatttatcattatctttttataactattagaaccagagttagaaagaagcagtttgactaatataaaaattctgtggattctgttagagtagttcatgttccttaaaataagcatagatcaactaaaaaactaagtataaaagctaaacaagtgaaattgaagcagttttattgtaagatttggaagagtgcaggatgtttatcatagcacattattaatatttattactcttcctatgtagataagtgatgtcctagatttacaacatagaaaaacaggtagagacgtttagctgtgagtgtacaagtataaatcaattaagtgccagattttgataatcaccagctgctcattcaagtcctatgttgcaaagttacttttaccctttatttacattacttgataaaggcaatgtttaattacatatttcctgttaactagctggtagagttcatacctaaagtcagtaaataatgttaagaattttttccagctgagcaaatgaatatgtatctagttgtaagaaatcaagaagaggatataaaatataatcaggatgtggactctaaaacggaataagctctgtgtcctgtaacttttttcacttgtaataatacagcattctcccctgttaaatggaaacttagagcacccttaaattctggaataattaaaattgctatttagattgaaaagcccttaggcaacatttattgaatattaggaaataacttttataagattagaatccactttatagaaacgaaatttaaaagtatacatgttttaatataagtgttgtggtaatacaataaccaaaattgaacacacagttttaaagctttttatatttagtagcagttgaatatatatggcatgttttacatagattaattttactatttttctttgtttaaacaagagaaccaaattgaaagccgacagatactgcagatgactggaatttttgtttctgtcttatctttttgtgttttttttctgaataaaatattcagaggaaatgcttttacagagttaaaaagt

SEQ ID NO: 25314 - DNA, 2445 bp, Homo sapiens
gcagaaacctggaagtggaaatctcgggcattcaccgtttgggtgaagacggaggcgggttctggacagacgtaggctgtcagggagtgtttacttcgcctccacttctgttcctccctgccctggtgctgctccaggtcacatactcgtcctgagccggcttcagcctgtccgcgcagaagtctcccggagccatggcctagtactcttatgtgaagtctagcaagctcgtgctcaagggaaccgaggtgagcgagatggaaagaaagtatcaaggagtgagctgaagccactgcccttgagaaccctctcgaggagtctgggctcatgaggatgccagaataagtggcagagctaagaagtgacagaatcaggatttaaaatctggaagtgtggctctacaatctgctttgaactttaacataatatgtacaaagcctgaagcaaattctcagcgctgtatttaagagagcatagcaattaagaagaaaaagagcaaagataagaagagaaaaagagaagatgaagaaacccagcttgatacgttggaatctggtgaacagtaacaaactttggtgaaatttcaggaaccatagccattgaaatggatgagggaacctatatacatgcactcgacaatggtctttttaccctgggagctccacacaaagaagttgatgagggccctagtcctccagagcagtttatggctgtcaaattatctgattccagaatcgccctgaaatctggctatggaaaatatcttggtataaattcagatgaacttgttgggcattcagatgcaattggaccaagagaacaatgggaaccagtctttcaaaatgggaaaatggctttgttggcctcaaatagctgctttattagatgcaatgaagcaggggacatagaagcaaaaagtaaaacagcaggagaagaagaaatgatcaagattagatcctgtgctgaaaaagaaaccaagaaaaaagatgacattccagaagaagacaaaggaaatgtaaaacaatgtgaaatcaattatgtaaagaaatttcagagcttccaagaccacaaacttaaaataagtaaagaagagagtaaaattcttaaaaaggctcagaaagatggatttttgcatgagacgcttctggacaggtagctatttacttattttcactatttttcagtagccaatagaaatggcatgtagaaaagctatattctcttaaattactgtagttttcacatttttgtctttatttataatttatgagtgtggcaatattacctagagaggacatcatgagtttgggaaaagactgtcaagaaagaatatctaaaaattataaccgattctaagtatatactttaagaaattcaggtttgactgtatctacttcataaatttatcattatctttttataactattagaaccagagttagaaagaagcagtttgactaatataaaaattctgtggattctgttagagtagttcatgttccttaaaataagcatagatcaactaaaaaactaagtataaaagctaaacaagtgaaattgaagcagttttattgtaagatttggaagagtgcaggatgtttatcatagcacattattaatatttattactcttcctatgtagataagtgatgtcctagatttacaacatagaaaaacaggtagagacgtttagctgtgagtgtacaagtataaatcaattaagtgccagattttgataatcaccagctgctcattcaagtcctatgttgcaaagttacttttaccctttatttacattacttgataaaggcaatgtttaattacatatttcctgttaactagctggtagagttcatacctaaagtcagtaaataatgttaagaattttttccagctgagcaaatgaatatgtatctagttgtaagaaatcaagaagaggatataaaatataatcaggatgtggactctaaaacggaataagctctgtgtcctgtaacttttttcacttgtaataatacagcattctcccctgttaaatggaaacttagagcacccttaaattctggaataattaaaattgctatttagattgaaaagcccttaggcaacatttattgaatattaggaaataacttttataagattagaatccactttatagaaacgaaatttaaaagtatacatgttttaatataagtgttgtggtaatacaataaccaaaattgaacacacagttttaaagctttttatatttagtagcagttgaatatatatggcatgttttacatagattaattttactatttttctttgtttaaacaagagaaccaaattgaaagccgacagatactgcagatgactggaatttttgtttctgtcttatctttttgtgttttttttctgaataaaatattcagaggaaatgcttttacagagttaaaaagt

SEQ ID NO: 25315 - DNA, 1149 bp, Homo sapiens
  misc_feature (1090)..(1090): n is a, c, g, or t
  misc_feature (1095)..(1095): n is a, c, g, or t
  misc_feature (1127)..(1127): n is a, c, g, or t
gcagaaacctggaagtggaaatctcgggcattcaccgtttgggtgaagacggaggcgggttctggacagacgtaggctgtcagggagtgtttacttcgcctccacttctgttcctccctgccctggtgctgctccaggtcacatactcgtcctgagccggcttcagcctgtccgcgcagaagtctcccggagccatggcctagtactcttatgtgaagtctagcaagctcgtgctcaagggaaccgaggtgaagagctgggtcctgcagctctggtgggagcctcctcagttcttttcggatgcactccacccccgcgaatccggtggaagccgtggtgcagagagccggctttgtggcctcccaggcttcgctctgaccctgtctgggctggacggaggccggaccgcggttcctggcgcctgtgcagagaggggcagcctcccgtgctgacgaccctggaaacaggatagacgggcgggtgacccgtggccccgtacccacgagtttgggtcccctgaggcatctctccaggcctctgcctgtaagaagaaaaagagcaaagataagaagagaaaaagagaagatgaagaaacccagcttgatacgttggaatctggtgaacagtaacaaactttggtgaaatttcaggaaccatagccattgaaatggatgagggaacctatatacatgcactcgacaatggtctttttaccctgggagctccacacaaagaagaatcgccctgaaatctggctatggaaaatatcttggtataaattcagatgaacttgttgggcattcagatgcaattggaccaagagaacaatgggaaccagtctttcaaaattttgaccagaccattaatttgattttggatgaaagccatgaacgagtattcagctcttcacagggggtagaacaagtggtactaggattatacattgtaagaggtgacaacgttgcagtcattggagaaatcgatgaagaaacagattctgcgcttgatttggggaatattcgagcagaacctttaaattctgtagcacactgaggaaaaactacatacttggacatctgtaaatctttgnacagnaactgattattctgaggatgatatatggagtntttatgagtgtgtcactggatt

SEQ ID NO: 25316 - DNA, 1355 bp, Homo sapiens
gcagaaacctggaagtggaaatctcgggcattcaccgtttgggtgaagacggaggcgggttctggacagacgtaggctgtcagggagtgtttacttcgcctccacttctgttcctccctgccctggtgctgctccaggtcacatactcgtcctgagccggcttcagcctgtccgcgcagaagtctcccggagccatggcctagtactcttatgtgaagtctagcaagctcgtgctcaagggaaccgaggtgaagagctgggtcctgcagctctggtgggagcctcctcagttcttttcggatgcactccacccccgcgaatccggtggaagccgtggtgcagagagccggctttgtggcctcccaggcttcgctctgaccctgtctgggctggacggaggccggaccgcggttcctggcgcctgtgcagagaggggcagcctcccgtgctgacgaccctggaaacaggatagacgggcgggtgacccgtggccccgtacccacgagtttgggtcccctgaggcatctctccaggcctctgcctgtaagaagaaaaagagcaaagataagaagagaaaaagagaagatgaagaaacccagcttgatacgttggaatctggtgaacagtaacaaactttggtgaaatttcaggaaccatagccattgaaatggatgagggaacctatatacatgcactcgacaatggtctttttaccctgggagctccacacaaagaagaatcgccctgaaatctggctatggaaaatatcttggtataaattcagatgaacttgttgggcattcagatgcaattggaccaagagaacaatgggaaccagtctttcaaaatgggaaaatggctttgttggcctcaaatagctgctttattagatgcaatgaagcaggggacatagaagcaaaaagtaaaacagcaggagaagaagaaatgatcaagctctcctaatctctgtcagcccttcatctttatgaccttgccttgtctaccagaacacacatccctcttactaaagattagatcctgtgctgaaaaagaaaccaagaaaaaagatgacattccagaagaagacaaaggaaatgtaaaacaatgtgaaatcaattatgtaaagaaatttcagagcttccaagaccacaaacttaaaataagtaaagaagagagtaaaattcttaaaaaggctcagaaagatggatttttgcatgagacgcttctggacagagaaccaaattgaaagccgacagatactgcagatgactggaatttttgtttctgtcttatctttttgtgttttttttctgaataaaatattcagaggaaatgcttttacagagttaaaaagt

SEQ ID NO: 25317 - DNA, 758 bp, Homo sapiens
ggacgcgtgggtgacccacgcgtcggaaaaagagaagagtgaagaaatccagcttgatacgttggaatctggtgaacagtaacaaactttggtgaaatttcaggaaccatagccattgaaatggatgagggaacctatatacatgcactcgacaatggtctttttaccctgggagctccacacaaagaagaatcgccctgaaatctggctatggaaaatatcttggtataaattcagatgaacttgttgggcattcagatgcaattggaccaagagaacaatgggaaccagtctttcaaaatgggaaaatggctttgttggcctcaaatagctgctttattagatgcaatgaagcaggggacatagaagcaaaaagtaaaacagcaggagaagaagaaatgatcaagattagatcctgtgctgaaaaagaaaccaagaaaaaagatgacattccagaagaagacaaaggaaatgtaaaacaatgtgaaatcaattatgtaaagaaatttcagagcttccaagaccacaaacttaaaataagtaaagaagagagtaaaattcttaaaaaggctcagaaagatggatttttgcatgagacgcttctggacagacgaagctggaactgtactgatgacatctcgagattcactggaaagcatccatgactgaatactactgccactcagacctgccgagatgactgacaaagaagagaacacgccaaacaagcatgacttggtacagcaatataaaaagga

SEQ ID NO: 25318 - DNA, 1628 bp, Homo sapiens
gcagaaacctggaagtggaaatctcgggcattcaccgtttgggtgaagacggaggcgggttctggacagacgtaggctgtcagggagtgtttacttcgcctccacttctgttcctccctgccctggtgctgctccaggtcacatactcgtcctgagccggcttcagcctgtccgcgcagaagtctcccggagccatggcctagtactcttatgtgaagtctagcaagctcgtgctcaagggaaccgaggtgaagagctgggtcctgcagctctggtgggagcctcctcagttcttttcggatgcactccacccccgcgaatccggtggaagccgtggtgcagagagccggctttgtggcctcccaggcttcgctctgaccctgtctgggctggacggaggccggaccgcggttcctggcgcctgtgcagagaggggcagcctcccgtgctgacgaccctggaaacaggatagacgggcgggtgacccgtggccccgtacccacgagtttgggtcccctgaggcatctctccaggcctctgcctgtaagaagaaaaagagcaaagataagaagagaaaaagagaagatgaagaaacccagcttgatacgttggaatctggtgaacagtaacaaactttggtgaaatttcaggaaccatagccattgaaatggatgagggaacctatatacatgcactcgacaatggtctttttaccctgggagctccacacaaagaagaatcgccctgaaatctggctatggaaaatatcttggtataaattcagatgaacttgttgggcattcagatgcaattggaccaagagaacaatgggaaccagtctttcaaaatgggaaaatggctttgttggcctcaaatagctgctttattagatgcaatgaagcaggggacatagaagcaaaaagtaaaacagcaggagaagaagaaatgatcaagattagatcctgtgctgaaaaagaaaccaagaaaaaagatgacattccagaagaagacaaaggaaatgtaaaacaatgtgaaatcaattatgtaaagaaatttcagagcttccaagaccacaaacttaaaataagtaaagaagagagtaaaattcttaaaaaggctcagaaagatggatttttgcatgagacgcttctggacaggccgaagctggactgtactgctgccatctcggctcactgcaacctccctgcctgattctcctgcctcagcctgccgagtgcctgccattgcaggcacacgccaccacgcctgactggtcttcgtatttttttggtggagacggggttttgctgtgttggccgggctggtctccagctcctaaccgcgagtgatctgccagcctcggcctccggaggtgccgggattgcagacggtgtctggttcactcagtgctcaatggtgcccaggctggagtgcagtggcgtgatcttggctcgctacaacctccacctcccagccacctgccttggcctcccaaagtgctgagagtgcagcctctgcccggccgccaccccgtctgggaagtgaggagcgtctctgcctggccgcccatcgcctgggacgtgaggagtccctctgcctggctgcccagtctggaaagtgaggagcgt

SEQ ID NO: 25319 - DNA, 1279 bp, Homo sapiens
gcagaaacctggaagtggaaatctcgggcattcaccgtttgggtgaagacggaggcgggttctggacagacgtaggctgtcagggagtgtttacttcgcctccacttctgttcctccctgccctggtgctgctccaggtcacatactcgtcctgagccggcttcagcctgtccgcgcagaagtctcccggagccatggcctagtactcttatgtgaagtctagcaagctcgtgctcaagggaaccgaggtgaagagctgggtcctgcagctctggtgggagcctcctcagttcttttcggatgcactccacccccgcgaatccggtggaagccgtggtgcagagagccggctttgtggcctcccaggcttcgctctgaccctgtctgggctggacggaggccggaccgcggttcctggcgcctgtgcagagaggggcagcctcccgtgctgacgaccctggaaacaggatagacgggcgggtgacccgtggccccgtacccacgagtttgggtcccctgaggcatctctccaggcctctgcctgtaagaagaaaaagagcaaagataagaagagaaaaagagaagatgaagaaacccagcttgatacgttggaatctggtgaacagtaacaaactttggtgaaatttcaggaaccatagccattgaaatggatgagggaacctatatacatgcactcgacaatggtctttttaccctgggagctccacacaaagaagaatcgccctgaaatctggctatggaaaatatcttggtataaattcagatgaacttgttgggcattcagatgcaattggaccaagagaacaatgggaaccagtctttcaaaatgggaaaatggctttgttggcctcaaatagctgctttattagatgcaatgaagcaggggacatagaagcaaaaagtaaaacagcaggagaagaagaaatgatcaagattagatcctgtgctgaaaaagaaaccaagaaaaaagatgacattccagaagaagacaaaggaaatgtaaaacaatgtgaaatcaattatgtaaagaaatttcagagcttccaagaccacaaacttaaaataagtaaagaagagagtaaaattcttaaaaaggctcagaaagatggatttttgcatgagacgcttctggacagagaaccaaattgaaagccgacagatactgcagatgactggaatttttgtttctgtcttatctttttgtgttttttttctgaataaaatattcagaggaaatgcttttacagagttaaaaagt

SEQ ID NO: 25320 - DNA, 2115 bp, Homo sapiens
tcccggagccgacttctgagagtcgagtactcctatgtgaagactaccaagctcgtgttcaagggaaccaaggcgaagagagctaagaagtgacagaatcaggatttaaaatctggaagtgtggctctacaatctgctttgaactttaacataatatgtacaaagcctgaagcaaattctcagcgctgtatttaagagagcatagcaattaagaagaaaaagagcaaagataagaagagaaaaagagaagatgaagaaacccagcttgatacgttggaatctggtgaacagtaacaaactttggtgaaatttcaggaaccatagccattgaaatggatgagggaacctatatacatgcactcgacaatggtctttttaccctgggagctccacacaaagaagaatcgccctgaaatctggctatggaaaatatcttggtataaattcagatgaacttgttgggcattcagatgcaattggaccaagagaacaatgggaaccagtctttcaaaatgggaaaatggctttgttggcctcaaatagctgctttattagatgcaatgaagcaggggacatagaagcaaaaagtaaaacagcaggagaagaagaaatgatcaagattagatcctgtgctgaaaaagaaaccaagaaaaaagatgacattccagaagaagacaaaggaaatgtaaaacaatgtgaaatcaattatgtaaagaaatttcagagcttccaagaccacaaacttaaaataagtaaagaagagagtaaaattcttaaaaaggctcagaaagatggatttttgcatgagacgcttctggacaggtagctatttacttattttcactatttttcagtagccaatagaaatggcatgtagaaaagctatattctcttaaattactgtagttttcacatttttgtctttatttataatttatgagtgtggcaatattacctagagaggacatcatgagtttgggaaaagactgtcaagaaagaatatctaaaaattataaccgattctaagtatatactttaagaaattcaggtttgactgtatctacttcataaatttatcattatctttttataactattagaaccagagttagaaagaagcagtttgactaatataaaaattctgtggattctgttagagtagttcatgttccttaaaataagcatagatcaactaaaaaactaagtataaaagctaaacaagtgaaattgaagcagttttattgtaagatttggaagagtgcaggatgtttatcatagcacattattaatatttattactcttcctatgtagataagtgatgtcctagatttacaacatagaaaaacaggtagagacgtttagctgtgagtgtacaagtataaatcaattaagtgccagattttgataatcaccagctgctcattcaagtcctatgttgcaaagttacttttaccctttatttacattacttgataaaggcaatgtttaattacatatttcctgttaactagctggtagagttcatacctaaagtcagtaaataatgttaagaattttttccagctgagcaaatgaatatgtatctagttgtaagaaatcaagaagaggatataaaatataatcaggatgtggactctaaaacggaataagctctgtgtcctgtaacttttttcacttgtaataatacagcattctcccctgttaaatggaaacttagagcacccttaaattctggaataattaaaattgctatttagattgaaaagcccttaggcaacatttattgaatattaggaaataacttttataagattagaatccactttatagaaacgaaatttaaaagtatacatgttttaatataagtgttgtggtaatacaataaccaaaattgaacacacagttttaaagctttttatatttagtagcagttgaatatatatggcatgttttacatagattaattttactatttttctttgtttaaacaagagaaccaaattgaaagccgacagatactgcagatgactggaatttttgtttctgtcttatctttttgtgttttttttctgaataaaatattcagaggaaatgcttttacagagttaaaaagt

SEQ ID NO: 25321 - DNA, 398 bp, Homo sapiens
aaaatcgaaaaacatttttctgaatctttttctttagttcctagagtttgattcactatactgcagaaagggtaatcatctctcctttcaaaaactggagagttgggggtggaaccaagatggcagaataggaacagctccagtctacagctccctgcatgagcgacgcagaagacgaacgatttctgcagttccaactgaggtaccgggtgtatctcactggggattgtcggacagtgggtgcaggacagtgggtccagcgcaccgagcgtgagccgaagcagggcgaggcattgcctcacccaggaagtgcaaggggttggggagttccctttcctagggatgacggatggcacctggaaaatcgggtcactcccaccctaatactgcgcttttct

SEQ ID NO: 25322 - DNA, 294 bp, Homo sapiens
cctccctgctccccctctccccatgcctgggggcaattgtttaaagtcattttgttcccaaccagctgtctcaccctttgccttcttgttcctagaatttgggtttgtttgtttgttttttcgagatagggtctctctctttcacccaggctggaatgcagtggcttgatttcagctcactgcagcctctaccgctgaggcaggagaatggcgtgaacccgggaggcggagcttgcagtgagtggagatcgtgccactgcactccagcctgggcgacgaccgagacgccgtctc

SEQ ID NO: 25323 - DNA, 455 bp, Homo sapiens
aaaagaaaaacaagaagctgagggctgacattccaagactgtaactctaaggaacacaagtccttcataaccagcaaggatcccactccctctataaaaagcctgccaggaggccaagccaggagcgtaagccactgatagggctgtgtctctacccaaatctcattttgaattgtagttcccataatctccatgtgtcatgggagggacctggggggaggtaattgaatcatgggggcagtttccaccatcctgttcttgtgacagtgagttctcacgagatctgatggttttacaaggggcttttccccctttgctctgcacttctccttgctgccaccatgtgaaggatgtgtttgcttccccttccaccatgattgtaagtttcctgaggcctccccagccatgctgaactgtgagtcaattaaacctcttttctttatattaaaaaaaaa

SEQ ID NO: 25324 - DNA, 539 bp, Homo sapiens
ggggtttcaccatgttggccaggctagtctcgaactcctgacctcaggttatcctcccacctcagcctcccaaagtgctgggattacaggtgtaagccactgtacctggcccaaatagattttatttttagaacagtttttgtttcacaacaaaactaaacagaaagtacagaatttccatatccccctcccccgctgtggacatcccccacttgctacagatgacccacctgtgtggacagaccaccatcacccagatgccgtcgtttacattagggttcactcttgctgtggtacactctggattcggacaagtgtgtgttgacaagtatccaccactgtggtgtcatggagtatttaccctgccctaaacatgctctgttctccgcctgttcatccctcgttctccctagcccctgacaccactgatcttttatctttttttttgagatggagtcttgctcttgtcgcccaggctggagtgcaatggcacaatctcagcccactgcaacctctgcctcctggtttcaagtgattct

SEQ ID NO: 25325 - DNA, 129 bp, Homo sapiens
ctggccagagagctgtgtctgaatgtctaagacttggttggatttaaggaactctggcaatgccactggtgatcacttctgttaacctcattctttaaaattgtggtaaaacatacataatataacact

SEQ ID NO: 25326 - DNA, 694 bp, Homo sapiens
  misc_feature (638)..(638): n is a, c, g, or t
  misc_feature (688)..(693): n is a, c, g, or t
gagtggggaaaccccaaggaattctgtaaccttaaaataaactgagattcattagtgcagaaacacagaaagctgtcttctgagtctcggaaactaagattttagatgaagttaattttcttataaaagaatacaatattattgtaaataatttagagattgcatataagacaaagaagaaaataaaatgagctatatccgttcctccagccatcaacaccttccacatttgtggcacatcctttcaggatgtatgtgtgtgtgtgggaggggggtgcttacctgtgtgtagtaacttcatgttatacatatgcctttttccctcaagggtgaccactgttgttgcccaggctggagtgcaatggcgcgatcttggctcaccgcaacctctgcctcctggattcaagcgattctgctgcctcagcctcccaagtagctgggattacaggtgcccactaccacacctggctaatttttttgtatttttaatagaaacagggtttcaccatgttggtcaggctggtctcgaactcctgaactcatgtgatctgcccccccctcacccgccccttggcctcccaaagtgctaggattacaggcgtgggccatgacctgctttttattatcaatctataatnatatgtattgttcctatatcattaaatattctcctttgacatttctaaannnnnna

SEQ ID NO: 25327 - DNA, 451 bp, Homo sapiens
gaactaacaaaaatagactatctccattcccagacttaccatatccgttagctctccctttagcactaggacaggagccatgcatccttcccttccttagtttgtccctcagttagaaatgcagctagaatcttgtggtgaagagcaatcgtcgtcctggttttcagggcctctgctgggatactacatgcgtaataccctcaataagattgcagctatgcaaatttcaaaagacaaaagtggagtttctaagcttcctcactctagtggagtattcagatactttgatcacctgctatttcgagccctccagaacatcaaattgtcttctactaaaggaaggtttccatgaacctgctgagaaaaggtagcatcttctataaaggttatcaaaaacagaaatttctctgcaaaaatcttacctcaatcttatgaagaccaagaaaaaaaa

SEQ ID NO: 25328 - DNA, 848 bp, Homo sapiens
tgatattggtattacagagtaacagcctttgttaattagaaaactggatttgcatatattaaattttaattcctggtgctttgtcttttgtttttgctgttttgggttttagaactactttatatcctgcgaaattgtgttagatttggattattaaattgataaatttttaccatattatgggaagcatttctgatctcattagaaaccatacatattctcagctgcccaggttttactgattttattttctcattaaagacaaacttctgttttaaggaacttgggaaagttgatatgaatttctaatttaatgtattaggtcattaaaataatttttgagttcccttagacacatacaggcttttcatttttttcaaaagtaccctccttaaagtctgtaacagttaacatttttgagtacctttgcccaggtacgttgcaggcaggggtggagtgggggcatgcattggtcgagtcacatatcattactgtatttagtttggggagtatacagaaacttaaggtttttttgtttttgtttttgtttttgtttttgttttaaagaataccgtagcagtaggcaggacagttccaattcaacaaaaacctctttaccctggcactcaaaactgtaatgatgatgaactggtaagcatttttctgttttcagatgttcaacatcaaaatgagaaaagcactaacacttgatttaaaaataattgattgctagtatttctctaattttcatcttgaagttcattactgaactgttgttaagtcttatcagaattatgccagattagactcatagtcaaaatgtcctgttaaaaactgggaaaatcaga

SEQ ID NO: 25329 - DNA, 389 bp, Homo sapiens
gaaaaactttagtaagattggggctcaaaattattgtacacagatcaacagcttttatatatgcaaacagtaacccatcagaagatgtagtaaggaaagaccatatttataagaacaacaaaagttaaattattttgttataaacctaacatatcattaagcctcatgaattaaaataatatagcattagatcatgaaaacatatattaacagaacagattaaaaaaacagaaacagacacaaatgcatacagagatttagaatatttaaaaagtagcatttgaaatcagtgtagaaaagacaagttatttcttacatggcattgatataactgggatatcctctgtaatggagttggatccattcactaagataaaataatatatttc

SEQ ID NO: 25330 - DNA, 433 bp, Homo sapiens
tgtctaccatcgaaggcactgacctctactcacctgcgcttcagagggctgggttcttccctttcccaatgaagttgccaaaccaaggttgaaacattactgggttaataaagaaaagaaaacccaatagaaaagaataagagccaggagtggtctctcacacctgtaatcctaacactttgggaggccgaggtgggcggatcaccacctgaggtcaggagttcaagaccagcctggccaacatggtgaaaccctgtctctattaaaatacaaaaattagccgggcatgatggcaggtgcctgtaatcccagctactcaggaggctgagacgggagaattgcttaaacctggaagacggaggttgcagtgagccaagatcgcaccactacactccagcctgggtggctgagtgagactctgtctcaaaaaaaa

SEQ ID NO: 25331 - DNA, 412 bp, Homo sapiens
aaaaaaaaaaaaaaagccttgagcaccaaaggaccaaagacctgatagaaaaaatggggaaaagacataaatggacaactcacaaacaatgaaaattgggccttaagcacataaaaagttttaagttcatacagagaaataagctcacgcctgtaatcccaacactttgggaggccaaggtgggtggatcacctgaggtttctcaacctcgagaccagcctgaccaacatggagaaaccccgtctttactaaaaatacaaaaattagccaggcgtggtggtgggcgcctgtaatcccagctacttgggaggctgaggcaggagaatcgcttgaactcgggaggcagaggttacgacgagccaagatcgcgccattgcactccagcctgggcaacaagaatgaaacttcatct

SEQ ID NO: 25332 - DNA, 561 bp, Homo sapiens
tggccaggctggtcttgaactcctggcctcaagtgatccacccctctcagcctcccagagtgctgggattacaggcatgagcaccatgcctgacctggaaattttaaattatatttttcctatatttctacctgattctctgacctcagcagaatcttctttattaatacagttatggaaatggaatgaggaggaggtgattgctgtatgaagatcttacaagactaaggctaaaagagattaacatcaaaatacatattaccatggagcacatgaatatagtgaataaaaatttgttcatcaaagcctgctacagtataaaacattgcttgaaatttgaaagaaatgattttagaacaaataaatggtcatgattatacaccatgcacactcaagcacacacaacaatatacatgtagaaatagatgtatctgtatgtgagtttatgtactatatatgtgtgtatttcttaaccttctcttctgaagagcctagaagcaatgacaaccctagggaatactccaagtacccaaatattggtttctgagtctcttcctccac

SEQ ID NO: 25333 - DNA, 491 bp, Homo sapiens
aatgtgtttggggcggcccgctttgcctgctggagggtgttaacacttagcttgcttttcggcgtattctgatttagctttgggagagctaactttattggtcttaggtgttcagtgctacctggcccactgcttgtctgtttgtgacttttaagtcagaaactggagatggtaagatccgataatttccctaacttaatacatcgcggtccctctcactagcaactcctaggtatgtgacaaagttgggatgtttatcaacggtccgcctcctggctagggaaagagctctggggcggagaatgcactttctgttttttgaaaacaacctcattttgtgcccttaaaagccactggggatgacggatccaggattgtgggtggaggtagtgggtttttcatcccctgactatggggccaacttctgccagccattgttttttctaataaagattgtgtggttcctttttaaaaaatttcccctgcgctta

SEQ ID NO: 25334 - DNA, 618 bp, Homo sapiens
gtgaatggacacttaggttgattccaaatcttagctcttgtgaacagtgctgcagtaaacatgggagcagagatatctcattgatgtactgatttcttttcttttgggcatatacctagcagtgggattgctggatcatatgatagctctatttttagttttttcaggaacttccaaactgttctctttcagccatatgaagtgaaaaccatgctctgtaagtgctcacctgacttttagttcctgtgaaactgctgcttttgtgtggatagttgccaatcttagtcttcctgcggggggagtgggtatgatcggtggtgttctctattccaccatcttgctccacccatcctaaaaatgttttcttaggaaactcataacataatgaacaacataggttgataaagtatataaaaagataaactgtacaaacattaatcaaaacagagtgacactattaatatcaaatacagtagactccagagcaaagaaaattattagacaaaaggaacattatataatgataaaaggatcaatccaacaaaaatgcaatgatcctaaatgtgtctctagcaaacctcaaagtacacaaaacaaaactgattgagctgaaaagag

SEQ ID NO: 25335 - DNA, 453 bp, Homo sapiens
tccacccgcctcagcttcccaaagtgctgggattacaggcatgagtcaccatgcctagcctacaatttgacgtattttaagaggagcgttacttttctacatgtgtcccttagaatggaatgaatctgaggtaagcaatagagccaagaggaccagttaggataacatataataatccaagtgaaaattctgaggctctgacttagtaacaggaggaatggaaagaagaggggcatgtggcagccacagaggtgcactcgggtttgccttcaagaaaggacttgttaaatcccaaggagtacagttccccaacctcctctagtggtaatgttctgggcatctgccattgcactggaattgagtttccactcaccccatgtagccctaagccaatggctgcacatggccacaacactaggatttagccgttcttgtccaactttgttctcgtct

SEQ ID NO: 25336 - DNA, 405 bp, Homo sapiens
aaaaaaaaaaaagagagagagagaaatccttatcttttatggtggaagtcaataaaaaaagtctgcaatgaaaaatagatcagagcctttaaatatgaaggtaaattttgaaaatagaggccgggcgcggtggctcacgcctataatcccagcactttgggaggccgaggcaggcggatcttgaggtcaggagatcgagaccatcctggctaacacagtgaaaccccatctctactaaaaaatacaaaaaaatagccacgcgtgttggcgggtgcctgtagtcccagctacttaggaggctgaggcaggagaatggcatgaacccaggaggcggagcttgcagtgagccaagatcatgccactgcactccagcctgggtgacagagcgagactccatctcaaaaa

SEQ ID NO: 25337 - DNA, 2417 bp, Homo sapiens
atctaggctcagttatgtttactaacatgaatcttacttaacagcatgaggcaagatctacgctcaagatggcgctgctcgcgatgcattcttggcgctgggcggccgcggcggctgctttcgaaaagcgccggcactccgcgattctgatccggcctttagtctctgttagcggctcaggtccgcagtggaggccacatcaactcggcgccttgggaaccgctcgagcctaccagattccagagtcattaaaaagtatcacatggcagagattgggaaaaggcaattcaggacagttcttagatgctgcaaaggctctccaggtatggccactgatagaaaagaggacatgttggcatggtcatgcaggaggaggactccacacagacccaaaagaagggttaaaagatgttgatactcggaaaatcataaaagcaatgctttcttatgtgtggcccaaagacaggccagatctacgagctagagttgccatttcgctgggatttttgggtggtgcaaaggccatgaatattgtggttcccttcatgtttaaatatgctgtagacagcctcaaccagatgtcgggaaacatgctgaacctgagtgatgcaccaaatacagttgcaaccatggcaacagcagttctgattggctatggtgtatcaagagctggagctgctttttttaacgaagttcgaaatgcagtatttggcaaggtagcccagaattcaatccgaagaatagccaaaaatgtctttctccatcttcacaacctggatctgggttttcacctgagcagacagacgggagctttatctaaggctattgacagaggaacaaggggtatcagttttgtcctgagtgctttggtatttaatcttcttcccatcatgtttgaagtgatgcttgtcagtggtgttttgtattacaaatgcggtgcccagtttgctttggtaacccttggaacacttggtacatacacagcattcacagttgcagtcacacggtggagaactagatttagaatagaaatgaacaaagcagataatgatgcaggtaatgctgctatagactcactgctgaattatgaaactgtgaagtattttaataatgaaagatatgaagcacagagatatgatggatttttgaagacgtatgagactgcttcattgaaaagtacctctactctggctatgctgaactttggtcaaagtgctattttcagtgtcggtttaacagctataatggtgctcgccagtcagggaattgtggcaggtacccttactgttggagatctagtaatggtgaatggactgctttttcagctttcattacccctgaactttctgggaactgtatatagagagactagacaagcactcatagatatgaacaccttgtttactctactcaaggtagacacccaaattaaagacaaagtgatggcatctccccttcagatcacaccacagacagctaccgtggcctttgataatgtgcattttgaatacattgagggccagaaagtccttagtggaatatcctttgaagtccctgcaggaaagaaagtggccattgtaggaggtagtgggtcagggaaaagcacaatagtgaggctattatttcgcttctatgagcctcaaaagggtagcatttatcttgctggtcaaaatatacaagatgtgagcctggaaagccttcggagggcagtgggagtggtacctcaggatgctgtcctcttccataatactatttattacaacctcttatatggaaacatcagtgcttcacctgaggaagtgtatgcagtggcaaaattagctggacttcatgatgcaattcttcgaatgccacatggatatgacacccaagtaggggaacgaggactcaagctttcaggaggagaaaagcaaagagtagcaattgcaagagccattttgaaggaccccccagtcatactctatgatgaagctacttcatcgttagattcgattactgaagagactattcttggtgccatgaaggatgtggtcaaacacagaacttctattttcattgcacacagattgtcaacagtggttgatgcagatgaaatcattgtcttggatcagggtaaggtagccgaacgtggtacccaccatggtttgcttgctaaccctcatagtatctattcagaaatgtggcatacacagagcagccgtgtgcagaaccatgataaccccaaatgggaagcaaagaaagaaaatatatccaaagaggaggaaagaaagaaactacaagaagaaattgtcaatagtgtgaaaggctgtggaaactgttcgtgctaagtcacataagacattttctttttttgttgttttggactacatatttgcactgaagcagaattgttttattaaaaaaatcatacattccca

SEQ ID NO: 25338 - DNA, 418 bp, Homo sapiens
gatggtgggtccaaaccaccagaacctccctttttccattggccaccaccagattggtccaaccagtgggttgattgccaggatggaaatccattggtccttgggatccaggggtaaggtagccgaacgtggtacccaccatggtttgcttgctaaccctcatagtatctattcagaaatgtggcatacacagagcagccgtgtgcagaaccatgataaccccaaatgggaagcaaagaaagaaaatatatccaaagaggaggaaagaaagaaactacaagaagaaattgtcaatagtgtgaaaggctgtggaaactgttcgtgctaagtcacataagacattttctttttttgttgttttggactacatatttgcactgaagcagaattgttttattaaaaaaatcatacattccca

SEQ ID NO: 25339 - DNA, 2726 bp, Homo sapiens
  misc_feature (2415)..(2415): n is a, c, g, or t
  misc_feature (2418)..(2418): n is a, c, g, or t
  misc_feature (2423)..(2423): n is a, c, g, or t
tgtcccataatcctcttctctcggttcctctttcctcgctcaagatggcgctgctcgcgatgcattcttggcgctgggcggccgcggcggctgctttcgaaaagcgccggcactccgcgattctgatccggcctttagtctctgttagcggctcaggtccgcagtggaggccacatcaactcggcgccttgggaaccgctcgagcctaccagattccagagtcattaaaaagtatcacatggcagagattgggaaaaggcaattcaggacagttcttagatgctgcaaaggctctccaggtatggccactgatagaaaagaggacatgttggcatggtcatgcaggaggaggactccacacagacccaaaagaagggttaaaagatgttgatactcggaaaatcataaaagcaatgctttcttatgtgtggcccaaagacaggccagatctacgagctagagttgccatttcgctgggatttttgggtggtgcaaaggccatgaatattgtggttcccttcatgtttaaatatgctgtagacagcctcaaccagatgtcgggaaacatgctgaacctgagtgatgcaccaaatacagttgcaaccatggcaacagcagttctgattggctatggtgtatcaagagctggagctgctttttttaacgaagttcgaaatgcagtatttggcaaggtagcccagaattcaatccgaagaatagccaaaaatgtctttctccatcttcacaacctggatctgggttttcacctgagcagacagacgggagctttatctaaggctattgacagaggaacaaggggtatcagttttgtcctgagtgctttggtatttaatcttcttcccatcatgtttgaagtgatgcttgtcagtggtgttttgtattacaaatgcggtgcccagtttgctttggtaacccttggaacacttggtacatacacagcattcacagttgcagtcacacggtggagaactagatttagaatagaaatgaacaaagcagataatgatgcaggtaatgctgctatagactcactgctgaattatgaaactgtgaagtattttaataatgaaagatatgaagcacagagatatgatggatttttgaagacgtatgagactgcttcattgaaaagtacctctactctggctatgctgaactttggtcaaagtgctattttcagtgtcggtttaacagctataatggtgctcgccagtcagggaattgtggcaggtacccttactgttggagatctagtaatggtgaatggactgctttttcagctttcattacccctgaactttctgggaactgtatatagagagactagacaagcactcatagatatgaacaccttgtttactctactcaaggtagacacccaaattaaagacaaagtgatggcatctccccttcagatcacaccacagacagctaccgtggcctttgataatgtgcattttgaatacattgagggccagaaagtccttagtggaatatcctttgaagtccctgcaggaaagaaagtggccattgtaggaggtagtgggtcagggaaaagcacaatagtgaggctattatttcgcttctatgagcctcaaaagggtagcatttatcttgctggtcaaaatatacaagatgtgagcctggaaagccttcggagggcagtgggagtggtacctcaggatgctgtcctcttccataatactatttattacaacctcttatatggaaacatcagtgcttcacctgaggaagtgtatgcagtggcaaaattagctggacttcatgatgcaattcttcgaatgccacatggatatgacacccaagtaggggaacgaggactcaagctttcaggaggagaaaagcaaagagtagcaattgcaagagccattttgaaggaccccccagtcatactctatgatgaagctacttcatcgttagattcgattactgaagagactattcttggtgccatgaaggatgtggtcaaacacagaacttctattttcattgcacacagattgtcaacagtggttgatgcagatgaaatcattgtcttggatcagggtaaggtagccgaacgtggtacccaccatggtttgcttgctaaccctcatagtatctattcagaaatgtggcatacacagagcagccgtgtgcagaaccatgataaccccaaatgggaagcaaagaaagaaaatatatccaaagaggaggaaagaaagaaactacaagaagaaattgtcaatagtgtgaaaggctgtggaaactgttcgtgctaagtcacataagacattttctttttttgttgttttggactacatatttgcactgaagcagaattgttttattaaaaaaatcatacattcccaaaaaaaaaaaaaaaaaaaaaanaancaaanacagttttgggggcggcgcccgcgggcacccgcagaaagagacgttcttagaaaccacactttgctggtggggggccgcggggcgacccccaaaagtgaataaagagaacacgcttgcccacagaggggtgtcccgcgaagaaaaaccggggcgcgacgacacaagggcggggggtcctccaccaaaaaaaaaaccggcggggggaacagagggtgttggcgaaaacaccccacgatgggtctggagagcacaaggggactcacagagagagtcaagaggcctaaataaatagccccacggtg

SEQ ID NO: 25340 - DNA, 2113 bp, Homo sapiens
tgtcccataatcctcttctctcggttcctctttcctcgctcaagatggcgctgctcgcgatgcattcttggcgctgggcggccgcggcggctgctttcgaaaagcgccggcactccgcgattctgatccggcctttagtctctgttagcggctcaggtccgcagtggaggccacatcaactcggcgccttgggaaccgctcgagcctaccagattccagagtcattaaaaagtatcacatggcagagattgggaaaaggcaattcaggacagttcttagatgctgcaaaggctctccaggtatggccactgatagaaaagaggacatgttggcatggtcatgcaggaggaggactccacacagacccaaaagaagggttaaaagatgttgatactcggaaaatcataaaagcaatgctttcttatgtgtggcccaaagacaggccagatctacgagctagagttgccatttcgctgggatttttgggtggtgcaaaggccatgaatattgtggttcccttcatgtttaaatatgctgtagacagcctcaaccagatgtcgggaaacatgctgaacctgagtgatgcaccaaatacagttgcaaccatggcaacagcagttctgattggctatggtgtatcaagagctggagctgctttttttaacgaagttcgaaatgcagtatttggcaaggtagcccagaattcaatccgaagaatagccaaaaatgtctttctccatcttcacaacctggatctgggttttcacctgagcagacagacgggagctttatctaaggctattgacagaggaacaaggggtatcagttttgtcctgagtgctttggtatttaatcttcttcccatcatgtttgaagtgatgcttgtcagtggtgttttgtattacaaatgcggtgcccagtttgctttggtaacccttggaacacttggtacatacacagcattcacagttgcagtcacacggtggagaactagatttagaatagaaatgaacaaagcagataatgatgcaggtaatgctgctatagactcactgctgaattatgaaactgtgaagtattttaataatgaaagatatgaagcacagagatatgatggatttttgaagacgtatgagactgcttcattgaaaagtacctctactctggctatgctgaactttggtcaaagtgctattttcagtgtcggtttaacagctataatggtgctcgccagtcagggaattgtggcaggtacccttactgttggagatctagtaatggtgaatggactgctttttcagctttcattacccctgaactttctgggaactgtatatagagagactagacaagcactcatagatatgaacaccttgtttactctactcaaggtagacacccaaattaaagacaaagtgatggcatctccccttcagatcacaccacagacagctaccgtggcctttgataatgtgcattttgaatacattgagggccagaaagtccttagtggaatatcctttgaagtccctgcaggaaagaaagtggccattgtaggaggtagtgggtcagggtgggtaatttagttatttgtaaaattctgtattataggctgatgattcccaatgtaatatttctttctttatcaaaatgattactgtggtttaaaactggggtttcctaacattaataggagctaaataacctttcttcatctccaatttcaggaaaagcacaatagtgaggctattatttcgcttctatgagcctcaaaagggtagcatttatcttgctggtcaaaatatacaagatgtgagcctggaaagccttcggagggcagtgggagtggtacctcaggtatttaaaaacagaaaaaaacaaatttttggaggatttattgggttgatcaatccgtaactagaacagtttgaatcaagggatcaacatatgctactgaagtagtcagtattagaccctaccagtgaaattctggtatcaaaagggattttttaaaaaaggaaaagaaaaaacttgaaggaaaaatctgcatgataggaagccctggaatgatagcataatagaatacaaagaacacagacctggattctaaccc

SEQ ID NO: 25341 - DNA, 1321 bp, Homo sapiens
ggttagcgtgtacttatacattattggttgctggtagggccatatttagaagacatttgggcaataatatcaaaggataaaagtatgcttacctttaaactcatcagtctacttctaggaattcttacagaaacacacagttgtacaaagtcatatacataatgttttattccaacattgtagtagcataaacttggaaatcacattaatgtccatcagtaggagaatgtataaataaattatgacatttccatagtatggaatatacaactgttaaaaagaatgagttagttttctgttattgacatggacaatctctatgatatgttaactgaaaaaagcaattgcaaaataatatgtgtagaatgaccatacttgtgttaggggaaagaaacatatgtttaggtatataaattcacaggaagaagtctggaatgatgcacactaaattgtttatgatgactacccctgggaagggaatgggattttgcagatgagggatgatgaaagggactgtcatgttttaccctttatgcctttgtctctttactatttgaatttttaataatgaacataaatagagagagatatatagatatagatatatattcattcagtatatctgcttcaggatgctgtcctcttccataatactatttattacaacctcttatatggaaacatcagtgcttcacctgaggaagtgtatgcagtggcaaaattagctggacttcatgatgcaattcttcgaatgccacatggatatgacacccaagtaggggaacgaggactcaagctttcaggaggagaaaagcaaagagtagcaattgcaagagccattttgaaggaccccccagtcatactctatgatgaagctacttcatcgttagattcgattactgaagagactattcttggtgccatgaaggatgtggtcaaacacagaacttctattttcattgcacacagattgtcaacagtggttgatgcagatgaaatcattgtcttggatcagggtaaggtagccgaacgtggtacccaccatggtttgcttgctaaccctcatagtatctattcagaaatgtggcatacacagagcagccgtgtgcagaaccatgataaccccaaatgggaagcaaagaaagaaaatatatccaaagaggaggaaagaaagaaactacaagaagaaattgtcaatagtgtgaaaggctgtggaaactgttcgtgctaagtcacataagacattttctttttttgttgttttggactacatatttgcactgaagcagaattgttttattaaaaaaatcatacattccca

SEQ ID NO: 25342 - DNA, 654 bp, Homo sapiens
ctcagtaaaatgaactgtgatcaggagaataaggaaatgttcagtgtattacttggtggttgtaatcaatggaaacactaaaaacataaaatatgcatgcactatgcttccttaaagtaaaattttcctttaccaggaggagaaaagcaaagagtagcaattgcaagagccattttgaaggaccccccagtcatactctatgatgaagctacttcatcgttagattcgattactgaagagactattcttggtgccatgaaggatgtggtcaaacacagaacttctattttcattgcacacagattgtcaacagtggttgatgcagatgaaatcattgtcttggatcagggtaaggtagccgaacgtggtacccaccatggtttgcttgctaaccctcatagtatctattcagaaatgtggcatacacagagcagccgtgtgcagaaccatgataaccccaaatgggaagcaaagaaagaaaatatatccaaagaggaggaaagaaagaaactacaagaagaaattgtcaatagtgtgaaaggctgtggaaactgttcgtgctaagtcacataagacattttctttttttgttgttttggactacatatttgcactgaagcagaattgttttattaaaaaaatcatacattccca

SEQ ID NO: 25343 - DNA, 569 bp, Homo sapiens
atctaggctcagttatgtttactaacatgaatcttacttaacagcatgaggcaagatctacgctcaagatggcgctgctcgcgatgcattcttggcgctgggcggccgcggcggctgctttcgaaaagcgccggcactccgcgattctgatccggcctttagtctctgttagcggctcaggtccgcagtggaggccacatcaactcggcgccttgggaaccgctcgagcctaccaggtgagatgccactgacatggaagaatagggtgaagggcaaggggacctgtagggaaaaggttgccctcctgacctcggggcagagagagcaccaagaagaaagtcatggctaactgggagcagcagtaagtgaaggaaattaacgtcagtaatttgaggaaagggcgaagaagaaaacctttgagttcagcaaagggaaacggggcaggaggttctgggcagaggacacctggagcgctggaggctctcggagtcatagtttttctctcatattaagagttggggtagacaccattcccagcctgcttgcctttctaaagacgaggaagactg

SEQ ID NO: 25344 - DNA, 2393 bp, Homo sapiens
tgtcccataatcctcttctctcggttcctctttcctcgctcaagatggcgctgctcgcgatgcattcttggcgctgggcggccgcggcggctgctttcgaaaagcgccggcactccgcgattctgatccggcctttagtctctgttagcggctcaggtccgcagtggaggccacatcaactcggcgccttgggaaccgctcgagcctaccagattccagagtcattaaaaagtatcacatggcagagattgggaaaaggcaattcaggacagttcttagatgctgcaaaggctctccaggtatggccactgatagaaaagaggacatgttggcatggtcatgcaggaggaggactccacacagacccaaaagaagggttaaaagatgttgatactcggaaaatcataaaagcaatgctttcttatgtgtggcccaaagacaggccagatctacgagctagagttgccatttcgctgggatttttgggtggtgcaaaggccatgaatattgtggttcccttcatgtttaaatatgctgtagacagcctcaaccagatgtcgggaaacatgctgaacctgagtgatgcaccaaatacagttgcaaccatggcaacagcagttctgattggctatggtgtatcaagagctggagctgctttttttaacgaagttcgaaatgcagtatttggcaaggtagcccagaattcaatccgaagaatagccaaaaatgtctttctccatcttcacaacctggatctgggttttcacctgagcagacagacgggagctttatctaaggctattgacagaggaacaaggggtatcagttttgtcctgagtgctttggtatttaatcttcttcccatcatgtttgaagtgatgcttgtcagtggtgttttgtattacaaatgcggtgcccagtttgctttggtaacccttggaacacttggtacatacacagcattcacagttgcagtcacacggtggagaactagatttagaatagaaatgaacaaagcagataatgatgcaggtaatgctgctatagactcactgctgaattatgaaactgtgaagtattttaataatgaaagatatgaagcacagagatatgatggatttttgaagacgtatgagactgcttcattgaaaagtacctctactctggctatgctgaactttggtcaaagtgctattttcagtgtcggtttaacagctataatggtgctcgccagtcagggaattgtggcaggtacccttactgttggagatctagtaatggtgaatggactgctttttcagctttcattacccctgaactttctgggaactgtatatagagagactagacaagcactcatagatatgaacaccttgtttactctactcaaggtagacacccaaattaaagacaaagtgatggcatctccccttcagatcacaccacagacagctaccgtggcctttgataatgtgcattttgaatacattgagggccagaaagtccttagtggaatatcctttgaagtccctgcaggaaagaaagtggccattgtaggaggtagtgggtcagggaaaagcacaatagtgaggctattatttcgcttctatgagcctcaaaagggtagcatttatcttgctggtcaaaatatacaagatgtgagcctggaaagccttcggagggcagtgggagtggtacctcaggatgctgtcctcttccataatactatttattacaacctcttatatggaaacatcagtgcttcacctgaggaagtgtatgcagtggcaaaattagctggacttcatgatgcaattcttcgaatgccacatggatatgacacccaagtaggggaacgaggactcaagctttcaggaggagaaaagcaaagagtagcaattgcaagagccattttgaaggaccccccagtcatactctatgatgaagctacttcatcgttagattcgattactgaagagactattcttggtgccatgaaggatgtggtcaaacacagaacttctattttcattgcacacagattgtcaacagtggttgatgcagatgaaatcattgtcttggatcagggtaaggtagccgaacgtggtacccaccatggtttgcttgctaaccctcatagtatctattcagaaatgtggcatacacagagcagccgtgtgcagaaccatgataaccccaaatgggaagcaaagaaagaaaatatatccaaagaggaggaaagaaagaaactacaagaagaaattgtcaatagtgtgaaaggctgtggaaactgttcgtgctaagtcacataagacattttctttttttgttgttttggactacatatttgcactgaagcagaattgttttattaaaaaaatcatacattccca

SEQ ID NO: 25345 - DNA, 2547 bp, Homo sapiens
tgtcccataatcctcttctctcggttcctctttcctcgctcaagatggcgctgctcgcgatgcattcttggcgctgggcggccgcggcggctgctttcgaaaagcgccggcactccgcgattctgatccggcctttagtctctgttagcggctcaggtccgcagtggaggccacatcaactcggcgccttgggaaccgctcgagcctaccagattccagagtcattaaaaagtatcacatggcagagattgggaaaaggcaattcaggacagttcttagatgctgcaaaggctctccaggtatggccactgatagaaaagaggacatgttggcatggtcatgcaggaggaggactccacacagacccaaaagaagggttaaaagatgttgatactcggaaaatcataaaagcaatgctttcttatgtgtggcccaaagacaggccagatctacgagctagagttgccatttcgctgggatttttgggtggtgcaaaggccatgaatattgtggttcccttcatgtttaaatatgctgtagacagcctcaaccagatgtcgggaaacatgctgaacctgagtgatgcaccaaatacagttgcaaccatggcaacagcagttctgattggctatggtgtatcaagagctggagctgctttttttaacgaagttcgaaatgcagtatttggcaaggtagcccagaattcaatccgaagaatagccaaaaatgtctttctccatcttcacaacctggatctgggttttcacctgagcagacagacgggagctttatctaaggctattgacagaggaacaaggggtatcagttttgtcctgagtgctttggtatttaatcttcttcccatcatgtttgaagtgatgcttgtcagtggtgttttgtattacaaatgcggtgcccagtttgctttggtaacccttggaacacttggtacatacacagcattcacagttgcagtcacacggtggagaactagatttagaatagaaatgaacaaagcagataatgatgcaggtaatgctgctatagactcactgctgaattatgaaactgtgaagtattttaataatgaaagatatgaagcacagagatatgatggatttttgaagacgtatgagactgcttcattgaaaagtacctctactctggctatgctgaactttggtcaaagtgctattttcagtgtcggtttaacagctataatggtgctcgccagtcagggaattgtggcaggtacccttactgttggagatctagtaatggtgaatggactgctttttcagctttcattacccctgaactttctgggaactgtatatagagagactagacaagcactcatagatatgaacaccttgtttactctactcaaggtagacacccaaattaaagacaaagtgatggcatctccccttcagatcacaccacagacagctaccgtggcctttgataatgtgcattttgaatacattgagggccagaaagtccttagtggaatatcctttgaagtccctgcaggaaagaaagtggccattgtaggaggtagtgggtcagggtgggtaatttagttatttgtaaaattctgtattataggctgatgattcccaatgtaatatttctttctttatcaaaatgattactgtggtttaaaactggggtttcctaacattaataggagctaaataacctttcttcatctccaatttcaggaaaagcacaatagtgaggctattatttcgcttctatgagcctcaaaagggtagcatttatcttgctggtcaaaatatacaagatgtgagcctggaaagccttcggagggcagtgggagtggtacctcaggatgctgtcctcttccataatactatttattacaacctcttatatggaaacatcagtgcttcacctgaggaagtgtatgcagtggcaaaattagctggacttcatgatgcaattcttcgaatgccacatggatatgacacccaagtaggggaacgaggactcaagctttcaggaggagaaaagcaaagagtagcaattgcaagagccattttgaaggaccccccagtcatactctatgatgaagctacttcatcgttagattcgattactgaagagactattcttggtgccatgaaggatgtggtcaaacacagaacttctattttcattgcacacagattgtcaacagtggttgatgcagatgaaatcattgtcttggatcagggtaaggtagccgaacgtggtacccaccatggtttgcttgctaaccctcatagtatctattcagaaatgtggcatacacagagcagccgtgtgcagaaccatgataaccccaaatgggaagcaaagaaagaaaatatatccaaagaggaggaaagaaagaaactacaagaagaaattgtcaatagtgtgaaaggctgtggaaactgttcgtgctaagtcacataagacattttctttttttgttgttttggactacatatttgcactgaagcagaattgttttattaaaaaaatcatacattccca

SEQ ID NO: 25346 - DNA, 361 bp, Homo sapiens
ggtggaggtataagctttcgagaatgctttgcctttagagagaaaaacatcctggcctgacccatgtgttaaccaaagatggaatggaactgtccttaccagcctcgtaagtgatgaggttagatgactgagatcatttggcggaggtggatgggaggtgctaatggtcagctcaaggtggcttgttgtgggtaagtggcaataaagagaaaatgttgggtgtgggcactgtacagttagacacagacaaggtccaagtagttgaaaatctagggttagacttgtgctattgcattctttatgacttaataagtggatacatgtccctcactgataaagaaatcctctggaccccaatttt

SEQ ID NO: 25347 - DNA, 726 bp, Homo sapiens
ttttaatttttgtggcttatttttagtacccagccttaatagagttgagcaaaatagagattacgtttccatgacataataaattttggtaatttcagaaagcaaaaaatactggaatcttttcaatccaagtcgattggatacatagcagttcaatttgaacacagcagttcaatttatttgttaacaaattctgcagtgtcttcctgtaagaatctgtaaaaatcctcatcagcatttgaagatgcaccccctcacttttgtaattggttaacagaagcttctatcttttcacatccctttagtgatctcactgtttactcttcaagctgtatagtggcagctgtttatatgcttgcatacacatggtttattggaatgttctcttcaaattgaaattatttatgtttcaaaatttatatacacatactatctatgaaaaatcctgcacaattgtgtattttttttgctgtggatactgcataaataaaatttaaaataagaaagatgtttctcttctttacattattactctatctaagcctactgatattagttaaacattgttattttctggcaacgatgtctttgatgtgtgacacattcttgctggaatccagcctgtggctgattgtattttctagaaagggctgcactaatacatagcccatcccacccacatgctcttcttgcaatgtgacaacaataaatgacattgtctaacct

SEQ ID NO: 25348 - DNA, 397 bp, Homo sapiens
ttgaagtttgggggaagcaaaattaggataacagacataaggtgccggagataaaacatcaaaatggggacaactgctgccttagctaggaagcctttctgtaatttcccctgagtgatagaaatgataggaagtggcatctcagactgaagatatgactgaataaggcttattagaaaaaaggcaagtaggtttatctggatggaatgaagtacagggacttgctgctggcagcagcaccctccaagttatgcctggagatcaagagtgacaatgggccgggtacggtggctcctgcctgtaatcctttgggaggccaaggcaggaagattacctgaggccaggagttcgaggccagcctggtcaacacagtgacacccagtctccacaaattgtt

SEQ ID NO: 25349 - DNA, 208 bp, Homo sapiens
tgactgcggacgaatcggcgtttgccgaggctggcatagatttggctgtctccgctcatagctgcttttggcgcgaaagatgccgggtctggttgactcaaaccctgccccgcctgagtctcaggagaagaagccgctgaagccctgctgcgcttgcccggagaccaagaaggcgcgcgatgcgtgtatcagtgcgcagccggagaga

SEQ ID NO: 25350 - DNA, 476 bp, Homo sapiens
atggttgccaaatcgacttttatttttcatttggattactgctttgctttgcagtgttggaacttatttgttggagaaatgtcttcagagtcagaaaaggataaagagagactgattcaagctgccaaaatgttcttctttcatgtacaagatcttgcttctgtcataaacacactgactgaattgtttagccgcagtatgaatactcaaatccttttgatggctgtgaaaaacaatagttacattaaggatttttttgagcaaatgctcaaaatttttaaggagatgcaatctgtagtggatgcaagacatgacaaaattcaaaaggagtctttatgttccaaggttgcaatggccatgtgctctgtggttcagaagagtaccaatgtagaggagttgcatcagtcagctaaagaagtattcaaaagtgcccatacgccagtcatcatctctgtgctaaacagcagtaacatcct

SEQ ID NO: 25351 - DNA, 1136 bp, Homo sapiens
tccaggaccagagtctcttccggttccatacaatactcaattggttggttgtcggctaagagcccgcctcattgcgctcatctagtacaataggaattagaagaagatagctgctaactgagtggctgacggtcctgtctctcgagttggaggcatcttgacttagttgctgggagcctgtgttggaacttatttgttggagaaatgtcttcagagtcagaaaaggataaagagagactgattcaagctgccaaaatgttcttctttcatgtacaagatcttgcttctgtcataaacacactgactgaattgtttagccgcagtatgaatactcaaatccttttgatggctgtgaaaaacaatagttacattaaggatttttttgagcaaatgctcaaaatttttaaggagatgcaatctgtagtggatgcaagacatgacaaaattcaaaaggagtctttatgttccaaggttgcaatggccatgtgctctgtggttcagaagagtaccaatgtagaggagttgcatcagtcagctaaagaagtattcaaaagtgcccatacgccagtcatcatctctgtgctaaacagcagtaacatccttgggagtctggaatcttctctttcacacttgatgaaattccccatcatgaatcttcaattaagtgacttctatacagaagacaccaaagagcaatcagatgtcaccacatctgagagaaccagaagtcctccaggttcttccaaaaccactatgatagacaccttgaaaaaactgcaggatgtactaaaaactgaggattccaaaaatcccacaaagtcagcagcagatttgttggaacaaattgtcaaggctatgggaccaatcttagagatcctccaaaaagcgataaagactatggaaatgaatatttctgtgtttaagaaagccagtgacaagtagggatgcaacagaaatgttcatttctgtcagaaaactacttaaaatcttatggtttttcatagtagtttctaagatcttttggtgccaaacatgtgctatgttagaacataagtacacaaaagtcatctggcaaaacatttacctgtagttttgctttattaaaataaaaagaaataattaagaaaaaaaaaaaa

SEQ ID NO: 25352 - DNA, 314 bp, Homo sapiens
catctctactaaaaatacaaaaaattagcaacagagcgcgattccgtctcaaaaaaaaagtaactttttaaaactttctatcatgaaaaaatttgaacatatacaaaaatacacagaatcttatattgaactccagcggcctcatcaccagcttcaagaattatcagctcatggccaatcttgctttgtctgtgtacccacttctctcatctctgttatttttgaagtaaataccagatatattatttcatccacagacatttcatacatatctttaaagcacatgacaacattagaaaatattttcactcctt

SEQ ID NO: 25353 - DNA, 866 bp, Homo sapiens
tagcacttttaacatagtccctgtcaagtaattcaacaatagttgaacaattgctaattgaatgaattctgaaagtttcacaaattagacctgaaaggaaagattatttttctcacctgtttttcttgaagtttcaaattattttgaactacaaatggtatttcactagtaagtgtgaaaatttattgtgaatataattaatgtcttgcaatgtgtgatgagaaaggtggctatagtacactagattgttaacattgtacaaagtacaaaagttctttggaaatgttgaatgactgcagtgtggccattattacttttttcctggggtaagaaggaaatgcgataattaaaaaaaaggcaggggattggtagtactttattaaagaaatcttatgttgctaagataatttagtcatgtaattttttaaaaaacaggctatttaaaataatgtttgctttttccttcttcttctccttttttttttttttttgaaaagcatcctcctgccttggccatccagagtgctaggattacaggcatgagccatggcgcccggacttttcctccttttatttcaaccatgacaatgtattttggctctctgctgatttaaattatatttcgtggaaaacagtatgacgtccaaaatgctcatataaccttgaacttgaaattattttcctgagaaaatttgtccttctgactgatgctctttagtgtataaaggtattagttgtaattgattggcttcttaaatgttggaagtatggtgttaaggcagatagatttctttatttcttgaggggtggagattagattttgatactggaccaaaaaatgatttttcctgatataggtttgaatt

SEQ ID NO: 25354 - DNA, 484 bp, Homo sapiens
gtacatatttcagaatgccaacttcaaggaaatccacagaacttataaataccatagttttgctattgatttcagtctaagacaaatttcttttgtcggagcccaataacctaagtgtggttatgtgaaatttattgaatattgctttctgggggtggtcgggagctgcaaccccaagagacatggccagttttctatgttctgggaaaaaagaaaagagaattgccctctgtcagtcccctgaaaacaccagccatcctcttttctgagtcccatggtgtttgaatctgctccggctcctgttttatatcccatccttctccattttggtcagaaatattttctgttaccctgagattagcttgtactctaacagaaagaaagaaaattcctgtttaagattataagtggttcacttttagaattatctttttgctagtgccaaaagtttaatttattgttaagaataatgatttttttaatt

SEQ ID NO: 25355 - DNA, 510 bp, Homo sapiens
tgattgtgagcgccgtttgacagcagagcccactggcatttcttatggtcttggacctggaggtgttgtcaggggaaagggaagaggtgcaatgaccccagtgttggcctgagccactggtagaggagtgtggagaggggaccctgtgctcctggcctccctcccgtggcctccggcatgggtcgaccttggccgagcgtgaggctggtgccacctcagcctcccagaccctgagtagggttaacacctccagacccgaaatggcctccggttgaccgggcccactccccatcagcctgtccagccagccagcacttactgagtgccttctgtgtactaagccctgctctgggtacttccatgagtcaactcacgccctcccggcctcagggtgatccaccgccttcccctacagtattccaaggggccattggacctcagaggcttcatgtcctgcacattctccgtgtcatagagcaggaaaaaataaaaacgggagatcgaattcta

SEQ ID NO: 25356 - DNA, 792 bp, Homo sapiens
tacaagcaattacttgacttgcaaaatctgcttgatatgaagtgtgttgtaatggttttctgctgctactcctctgaagtcctgagtgtttccaccatccagggggaaacagctaatatctatctgcctgttctaaaacattacgtgcaagtacatacacacataatccctttccatcttctgagatttagcaaacgattacatgttgaacaatttagcagtctattgagtgacttttcatttgctattaaagtacgcagatatatggtcctagggaatgcgcatgggctttcgttgtatatcttgggacctacaatttctggcatgttaggcaagttacttaactctgaggttctatattttgaactgtaaagtgaaaatgatgatagtcattgagttgcaaggaaagaattataatgaagtcatgaggggtcaggtttcctgagttcgaatccttctttcaccactgtagtggatgctgtagtgctccactcagattccagaactgagaaactcatgcccatggctgctggaattatgggttgttgatatctcacagccaagtttcttctcaggaaatgtcctctcttggtcaaagagagctgctctgtctaatgctacacccttctcctggggacagtctgaaaggcttcaaagtcttggcattccttcttcaattcagccctccagaaatgcctgggaagtcacctgtaaccagtctgacccagtcttgcttctctgaccccctgacaggtcctggtccagaaaacacccccaataaactttacacaa

SEQ ID NO: 25357 - DNA, 297 bp, Homo sapiens
tctgtacacccatttttgttctaatcttgtcactgaagctggttgcctaaaatcgtcaggctacatagaccaaggctactctgatccccagagatccaagtctttatttttgtcatggggttataaaatttcaaaactggaaaaaaaaaaaggcaaaatggtatgcttctcaagcattaatgtgcatagagtcacctaaagatcttgttaaaatgcaaattccagggccctacccccagagattctgattaggaaagtctggggtgggcactgggaatctgcattgcaatgagctcc

SEQ ID NO: 25358 - DNA, 334 bp, Homo sapiens
ctcccaagaagcaggggagatttcccaccaaaccgatatgatgaagaccagttaattatttcctttctccctcaaaaatgccctgaagcccttgctgggggctgctcctgggctctggcatcaggactaatggttgctgaggcagcctggtcaagtgaaaatggagccgttggcgcgtgtgagatggaagccaggagagaccacagggaacctgccaggcttgagtctagttctgccagccctcagtcaaggcccctattccaccctcctgccaattacaggcagtcattcccccatccccttagggaaaggccaaggggaggcccgagaccca

SEQ ID NO: 25359 - DNA, 247 bp, Homo sapiens
ataaacatagcatttacagaagatagtgagaataccactgatttggtatgttggatgctggttgggagaattttatgggaaaaataccagttgagtgaaattatggatgttcttgagaaatagcagagtttgaattgaatgtggctttttgcataaagtggtaattttggaattttggaataggagaatgaataaagatggcatccccaatagttgtcatggctagtcttaggaagggttggatcag

SEQ ID NO: 25360 - DNA, 518 bp, Homo sapiens
taaaaaacaaaaatcacaagatcctctcaaataacacaggaaatccacttaacaaaatccaacactctttcatgataaaaaacactcgagagactaagaatggaaggaaactccctcaacctgttatagggcatctgcccaaaaatccacagttaatgtcatacttaatggtgaaagacagtatgctttcccctaagatcaggaaccagacaaggatttctgctttcaatacttctattcaacattgtactggagtttttcgccagggcattagatgtaaaagaaatagaaaacattcagaatggaaatgaaaaagtaaagctacctctatgcacagatgacatgatcttgtatacagaaaatcctaaggaattcactaaaaagctattaaaatgaataaatgaattcagcaagttgcaggacataagatcaatacataaaaatcaatttgtgttgcacttgtaaagaacaatttaataaatgacattttaaaaacaattgtattaacaacagcacca

SEQ ID NO: 25361 - DNA, 434 bp, Homo sapiens
catcctccagtgcttctctggtgattcccgggaccccactcaggaggtcccacggcagcgggggaccccgagggcctagccggggaggcaggaggaggctggccagccaccaagccacgattcagagcttgtaagggcacctcccgagcccctcaccttcccactctgaggcgaccccatgtcctcgaccgatgatctggcccgggcgcttccctccacggtctagagtggcggcccagctttgagcttggcgcgccttgagcccttccttcagatgtcccgcagtccgtccaccccgcacgtctcctatcagcctatgcacggcgggctccggtcaggtggaggatcagcaggtgggctttcaaaggttggatccgttgcccacgcgaatgaaagaagaaaaaagaaacctctttgagccttgcctgcggccg

SEQ ID NO: 25362 - DNA, 368 bp, Homo sapiens
cacacaagactgaaggtctagctgtgacaggagaccacaatgaggagtcctgaccgtgccgaagctcccatgggatgccaggatgccagccactgctccacgaccccatgctgcattgtacttcaccctcacgagcataggcaatgtgagcactacctctgcagaggatactgaggctcagagagacaaagacatgggcttaagtccacacgactgactgtaaatgacagaaccaaggtacacattccggctttctaatcccaaagccagagtcttcccaacccaccccaaccccatgttcacaggcctgagacccctctcaccccagtactgtgaaaggccccagtaaagacctgtaaaagaacaaa

SEQ ID NO: 25363 - DNA, 167 bp, Homo sapiens
agcaaaaagatattttgaaacagagaattgtatactgacaaaattcgaaaagctagtggaacaggctatagataaggctttgagaaatgtcttctcaaacattaccaaacaactggcagtaacaggggagtaagaggaaactatagtcattccaggaccccactgtt

SEQ ID NO: 25364 - DNA, 239 bp, Homo sapiens
ggttggcgggggcagtggctacagcttaaaaacacaaacagaggagcgctccttttgagtcccactccttcctggcactgatggggaaaataagccccaggaaagggtaagaatcacccaaggacacaactaagatgttctcaaacagatgaccagaaactaagatgactggcctgctggatgacagatcccttaataattcacaaacggtgggttttatttatttactcataaaacag

SEQ ID NO: 25365 - DNA, 300 bp, Homo sapiens
ataactagagccagtggatggaagctataggggtacggattcagcttagtatggaaaatctttctagtaatcaaaaccacgtgaactcctggtgacgtggccacatcccagtggtagcagtgtttaggcagagcctcatggccaacatggacagaatggacgcgggggctgccttccacctccctcagacgcccacacagtccagtggtccacctccctcaaacgcccacatgggccagggtcctcctctatcagaggaagggccccttccttgttctttcccttcctgccccagatcag

SEQ ID NO: 25366 - DNA, 579 bp, Homo sapiens
gcgcctgtaatcccagatatttgggaggctgaggcagtagaatcgcttgaacccaagaggcggaggtttcagtgagccgagattgcgccattacactccagcctgggcgacagagcaagactccatctcaagggggaaaagaaaaagccgctcaattgttttgtcatggggccgggcgtggtggctcactgtgcctttttacttcagctcacagatttccagttggccgtctctgcagaccctggcctctagcagggaaagagccttttatttggctgttgtgagggcgccttgaagtttaggtatttataaacgcgaactgggctaccactgcttgcctctgagaatcccagggaccatctcacagccaaactaaatttggtccctggactggtgcctgagggctgaggctgagacatggctgtgactctttatgacagagcagcagtttttagtggagattttgggctgtcagagcaagggacctttctggagtggtggtggttatttttctgttacctctgtgtcccctgagtcactgggtggcagagtggaggggcactgtttagataggatgtg

SEQ ID NO: 25367 - DNA, 332 bp, Homo sapiens
catgcatttgttaaaaggatggtgagatgtacgaccgtagtacgttatatgttaatatagtacacggcagatctgggctaccactgcttgcctctgagaatcccagggaccatctcacagccaaactaaatttggtccctggactggtgcctgagggctgaggctgagacatggctgtgactctttatgacagagcagcagtttttagtggagattttgggctgtcagagcaagggacctttctggagtggtggtggttatttttctgttacctctgtgtcccctgagtcactgggtggcagagtggaggggcactgtttagataggatgtg

SEQ ID NO: 25368 - DNA, 439 bp, Homo sapiens
agattcccaccctgcagtggagtgactgctccccccaaacccctaaagctaactagatgtttggttcctggagaggtaacagagggctatggactgcagatcccaagcacagctgagagcagggccaccacagaaaacagcttagtgaactgtactaactgaaggtgcagagacccagccctcttctttttccctccacaggaaacccaactagcctaagaagaaagacctaacagacaatggcatgggcctcccctgctaatccacctagggcagatagcctacagtaaggctcacatctattcacatgcttggagcatccaatggacattttaatctcctatcctgaattatctctgaattttcagcagataaccaagcagcacctgccatctcaagaaagcctgtaacaggaaagccagagaccaaacaaagcagg

SEQ ID NO: 25369 - DNA, 838 bp, Homo sapiens
gtgtgacctgctctcataaactcctccccaaaacaggcttatgcacttagcagtaatagattgaaccatcaactccttaaagcacacctggttgataattagctcaatcacattgtgtttcggtcattacccttggatttcccaaggatgagtttaattcatctcccacattaaagtgagtgcctgcatgaccaaaactcaacagaatagaatttctgtctctattatgtcaatttaatgctgtggtaattttattgcaaaataggtatcggtttacaatttgccacccaaatatctgcacagaaattgttactgtatgctgtaaaaagatctttgatggcaaaaggctcccgtttttcctaaacagtacttcatctgaaggaagacagagggaatgagctgaaactctgatttgaggaatttggggttgataagatctaatattgcttattcagagatgacttactctggttttatagcttataaacgtattgatgatagatacaaccccttgattccaagattttacagagtttattttgtgttttaaccacactccctttgcctctgacctactgctggatgtgaagggataaactggtggtgcatatgctatattaccaaagtgggaagggagagaggcacctttattatatcggattactgccagatgcctagaatgctcaaatctactcactggttgctgtttaaaagggaaaaatacaaatctaaccacttctaggaatggtgccagatgtctgtactaaggcaacccaactccagaaggctataaaaatagcccccaagtagtaggttctgatttcccactgagctgacc

SEQ ID NO: 25370 - DNA, 575 bp, Homo sapiens
gagtgttgttcatgtgtaaaggcaatgggaagacattcttaaatttgtaaaatcttgccatatgcaaagcattcctcaataatatagttgaaggtatattattaaagaatgtgaatgggccgggtgcggtggctcacgcctgtaatcccagcattttgggaggccaaggcgggcagatcacctgaggtcaggaattcaagaccagcctgaccaacatggagaaaccccgtctctactaaaaataaaaaattagccaggtgtggtggcgcatgcctgtaaacccagctactcgagaggctgaggcaggagaatcacttgaacccaggaggcagaggttgtggtgagctgagatcacaccattgcactccagcctgggcaacaagagggaaactccatctcaaaaaataaaaaataaaaaataaagaatgtgaatgaatgatgaataataaagccaatgaatattaaagaagttccaaactgaattcactgtatgagccttcaatccaattaaacacagaattatgtctaaagaattgtcaaaacgagggctatgagaagaaatgtaattgttttaa

SEQ ID NO: 25371 - DNA, 543 bp, Homo sapiens
gacagtctctttttgggcattgctgtatgcatacctcctgaccccttacctccgtggtaggcagatgaccccctgcccactaaagaatagcagggggaggacaagcactaatccctggaacctacaagtatgccatgttacctggcaaaaagcacttcacagatgcaattaggattatggacctaatagggagattagcatggagcatctgggtacacccaatctaatcacatgaactcttaaaagcagataattttctccagctagagtgccagattccaagcaagagaaacactcgatgtccattaccggctttgaagatgaaggggaccagagacctcatggtacaaccacaaggaactgaattctgctcacaaccagattgaacttggaagtggatttttcccttgtcccttcagataccttgactttggccatgcgagtccttacacagaagacctagtcatgtcacgccggactactgacccacagaaactgtgagataataaatgcgtgttgtttgaagctgctaaaaatttgtgt

SEQ ID NO: 25372 - DNA, 486 bp, Homo sapiens
gtaatgcctgtgttattagagttcatgaactaggctgcagtcgggaaattgtagctattctctgtagcagggtatgtatgacacattttcagttggataacattctgtgtgatgattgataatggaataggaaccaacaagagcagaatagcatgtactgcagggaatttgcagatagttgattcaatttttatatccagctaatcaatttgccagatgctggtagatgctgtctcatttggttgactgtgagacttgaatctgctacacatcactctatagattttgaacagttttattagtaatacttcaaagttctaattgacttacaaggtgtgtcaaggaaatacaaaattgctaacaggccctgaaacacaggctaccagaattgaagtgttaagtctatagaacttcttggatccatcacctcagtatctcaagattagctgaaggaggaacaagtcaggccagataaaatacaaaaaa

SEQ ID NO: 25373 - DNA, 209 bp, Homo sapiens
taatctctaactgcttgatgtttaaaataggacagttttatttattttcaagtgtcagattatagaagtgactgatgctgcaaaacattcagaaattatagagaaatagaccgggcgcagtggctcacgcctgtaatcctagcactttgggaggccaaggcgggtggatcacctgaggtcaggagtttgagaccagcctggccaacatg

SEQ ID NO: 25374 - DNA, 203 bp, Homo sapiens
gccttcatatacttctcattactctgattggttattattgtttttaattgtcactgcaatgaaatgcacacataacatttctccttactatggattcaacactaggtatggtcaagttttagaaaaactgtgtcctggggaagcaactatggaggaggagggatgacaaaactactgagcctaattatttttaacaaccaggt

SEQ ID NO: 25375 - DNA, 431 bp, Homo sapiens
acattctgtaaaatggaaatcatgcatacgtagttctcttgggggaccttgagaaaattaatgaggctatgtttgtaaaaagtttttacattatatagagaaaagcattaccttcaggaaagaaactgtcactaatccatattttccttgtacgtaagctcagcatatggattctgacaggaaatccatggctgtttaagtccaactttgaaacttaatatattgattttaaaagtatctggtttcataattaaaacattaaaatatttattacattcttcaattaaaaaaggcaaggcaaacttatcttccaatggcgtgccaatctgtagaccattcattctatgcttaggacactaaaaaaattaaggactttgaagttattaacttgacagccattaaattttgaaagaagaacataaaagattcca

SEQ ID NO: 25376 - DNA, 454 bp, Homo sapiens
ccagatgtctccctctggttcctccaagaaaacacatgacagtaaaatcgctctaagcaaactgaatcttggtgcagggagccagctttctctccatctgaagacactttctcctaaatattaagatcattaacacgtttccagacaggaagaatgtactgttgttagctttagacaaacattatgctaatttcaaatctagagccaaaaacatgctcccaccacaatgtggacgtcttatttgtcttggtttcctcccatgtctgatcagcagatggaaacgcaagtgcttcagctcctaaggggcgctacggactgccagaaggtaatcaaaaccacaggctacagatgatgtggatggggaggaattccgctcttctgggcaaactccgggtttggctcctcctgcctcgatttcctccttcctctgcctgttacctttcctgcctcaggg

SEQ ID NO: 25377 - DNA, 396 bp, Homo sapiens
agttcatgtcttggaattttgcttgcactgtgcaagagacagagcctttcaaaggcaattgggtcatgaggactctgctgtcatgaacagattaatgccattatcatgggagtagttcagttatcataggagtggcttttatataaaagtgagctctgtctcacatgctctcttttgccctactaccctggtaccatgttttgatgcagcaagaaggctttcacccgatgttgagcagatgccagcaccatgctcttagacttcttagtctccagaactatgagccaaacaaacttattttctttataaactaaccagtctgtggtattctgttataccatcagaaggcagactaaaacacggtacacacctgaaatgtaagatgtagctaactga

SEQ ID NO: 25378 - DNA, 433 bp, Homo sapiens
actacaccttgggtacagtgtacactgctcaggtgatgggtatactaaaatctcagaaattaccaccaaagaacttatttatgtaaccaaacaccacctgttccccaaaaacctattgaaagaaaaagaaatagtgatatagaagaagagtaaatcacagtattagtattttagagtggaaagagtaaaaatgatgcaaggaatccattttcaccatttataagctacatggacctgtgctcttgttgcttaatctttgaaccttggttatgagttattgtaaggattacatgaagaccttgctttcaggacagatcctgcctgtggccaggagctagcctcccaatccacctgcttcccattcatcctcattgtgtaccttcactgagggcttgtaccagagcattgtcatgtcctgtgtaacactgggttc

SEQ ID NO: 25379 - DNA, 324 bp, Homo sapiens
gaagttcaactatctttaagagaaagacacatgaacgctactgccacatttggtgaaatttccaagcaacggctgtggcagaactacatttttaccaggcagaacctgctgtgaagggggtgaaacccagtagcccagctgagtttcccagtgtaaagttctgtcgctgcctaccaggacttttcaatggtcaccttcctctgagggggccaaggagaggtccgagggcctagggatgacagacacacagagctctctgcagcagcgggtttaggacacatggtgacttggcagttgtcatccctgttcttgaaggaagagcgt

SEQ ID NO: 25380 - DNA, 237 bp, Homo sapiens
gactccttttcacatgtgctggttatcagcatgggacttttccattcactctttgaattattcatttgggggacacagatagacctctgtgtctttcataaaaagtgtccattggccggttgcagtgtctcatgcctgtaatcccagcactttgggaggctgaggagggcagatcacgaggtcaggagttcaagaccagcctggccaatatggtgaaatcccatctctactaaaaat

SEQ ID NO: 25381 - DNA, 383 bp, Homo sapiens
aatatttgcctaaaagtcctttaatattttgttacatttatggctaggtattttatgttttggttgcttttataagtagtaattttttattttttaaccatcagttactggtgtatagatatgcagctgacttttgtatatcaaatttatgtctagaaaccttactaatctcagatttatttgggttttttctgggaaagacaatcatattatctggaaataatgccaattttgtttttaaatttgtagttcttatactttgtatttctttttcttgtcttattgcacaatgtgggaaccttcagtagaatgttcactataaatggcactggcaaacatttttgctttatttgactttaaaggagttgcttttaatatttgac

SEQ ID NO: 25382 - DNA, 533 bp, Homo sapiens
aaggaagcaaggaaagaaggaaggaaggaaagaagggagggaaggaaggagagagaaagaaagattgtttggtaaggagtaatgacattctcttgcatttaaaagtggcatatttgcttgaaatggaaatagaattctggtcccttttgcaactactgaagaaaaaaaaaagcagtttcagccctgaatgttgtagatttgaaaaaaaaaaaaaattggagctattgagagatctgcctctgtaggagtatggtcccaggcccacaaagttaaagtgcatcagccacaaatatgtgtccatttgagttttggttctgagaatactcctcataaagatatagaatcactccctcctcctaactcgcaaaaggctgaacagtgtatagtatgttacatttaaataaaaacaataaaaatgttgggaaaagaaaattaaaatattgtccttgtttgttttattagtcagaaactctacctggtaataaagagagaagctcaagtgtgtgcatggcaggatgtggttaaatgcccca

SEQ ID NO: 25383 - DNA, 259 bp, Homo sapiens
taacagaatatggagtgcaaacaacataacgacatgatgtcaaagtttcaaatatgtatcacgtttttaaaagccagaaaaatgtgactcattcttaaggaaacagaccgtcaaaatatgacaactcaagatgacccagctggaattcaaaatgaacaaataaataaataaattcaagtattataaatatgctcattgaagcaatgtaaaatattatcgtagtgagtaaaactatatgaaattttagaatagaaataca

SEQ ID NO: 25384 - DNA, 377 bp, Homo sapiens
aacaaggcactcacattcccacacatgggtgccagaggagacctagtgaagattcaggactttcaccattacctagcaagaatgaagccacaccactatggtgttagtggaaaccacatggggagcagtattaagacaccctggtgcctaccagccagggtgatattagcagaggcctagaggggaacctgaactcctgtcccacctagcagtaatgaagagcccctttcctctggtgtcaacaaaggctgagtggggaacctggattttcaatcctgaagcagaagaatcacttgaaccgaggaggcagaggttgcagtgagctgagatcgtgccattgcactccagcctaggcaacaagagtgaaactccatctc

SEQ ID NO: 25385 - DNA, 420 bp, Homo sapiens
tcttgagacagagtcttgctctgtcgcccaggctggagtgcagtggtgcaatctcggctcactgcaagctctgcctcctgggttcacgccattctcccgcctcagcctcctgagtagctgggactgcaggtgcccaccaccacgcccggctaattttttgtttttgtatttttagtagagatgggggtttcacagtgttaatccggatggtctcgatctcctgaccttgtgatcctcccacctcggcctcccaaagttctgggattacaggtgtgagccaccacgcccggccgctgatatctctttaaaaggatctcttagacagttgcatgaagtgaggtggatttctttattttttatttttgagacggaatctcgctctgttgccaggctggagtgcagtggtgtgatctcagttca

SEQ ID NO: 25386 - DNA, 411 bp, Homo sapiens
ccattacaggaagcccaaatatcaatgtggtcaccacagaaagctgccagttaaagccctgtaatgtctctcacttaacaccttttctccccaaggcttctgtcaatgttccaccctaccattgctgacagaagggattagaggtcacacaggttttatagttttcattgatttcttgaatggaaataacagatgctgttaatgaagctccctgtgaatatacacacaaggtaatcccatagcatcttgcttgggggtgacatgtaaactctgctgctctgaaataaagctcctgtgtacctgccagcagcaacagggtgcagcagtttaatgtttaccccggaggaaagtttcatctgactgtcagggaaatacttcccttctaacaacctctgttatctccctcaaacc

SEQ ID NO: 25387 - DNA, 319 bp, Homo sapiens
  misc_feature (287)..(287): n is a, c, g, or t
cataataaacttgtaattttagatattatgcacatattattcaagttttaagcaaatctcatatgattggtcttttgtgataaatagtattttctaaaagacccttcagtaaattataatcacaaatcttccaagtcttcattttgcacatgcacacaaaacaatttctgtctctgtcactgagtctctatgtgtgtatttcagaatctggtgggttgcatcttactaaaacaacaacaaaaaccaacaaacaaaagtaccacattttagttttgtttggaaattgnggcctggaagtgtggggattgtttggatttgg

SEQ ID NO: 25388 - DNA, 467 bp, Homo sapiens
cgcccagcacctcgggcccggatgggcttctcgcgccccagggctgcggccacaccccgccggcccagaccccgcgggtagagaaaggaggtgcaaccctgagagccaagacgttgggcttggctttgctttgcgtttctttccttttttcttttgtttcttttcttcttcttttttttttaaccacatccaggaagaggagaaacctgtctcatgacaggaaacgaagagggaggatgcatccgaactgagggacattgtttcagttgcctcacctgacatactgtctcacctgagagagggaggccgaagaggcagccaatggtggctggagcaagccctgtcctcgttacctgggctgtggctgagccctggggctcaccggctgtatggccctgggcaagtcctcggagccttaggttctctgcaaaatggagatgatgtttaatagaaaatgtttctataac

SEQ ID NO: 25389 - DNA, 278 bp, Homo sapiens
gctcgaccaactgggcaccttttataaagattagtgtttgttgattagcgaaattaccttctctctactgtgaaaacaattcccactatccaacctgatggtaagaaagctgctacataattgtgtgtgaaggccctgaacttcaaacattcctagaacagatttttcctaatggtgacaggacttaaaatctaagaagccatatgaagcatcagaacccatctcaataactttacaaaagcacaagaatagtcaaggagaggttgagaaaggaagac

SEQ ID NO: 25390 - DNA, 457 bp, Homo sapiens
attaaggcacagatagattaatttgtcacaaagcttgcaggtggtgacaccaagcagtgtttctctggaacccatgctcttcttaaccacttgcttatatcacctttttctgaatcagcccatctttattaaattttgacaattgaagtcatgtttttggcaacgacgtgattatcaacattcataaatacgataccaaaatcatatagtaacacccagatggacagcattatgctgatatttcttgtcattgaaatgaaaagaattttttaaattcttggagataatttatcgtttcctaagattagaaacacaaggagatttggaagtcctgaggaagaatttaagataagtattgaaacctaataagtaaagacttaattgtattcattcagtcattcattcaagatctcagataaatgatggcatttattggatcaccaactcctccaaaaag

SEQ ID NO: 25391 - DNA, 650 bp, Homo sapiens
agggttcagaatacatcctggagtggtcatctcagtattctagagaactggaaccttttgtgagtaggaaggaaggtatgattccagttagtaaatatgactagtcctccacttctacctcagtttttctaaagtggggtgataaagcaggatatcataaatcagctttttatatcttgtttcagagaagggagcagggccaaccccaggcaaaaacaaaaaacgaagtggatattggtgacagtctgtactcctttctgcctatgtgccattttctgttatttcccagtcattcttgttcttcttttggtgctcactcccaaatcttcacaggggtactccttgggtaccttttggctcttatttagctactcttccccacctgctcaacacaatgcccattatctctgggagctgaccccatttaggattaggaaaaaacttcccaattctacaagagtgcaggtctttcttgataatagtctttattttccatttctacctccatttaggcagctacatttttccacctgcagcatggttagatgcctcctcagattttcctgaatattttgtgtaaacctccattaggttgcttacttggtactaaattgtaaggtcagtcatataaaaaatatgtatatactaag

SEQ ID NO: 25392 - DNA, 2386 bp, Homo sapiens
cttgcttagattgttgagaagcaaaaacactgatgaacatttggaagcaatgagaatgtaattctaatcatactcttttaataatgttgcaaaactctccaaacactactctgtgtggatgtctttcagaatatgatgaatactagtagtcttattctgcccttttctctctatcacaatatatacattctatattgcatacacatattttccaaatattacatataatttcatgtaatttatagacctattaaggcccaaccattttcttggataggggattctttagaagtccagcttaaataaagcccgtatagaaagtttttttaaaatttatacataatcacctaaagtaaccttatctactgaactcttagtacatgctactggaaccttttatcatgtttcttcctggcttgcattacaacactgttgacatatctcagccttacttctaggcttctttgagagcatgactcatgtttgtattcctcactgaggttgaatgaataagagaaactacagtagtaggaaaaaacagtacatgtagatatcaatgaatatgaaagggtcaaatggatctattatagtaagcacaaaatcaactgacaccagcaaagtaaacccaaaatttttaatggtattttaatagatcaagaggagcaagcagatttttgagacagttgtctcctactttctctatcacagggagtaattttaaaagaaaaatggagggtaagtttctttaagagaaaattgtagtttaaaacaggtcatgggataattagaaataatttaatttctttagaggattttaatctttcaactgcttgcaattagatcctaaggcaataaaagaataaggagatttggaaaaccattgtctgtaatctctgaagaaaagtggacattaggggagtcagttgaaaagcaaagctatcaccattttctaaagaggaaaaaggtgaacctcacaaactatagaccaaaaaaataggacatcgagagaaagaatatgaagctagcataggttcacaaagaatgagtcaaatcaaacaacatgcattttttatttataaagcatgacttgttcattgtcaattcatgttagcttaatcattaggcattaatgccatcactgcaatgcatatgtcagcaataaataatcaaagaccaggcttccatcattctgtttaatatcttcaagtaatgcttaagtttgcaaatgctcttttaacacattctccatatgcagcctgcccagcactgcacacaatagacctgttacttccccctcacgagcactcctaatatttcatgtgctcatccaattgacttctcccactggtgcctcatattgaatttgtagaatcacacctgctcctttttcaaaactcttctgagttttttcttaaataattcactgaccccaaagttgtcagatatttgaagactactcgcacaattttaatattataaatgtataatgtaaatgtaattaagatttgtataatgtacgatgtactttggtaaataaaagtatgctgtgaataaatacgtatgatacaattcaaaattttacataaatatgtgataaaatttagctcatattctttttttttttctttgagacggagtctcactctgttgcacccaggctagagtgcagcagcatgatctcagctcactgcaacctctacctcctgggttcaaacaattctcctgcctcagcctcctgagtagctgggattacaggtgcccgccaccatgcccagctaatttttttctatttttgttgttgttgttgtttttagtagagacggggtttcaccatgttggtcaggctggtcttgaactcctgacctcagataatccacctgcctcggcctcccaaagttctgggattacagacgtgaaccacggtgcccggcctagttcatgttctttaaggacaattatgaatatttttatgcactgttaattttcattaagatattgatcaattaatagctatatatgttctataaattaatcctatctagtttcaatcttaaattgtttgcatataccaatctagtttattgtttgcatatattttatagtgtagagattaggcattttaataaaattttaaaatttccaggacatactgttaatgactatgcttcctaatataggccataattaatttttttctattgtcaacaatattttggtagggatgatcaggaaataaggaaatgtttccttcatttgttaacaataggtgtttggggattttaaaatgaaaattgaagaagtaaaagacaccatatatttagtttgtttgatttcgtggcttcaagagttcaataatttattgaaatattttacagaccaaagaaca

SEQ ID NO: 25393 - DNA, 347 bp, Homo sapiens
tgtctttctgaatatttaagggtaaaatttttctacttttaaagcttaaaaaaatgtttttttactactgtaaaagtaatgcagagaaatgttcacttaccaaacacatacctttgtaaaaatcaccacttaaagtttgtttctaaagattttaggacaccaagatgcaaataatatttttggctgttacctgctctttcactactgctgagtctgcagtggcaagatagctacacagtacctcagccctcctgctcagtttttaacatctattgataatactaattacaagaaaatttaaaatgtctttttgcaaaaaaataccataagcagtcaaaacacaatta

SEQ ID NO: 25394 - DNA, 715 bp, Homo sapiens
agcagccaggagctgcctacgaggagggacgaaggctggccaggcctccactctagacaggaagtctagtctagagtctatatggtcccagccaggactatgtagccatttgggagggagaactctatgttcttcccggcaaaaacgtgtgggcctggccggccacgcttcgctttggaggggtgcagtggggtgccgaggctcaggcagcatgacgacggagacctttgtgaaggatatcaagcctgggctcaagaatctgaaccttatcttcattgtgctggagacaggccgagtgaccaagacaaaggacgggcatgaggttcggacctgcaaagtggcggacaaaacaggcagcatcaatatctctgtctgggacgatgttggcaatctgatccagcctggggacattatccggctcaccaaagggtacgcttcagttttcaaaggttgtctgacactatatactggccgtgggggtgatctgcagaagattggagaattctgtatggtttattctgaggttcctaacttcagtgagccaaacccagagtacagcacccagcaggcacccaacaaggcgtgcagaacgacagcaaccttcaacttcccagctacactggacctctgtgcctctcagctctgagaacgagggatggctgatgccacaggtcgggtgccatcgaataatgcaagccagccgggcaacgggacc

SEQ ID NO: 25395 - DNA, 2271 bp, Homo sapiens
tccgggaatgtccgcactcccgcgttccacggggcagcatccggcggcagcggagcctgtggctccccctgcgggctgctcagcggcgtgcacagtcctgccggctggcttgggtgggtggtgggctgcgggtaggggaggggatggaccgagtcccggcttgtcgggatgagggttccggaagatctggccagtaagattctactccctggctgtgcaccgggttccctacccctgtctacgtcggctccgccacttcgcggcttgagactaaaagagcatcccggcagggggccttccagccccaaagcagcctgtccagagacccccaaattctgatcctgaagttggaggcctccggggatgttcttttttaatcttttagaagggttagaggggttgaggctgcctgaccccagcctaatggggtaggtaggccttgggaagtggagcatgggggcaaaggatccaagcattgagccttcatcctctattccccatccagtggggtgccgaggctcaggcagcatgacgacggagacctttgtgaaggatatcaagcctgggctcaagaatctgaaccttatcttcattgtgctggagacaggccgagtgaccaagacaaaggacgggcatgaggttcggacctgcaaagtggcggacaaaacaggcagcatcaatatctctgtctgggacgatgttggcaatctgatccagcctggggacattatccggctcaccaaagggtacgcttcagttttcaaaggttgtctgacactatatactggccgtgggggtgatctgcagaagattggagaattctgtatggtttattctgaggttcctaacttcagtgagccaaacccagagtacagcacccagcaggcacccaacaaggcggtgcagaacgacagcaacccttcagcttcccagcctaccactggaccctctgctgcctctccagcctctgagaaccagaatgggaatggactgagtgccccaccaggtcccggtggtggcccacatccccctcatactccctcccacccacccagcacccgaatcactcgaagccagcccaaccacacacctgcaggcccgcctggcccttccagcaaccctgttagtaacggcaaagaaacccggaggagcagcaagagatagcatgacattctttcttcctgccaccaaccacatcccaagtgtcccctggagagcaagatagccttccactgattggctggtgtagcagtattttagccactgaacttcagtggagggtggtgagcagtgtccttatccaccctaatctcatactccctcattgtccagctgaactacctgtcccctgggagtcaggaccctctgcctgctctctttcctctttagaaatggcagttactggctgggcgcagtggctcacgcttgtaatcccagcactttgggaagccgaggtgggcggatcacctgaggtcgggagttcaagaccagcctgaccaacatggagaaaccccgtgtctactaaaaatacagaattagccaggcatggtggcgtatgcctgtaatcccagctacttaggaggctgaggcaggagaatctcttgaaaccgggaggcggaggttgaggtgagccgaaattgcaccattgcactccagcctgggcaataagagcgaaactccatctcaaaaaaaaaagaaagaaagaaagaaagaaatggcagttaccatctgtttcttctgtgtgagacatgggagtctaactgaagtctctccttcctaataaatgttaccactctaaaaaaaaaaaaaaaaaaaaaaaaaaaaaaaaaaaaaaaaaaaaaaaaaaaaaaaaaaaaaaaaaaaaaaacaaaaaaacacccatttcaaacgccttgcctggcatatccctggcgccacctgggtaaaccccgtggaggcccatatcaaatccctctgcggacaaactccccttccaggcctggcccatttcccccttgcaacctcctagaaaatcccttattgccaacttgtcaaaccgccaagcgggaatttccccttttaaaccggtggtaaattttggaaaaaccccttaaaaattaaccaaatagccccaatttgcaaaaatgggacaaaacctggaaaaccccttaatttgaaaaaaatttcccccaaaatgggacaaggattccccactttggaaccagggccccctactttagaccctctacccctttgggtatacccccctttttctgccatttccgcctcttc

SEQ ID NO: 25396 - DNA, 1609 bp, Homo sapiens
agcagccaggagctgcctacgaggagggacgaaggctggccaggcctccactctagacaggaagtctagtctagagtctatatggtcccagccaggactatgtagccatttgggagggagaactctatgttcttcccggcaaaaacgtgtgggcctggccggccacgcttcgctttggaggggtgcaggttccatttcttccaagaagggtgagcctgccttttgtctctggtgtaaatgccacttttcccagagaccttgaccaagctgggtagtgcattaaagatgagaaccccaaatcaggaacaaagataacgtggggtgccgaggctcaggcagcatgacgacggagacctttgtgaaggatatcaagcctgggctcaagaatctgaaccttatcttcattgtgctggagacaggccgagtgaccaagacaaaggacgggcatgaggttcggacctgcaaagtggcggacaaaacaggcagcatcaatatctctgtctgggacgatgttggcaatctgatccagcctggggacattatccggctcaccaaagggtacgcttcagttttcaaaggttgtctgacactatatactggccgtgggggtgatctgcagaagattggagaattctgtatggtttattctgaggttcctaacttcagtgagccaaacccagagtacagcacccagcaggcacccaacaaggcggtgcagaacgacagcaacccttcagcttcccagcctaccactggaccctctgctgcctctccagcctctgagaaccagaatgggaatggactgagtgccccaccaggtcccggtggtggcccacatccccctcatactccctcccacccacccagcacccgaatcactcgaagccagcccaaccacacacctgcaggcccgcctggcccttccagcaaccctgttagtaacggcaaagaaacccggaggagcagcaagagatagcatgacattctttcttcctgccaccaaccacatcccaagtgtcccctggagagcaagatagccttccactgattggctggtgtagcagtattttagccactgaacttcagtggagggtggtgagcagtgtccttatccaccctaatctcatactccctcattgtccagctgaactacctgtcccctgggagtcaggaccctctgcctgctctctttcctctttagaaatggcagttactggctgggcgcagtggctcacgcttgtaatcccagcactttgggaagccgaggtgggcggatcacctgaggtcgggagttcaagaccagcctgaccaacatggagaaaccccgtgtctactaaaaatacagaattagccaggcatggtggcgtatgcctgtaatcccagctacttaggaggctgaggcaggagaatctcttgaaaccgggaggcggaggttgaggtgagccgaaattgcaccattgcactccagcctgggcaataagagcgaaactccatctcaaaaaaaaaagaaagaaagaaagaaagaaatggcagttaccatctgtttcttctgtgtgagacatgggagtctaactgaagtctctccttcctaataaatgttaccactcta

SEQ ID NO: 25397 - DNA, 1485 bp, Homo sapiens
tccgggaatgtccgcactcccgcgttccacggggcagcatccggcggcagcggagcctgtggctccccctgcgggctgctcagcggcgtgcacagtcctgccggctggcttgggtgggtggtgggctgcgggtaggggaggggatggaccgagtcccggcttgtcgggatgagggttccggaagatctggccatggggtgccgaggctcaggcagcatgacgacggagacctttgtgaaggatatcaagcctgggctcaagaatctgaaccttatcttcattgtgctggagacaggccgagtgaccaagacaaaggacgggcatgaggttcggacctgcaaagtggcggacaaaacaggcagcatcaatatctctgtctgggacgatgttggcaatctgatccagcctggggacattatccggctcaccaaagggtacgcttcagttttcaaaggttgtctgacactatatactggccgtgggggtgatctgcagaagattggagaattctgtatggtttattctgaggttcctaacttcagtgagccaaacccagagtacagcacccagcaggcacccaacaaggcggtgcagaacgacagcaacccttcagcttcccagcctaccactggaccctctgctgcctctccagcctctgagaaccagaatgggaatggactgagtgccccaccaggtcccggtggtggcccacatccccctcatactccctcccacccacccagcacccgaatcactcgaagccagcccaaccacacacctgcaggcccgcctggcccttccagcaaccctgttagtaacggcaaagaaacccggaggagcagcaagagatagcatgacattctttcttcctgccaccaaccacatcccaagtgtcccctggagagcaagatagccttccactgattggctggtgtagcagtattttagccactgaacttcagtggagggtggtgagcagtgtccttatccaccctaatctcatactccctcattgtccagctgaactacctgtcccctgggagtcaggaccctctgcctgctctctttcctctttagaaatggcagttactggctgggcgcagtggctcacgcttgtaatcccagcactttgggaagccgaggtgggcggatcacctgaggtcgggagttcaagaccagcctgaccaacatggagaaaccccgtgtctactaaaaatacagaattagccaggcatggtggcgtatgcctgtaatcccagctacttaggaggctgaggcaggagaatctcttgaaaccgggaggcggaggttgaggtgagccgaaattgcaccattgcactccagcctgggcaataagagcgaaactccatctcaaaaaaaaaagaaagaaagaaagaaagaaatggcagttaccatctgtttcttctgtgtgagacatgggagtctaactgaagtctctccttcctaataaatgttaccactcta

SEQ ID NO: 25398 - DNA, 857 bp, Homo sapiens
tccgggaatgtccgcactcccgcgttccacggggcagcatccggcggcagcggagcctgtggctccccctgcgggctgctcagcggcgtgcacagtcctgccggctggcttgggtgggtggtgggctgcgggtaggggaggggatggaccgagtcccggcttgtcgggatgagggttccggaagatctggccagtaagattctactccctggctgtgcaccgggttccctacccctgtctacgtcggctccgccacttcgcggcttgagactaaaagagcatcccggcagggggccttccagccccaaagcagcctgtccagagacccccaaattctgatcctgaagttggaggcctccggggatgttcttttttaatcttttagaagggttagaggggttgaggctgcctgaccccagcctaatggggtaggtaggccttgggaagtggagcatgggggcaaaggatccaagcattgagccttcatcctctattccccatccagtggggtgccgaggctcaggcagcatgacgacggagacctttgtgaaggatatcaagcctgggctcaagaatctgaaccttatcttcattgtgctggagacaggccgagtgaccaagacaaaggacgggcatgaggttcggacctgcaaagtggcggacaaaacaggcagcatcaatatctctgtctgggacgatgttggcaatctgatccagcctggggacattatccggctcaccaaagggtacgcttcagttttcaaaggttgtctgacactatatactggccgtgggggtgatctgcagaagattggagaccactgtcgaattcggtaccgagctcgatcgtatcagcc

SEQ ID NO: 25399 - DNA, 210 bp, Homo sapiens
ggaggcggaggttgaggtgagccgaaattgcaccattgcactccagcctgggcaataagagcgaaactccatctcaaaaaaaaaagaaagaaagaaagaaagaaatggcagttaccatctgtttcttctgtgtgagacatgggagtctaactgaagtctctccttcctaataaatgttaccactctactctgtgttggactcctttgctt

SEQ ID NO: 25400 - DNA, 1405 bp, Homo sapiens
tccgggaatgtccgcactcccgcgttccacggggcagcatccggcggcagcggagcctgtggctccccctgcgggctgctcagcggcgtgcacagtcctgccggctggcttggtggggtgccgaggctcaggcagcatgacgacggagacctttgtgaaggatatcaagcctgggctcaagaatctgaaccttatcttcattgtgctggagacaggccgagtgaccaagacaaaggacgggcatgaggttcggacctgcaaagtggcggacaaaacaggcagcatcaatatctctgtctgggacgatgttggcaatctgatccagcctggggacattatccggctcaccaaagggtacgcttcagttttcaaaggttgtctgacactatatactggccgtgggggtgatctgcagaagattggagaattctgtatggtttattctgaggttcctaacttcagtgagccaaacccagagtacagcacccagcaggcacccaacaaggcggtgcagaacgacagcaacccttcagcttcccagcctaccactggaccctctgctgcctctccagcctctgagaaccagaatgggaatggactgagtgccccaccaggtcccggtggtggcccacatccccctcatactccctcccacccacccagcacccgaatcactcgaagccagcccaaccacacacctgcaggcccgcctggcccttccagcaaccctgttagtaacggcaaagaaacccggaggagcagcaagagatagcatgacattctttcttcctgccaccaaccacatcccaagtgtcccctggagagcaagatagccttccactgattggctggtgtagcagtattttagccactgaacttcagtggagggtggtgagcagtgtccttatccaccctaatctcatactccctcattgtccagctgaactacctgtcccctgggagtcaggaccctctgcctgctctctttcctctttagaaatggcagttactggctgggcgcagtggctcacgcttgtaatcccagcactttgggaagccgaggtgggcggatcacctgaggtcgggagttcaagaccagcctgaccaacatggagaaaccccgtgtctactaaaaatacagaattagccaggcatggtggcgtatgcctgtaatcccagctacttaggaggctgaggcaggagaatctcttgaaaccgggaggcggaggttgaggtgagccgaaattgcaccattgcactccagcctgggcaataagagcgaaactccatctcaaaaaaaaaagaaagaaagaaagaaagaaatggcagttaccatctgtttcttctgtgtgagacatgggagtctaactgaagtctctccttcctaataaatgttaccactcta

SEQ ID NO: 25401 - DNA, 1797 bp, Homo sapiens
tccgggaatgtccgcactcccgcgttccacggggcagcatccggcggcagcggagcctgtggctccccctgcgggctgctcagcggcgtgcacagtcctgccggctggcttgggtgggtggtgggctgcgggtaggggaggggatggaccgagtcccggcttgtcgggatgagggttccggaagatctggccagtaagattctactccctggctgtgcaccgggttccctacccctgtctacgtcggctccgccacttcgcggcttgagactaaaagagcatcccggcagggggccttccagccccaaagcagcctgtccagagacccccaaattctgatcctgaagttggaggcctccggggatgttcttttttaatcttttagaagggttagaggggttgaggctgcctgaccccagcctaatggggtaggtaggccttgggaagtggagcatgggggcaaaggatccaagcattgagccttcatcctctattccccatccagtggggtgccgaggctcaggcagcatgacgacggagacctttgtgaaggatatcaagcctgggctcaagaatctgaaccttatcttcattgtgctggagacaggccgagtgaccaagacaaaggacgggcatgaggttcggacctgcaaagtggcggacaaaacaggcagcatcaatatctctgtctgggacgatgttggcaatctgatccagcctggggacattatccggctcaccaaagggtacgcttcagttttcaaaggttgtctgacactatatactggccgtgggggtgatctgcagaagattggagaattctgtatggtttattctgaggttcctaacttcagtgagccaaacccagagtacagcacccagcaggcacccaacaaggcggtgcagaacgacagcaacccttcagcttcccagcctaccactggaccctctgctgcctctccagcctctgagaaccagaatgggaatggactgagtgccccaccaggtcccggtggtggcccacatccccctcatactccctcccacccacccagcacccgaatcactcgaagccagcccaaccacacacctgcaggcccgcctggcccttccagcaaccctgttagtaacggcaaagaaacccggaggagcagcaagagatagcatgacattctttcttcctgccaccaaccacatcccaagtgtcccctggagagcaagatagccttccactgattggctggtgtagcagtattttagccactgaacttcagtggagggtggtgagcagtgtccttatccaccctaatctcatactccctcattgtccagctgaactacctgtcccctgggagtcaggaccctctgcctgctctctttcctctttagaaatggcagttactggctgggcgcagtggctcacgcttgtaatcccagcactttgggaagccgaggtgggcggatcacctgaggtcgggagttcaagaccagcctgaccaacatggagaaaccccgtgtctactaaaaatacagaattagccaggcatggtggcgtatgcctgtaatcccagctacttaggaggctgaggcaggagaatctcttgaaaccgggaggcggaggttgaggtgagccgaaattgcaccattgcactccagcctgggcaataagagcgaaactccatctcaaaaaaaaaagaaagaaagaaagaaagaaatggcagttaccatctgtttcttctgtgtgagacatgggagtctaactgaagtctctccttcctaataaatgttaccactcta

SEQ ID NO: 25402 - DNA, 2217 bp, Homo sapiens
tccgggaatgtccgcactcccgcgttccacggggcagcatccggcggcagcggagcctgtggctccccctgcgggctgctcagcggcgtgcacagtcctgccggctggcttgggtgggtggtgggctgcgggtaggggaggggatggaccgagtcccggcttgtcgggatgagggttccggaagatctggccagtaagattctactccctggctgtgcaccgggttccctacccctgtctacgtcggctccgccacttcgcggcttgagactaaaagagcatcccggcagggggccttccagccccaaagcagcctgtccagagacccccaaattctgatcctgaagttggaggcctccggggatgttcttttttaatcttttagaagggttagaggggttgaggctgcctgaccccagcctaatggggtaggtaggccttgggaagtggagcatgggggcaaaggatccaagcattgagccttcatcctctattccccatccagtggggtgccgaggctcaggcagcatgacgacggagacctttgtgaaggatatcaagcctgggctcaagaatctgaaccttatcttcattgtgctggagacaggccgagtgaccaagacaaaggacgggcatgaggttcggacctgcaaagtggcggacaaaacaggcagcatcaatatctctgtctgggacgatgttggcaatctgatccagcctggggacattatccggctcaccaaagggtacgcttcagttttcaaaggttgtctgacactatatactggccgtgggggtgatctgcagaagattggagaattctgtatggtttattctgaggttcctaacttcagtgagccaaacccagagtacagcacccagcaggcacccaacaaggcggtgcagaacgacagcaacccttcagcttcccagcctaccactggaccctctgctgcctctccagcctctgagaaccagaatgggaatggactgagtgccccaccaggtcccggtggtggcccacatccccctcatactccctcccacccacccagcacccgaatcactcgaagccagcccaaccacacacctgcaggcccgcctggcccttccagcaaccctgttagtaacggcaaagaaacccggaggagcagcaagagatagcatgacattctttcttcctgccaccaaccacatcccaagtgtcccctggagagcaagatagccttccactgattggctggtgtagcagtattttagccactgaacttcagtggagggtggtgagcagtgtccttatccaccctaatctcatactccctcattgtccagctgaactacctgtcccctgggagtcaggaccctctgcctgctctctttcctctttagaaatggcagttactggctgggcgcagtggctcacgcttgtaatcccagcactttgggaagccgaggtgggcggatcacctgaggtcgggagttcaagaccagcctgaccaacatggagaaaccccgtgtctattaggaggctgaggcaggagaatctcttgaaaccgggaggcggaggttgaggtgagccgaaattgcaccattgcactccagcctgggcaataagagcgaaactccatctcaaaaaaaaaagaaagaaagaaagaaagaaatggcagttaccatctgtttcttctgtgtgagacatgggagtctaactgaagtctctccttcctaataaatgttaccactctaaaaaaaaaaaaaaaaaaaaaaaaaaaaaaaaaaaaaaaaaaaaaaaaaaaaaaaaaaaaaaaaaaaaaaacaaaaaaacacccatttcaaacgccttgcctggcatatccctggcgccacctgggtaaaccccgtggaggcccatatcaaatccctctgcggacaaactccccttccaggcctggcccatttcccccttgcaacctcctagaaaatcccttattgccaacttgtcaaaccgccaagcgggaatttccccttttaaaccggtggtaaattttggaaaaaccccttaaaaattaaccaaatagccccaatttgcaaaaatgggacaaaacctggaaaaccccttaatttgaaaaaaatttcccccaaaatgggacaaggattccccactttggaaccagggccccctactttagaccctctacccctttgggtatacccccctttttctgccatttccgcctcttc

SEQ ID NO: 25403 - DNA, 2189 bp, Homo sapiens
tccgggaatgtccgcactcccgcgttccacggggcagcatccggcggcagcggagcctgtggctccccctgcgggctgctcagcggcgtgcacagtcctgccggctggcttgggtgggtggtgggctgcgggtaggggaggggatggaccgagtcccggcttgtcgggatgagggttccggaagatctggccagtaagattctactccctggctgtgcaccgggttccctacccctgtctacgtcggctccgccacttcgcggcttgagactaaaagagcatcccggcagggggccttccagccccaaagcagcctgtccagagacccccaaattctgatcctgaagttggaggcctccggggatgttcttttttaatcttttagaagggttagaggggttgaggctgcctgaccccagcctaatggggtaggtaggccttgggaagtggagcatgggggcaaaggatccaagcattgagccttcatcctctattccccatccagtggggtgccgaggctcaggcagcatgacgacggagacctttgtgaaggatatcaagcctgggctcaagaatctgaaccttatcttcattgtgctggagacaggccgagtgaccaagacaaaggacgggcatgaggttcggacctgcaaagtggcggacaaaacaggcagcatcaatatctctgtctgggacgatgttggcaatctgatccagcctggggacattatccggctcaccaaagggtacgcttcagttttcaaaggttgtctgacactatatactggccgtgggggtgatctgcagaagattggagagtgcagaacgacagcaacccttcagcttcccagcctaccactggaccctctgctgcctctccagcctctgagaaccagaatgggaatggactgagtgccccaccaggtcccggtggtggcccacatccccctcatactccctcccacccacccagcacccgaatcactcgaagccagcccaaccacacacctgcaggcccgcctggcccttccagcaaccctgttagtaacggcaaagaaacccggaggagcagcaagagatagcatgacattctttcttcctgccaccaaccacatcccaagtgtcccctggagagcaagatagccttccactgattggctggtgtagcagtattttagccactgaacttcagtggagggtggtgagcagtgtccttatccaccctaatctcatactccctcattgtccagctgaactacctgtcccctgggagtcaggaccctctgcctgctctctttcctctttagaaatggcagttactggctgggcgcagtggctcacgcttgtaatcccagcactttgggaagccgaggtgggcggatcacctgaggtcgggagttcaagaccagcctgaccaacatggagaaaccccgtgtctactaaaaatacagaattagccaggcatggtggcgtatgcctgtaatcccagctacttaggaggctgaggcaggagaatctcttgaaaccgggaggcggaggttgaggtgagccgaaattgcaccattgcactccagcctgggcaataagagcgaaactccatctcaaaaaaaaaagaaagaaagaaagaaagaaatggcagttaccatctgtttcttctgtgtgagacatgggagtctaactgaagtctctccttcctaataaatgttaccactctaaaaaaaaaaaaaaaaaaaaaaaaaaaaaaaaaaaaaaaaaaaaaaaaaaaaaaaaaaaaaaaaaaaaaaacaaaaaaacacccatttcaaacgccttgcctggcatatccctggcgccacctgggtaaaccccgtggaggcccatatcaaatccctctgcggacaaactccccttccaggcctggcccatttcccccttgcaacctcctagaaaatcccttattgccaacttgtcaaaccgccaagcgggaatttccccttttaaaccggtggtaaattttggaaaaaccccttaaaaattaaccaaatagccccaatttgcaaaaatgggacaaaacctggaaaaccccttaatttgaaaaaaatttcccccaaaatgggacaaggattccccactttggaaccagggccccctactttagaccctctacccctttgggtatacccccctttttctgccatttccgcctcttc

SEQ ID NO: 25404 - DNA, 1077 bp, Homo sapiens
tccgggaatgtccgcactcccgcgttccacggggcagcatccggcggcagcggagcctgtggctccccctgcgggctgctcagcggcgtgcacagtcctgccggctggcttgggtgggtggtgggctgcgggtaggggaggggatggaccgagtcccggcttgtcgggatgagggttccggaagatctggccagtaagattctactccctggctgtgcaccgggttccctacccctgtctacgtcggctccgccacttcgcggcttgagactaaaagagcatcccggcagggggccttccagccccaaagcagcctgtccagagacccccaaattctgatcctgaagttggaggcctccggggatgttcttttttaatcttttagaagggttagaggggttgaggctgcctgaccccagcctaatggggtaggtaggccttgggaagtggagcatgggggcaaaggatccaagcattgagccttcatcctctattccccatccagtggggtgccgaggctcaggcagcatgacgacggagacctttgtgaaggatatcaagcctgggctcaagaatctgaaccttatcttcattgtgctggagacaggccgagtgaccaagacaaaggacgggcatgaggttcggacctgcaaagtggcggacaaaacaggcagcatcaatatctctgtctgggacgatgttggcaatctgatccagcactttgggaagccgaggtgggcggatcacctgaggtcgggagttcaagaccagcctgaccaacatggagaaaccccgtgtctactaaaaatacagaattagccaggcatggtggcgtatgcctgtaatcccagctacttaggaggctgaggcaggagaatctcttgaaaccgggaggcggaggttgaggtgagccgaaattgcaccattgcactccagcctgggcaataagagcgaaactccatctcaaaaaaaaaagaaagaaagaaagaaagaaatggcagttaccatctgtttcttctgtgtgagacatgggagtctaactgaagtctctccttcctaataaatgttaccactcta

SEQ ID NO: 25405 - DNA, 2880 bp, Homo sapiens
aaagtagatccggccaggcagacaaaagtttgggagagaagttcggtctgtggctagcgtgagagctaggggggcgggggccggggagagtggggcagtcgggcgagtcgacgcgtgaacagatagacctgcggactggacagccgcggccagagaccctgctagccccgctcagccccagatgcgcggggggacgcagcccctcccgctgggggatgctgtgggattcctggcgcagggcatccaggccgcccgctaagcccctgtgcctcccctgtgcccctggggaaccagagtccggctgcagggaaagagaaccggccgccgagacgccgcagggtgccaggcggggagggggcgagaggccccaggcccgagggcatggagcggttaggagagaaagccagtcgcctgctggagaagttcggccgcagaaagggtgaatctagccggtctgggtctgacgggacccccgggccgggcaaggggcgcctaagtgggttggggggacctaggaagtcagggccccgaggagctactgggggacctggggatgagccgttggagccggcccgggagcaaggttccctggacgctgagcgaaatcagcgcggctcctttgaggcgccgcgctacgaaggctcttttcccgcggggccgccgcccacccgggccttgcctctacctcagtcgttgccccccgattttcggctggagcccacggccccggccctcagcccccgctctagcttcgccagtagctcggccagcgacgcgagcaagccgtccagcccccggggcagcctgctgctggacggggcgggggctggcggagctggaggtagccggccctgcagcaatcgcaccagcggcatcagcatgggctacgaccagcgccacgggagccccttgccagcggggccgtgcctgtttggcccacccctggccggagcaccggcaggctattctcccggaggggtcccgtccgcctacccggagctccacgccgccctggaccgattgtacgctcagcggcccgcggggttcggctgccaggaaagccgccactcgtatcccccggccctgggcagccctggagctctagccggggccggagtgggagcggcggggcccttggagagacggggggcgcaacccggacgacactctgtgaccggctacggggactgcgccgtgggcgcccggtaccaggacgagctaacagctttgcttcgcctgacggtgggcaccggtgggcgagaagccggagcccgcggagaaccctcggggattgagccgtcgggtctggaggagccaccaggtcctttcgttccggaggccgcccgggcccggatgcgggagccagaggccagggaggactacttcggcacctgtatcaagtgcaacaaaggcatctatgggcagagcaatgcctgccaggccctggacagcctctaccacacccagtgctttgtttgctgctcttgtgggcgaactttgcgttgcaaggctttctacagtgtcaatggctctgtgtactgtgaggaagattatctgttttcagggtttcaggaggcagctgagaaatgctgtgtctgtggtcacttgattttggagaagatcctacaagcaatggggaagtcctatcatccaggctgtttccgatgcattgtttgcaacaagtgcctggatggcatccccttcacagtggacttctccaaccaagtatactgtgtcaccgactaccacaaaaattatgctcctaagtgtgcagcctgtggccaacccatcctcccctctgagggctgtgaggacatcgtgagggtgatatccatggaccgggattatcactttgagtgctaccactgtgaggactgccggatgcagctgagtgatgaggaaggctgctgctgtttccctctggatgggcacttgctctgccatggttgccacatgcagcggctcaatgcccgacaaccccctgccaactatatctgagctgcaatcactgctgctgctgtcaccctgcagacaaactgctgtggccagtgggcccctctgaggccagccaaggcaaagaatgcactctgcaggcctggcagaagagtcctctggggaggaccccaagggccggagacccaaagatcatgatattccaaatggattgtggaagagaaaccttatatttaccagggtgggggcgactggcctttttcccatgtgtgcagtctgagcttaggcacacacaggagggttccaggactttctgaacatctgattctgtatcttcagtatatatattttgtttgttttagagatgggatctcaccatgttgcccaggctagtcttgaactcctgggctcgaatgatcctcccaccttggcctcccaaagtgctgggattataggcgtaagccactgtgtctggcctagtgtatgattatgcatgagtcacgcaatgttctggtcctggattccaggagtagaggacctagctttaaatcaattagtttcatttgcttgaaactagttcacctaaagctagatctcttaaaaccaatttactgaaaacttgtttgcttaaagttaatgacttaatgactaatttgccaaaagctcaattcctattttggtgtgtttatatccatttaggtgtcctattcttttttgtcatgctttggatatttcaaggatttatatctattcatccaagagtacttctgagctattatcagcaacataaatttatcaaatttgcagcactttgtaaatgatgagattgcttcctacctttatggatgtctttttctatgttatctaccattcaaaaacttttttaaaaagtttaaagtttctagcaataaatacaattggtacaga

SEQ ID NO: 25406 - DNA, 4263 bp, Homo sapiens
aaagtagatccggccaggcagacaaaagtttgggagagaagttcggtctgtggctagcgtgagagctaggggggcgggggccggggagagtggggcagtcgggcgagtcgacgcgtgaacagatagacctgcggactggacagccgcggccagagaccctgctagccccgctcagccccagatgcgcggggggacgcagcccctcccgctgggggatgctgtgggattcctggcgcagggcatccaggccgcccgctaagcccctgtgcctcccctgtgcccctggggaaccagagtccggctgcagggaaagagaaccggccgccgagacgccgcagggtgccaggcggggagggggcgagaggccccaggcccgagggcatggagcggttaggagagaaagccagtcgcctgctggagaagttcggccgcagaaagggtgaatctagccggtctgggtctgacgggacccccgggccgggcaaggggcgcctaagtgggttggggggacctaggaagtcagggccccgaggagctactgggggacctggggatgagccgttggagccggcccgggagcaaggttccctggacgctgagcgaaatcagcgcggctcctttgaggcgccgcgctacgaaggctcttttcccgcggggccgccgcccacccgggccttgcctctacctcagtcgttgccccccgattttcggctggagcccacggccccggccctcagcccccgctctagcttcgccagtagctcggccagcgacgcgagcaagccgtccagcccccggggcagcctgctgctggacggggcgggggctggcggagctggaggtagccggccctgcagcaatcgcaccagcggcatcagcatgggctacgaccagcgccacgggagccccttgccagcggggccgtgcctgtttggcccacccctggccggagcaccggcaggctattctcccggaggggtcccgtccgcctacccggagctccacgccgccctggaccgattgtacgctcagcggcccgcggggttcggctgccaggaaagccgccactcgtatcccccggccctgggcagccctggagctctagccggggccggagtgggagcggcggggcccttggagagacggggggcgcaacccggacgacactctgtgaccggctacggggactgcgccgtgggcgcccggtaccaggacgagctaacagctttgcttcgcctgacggtgggcaccggtgggcgagaagccggagcccgcggagaaccctcggggattgagccgtcgggtctggaggagccaccaggtcctttcgttccggaggccgcccgggcccggatgcgggagccagaggccagggaggactacttcggcacctgtatcaagtgcaacaaaggcatctatgggcagagcaatgcctgccaggccctggacagcctctaccacacccagtgctttgtttgctgctcttgtgggcgaactttgcgttgcaaggctttctacagtgtcaatggctctgtgtactgtgaggaagattatctgttttcagggtttcaggaggcagctgagaaatgctgtgtctgtggtcacttgattttggagaagatcctacaagcaatggggaagtcctatcatccaggctgtttccgatgcattgtttgcaacaagtgcctggatggcatccccttcacagtggacttctccaaccaagtatactgtgtcaccgactaccacaaaaattatgctcctaagtgtgcagcctgtggccaacccatcctcccctctgagggctgtgaggacatcgtgagggtgatatccatggaccgggattatcactttgagtgctaccactgtgaggactgccggatgcagctgagtgatgaggaaggctgctgctgtttccctctggatgggcacttgctctgccatggttgccacatgcagcggctcaatgcccgacaaccccctgccaactatatctgagctgcaatcactgctgctgctgtcaccctgcagacaaactgctgtggccagtgggcccctctgaggccagccaaggcaaagaatgcactctgcaggcctggcagaagagtcctctggggaggaccccaagggccggagacccaaagatcatgatattccaaatggattgtggaagagaaaccttatatttaccagggtgggggcgactggcctttttcccatgtgtgcagtctgagcttaggcacacacaggagggttccaggactttctgaacatctgattctgtatcttcagtatatatattttgtttgttttagagatgggatctcaccatgttgcccaggctagtcttgaactcctgggctcgaatgatcctcccaccttggcctcccaaagtgctgggattataggcgtaagccactgtgtctggcctagtgtatgattatgcatgagtcacgcaatgttctggtcctggattccaggagtagaggacctagctttaaatcaattagtttcagctaaactgactagaaccaggtcaaagtgtaattctccctccagctcccccaaaccccagagttttggggttgtggttgatgcagtgtgggatgtccctgagaggtagcaagtctagggtggtgagttcctgctaggcaaccaaatttaagctcctcactttttgtgacacatggtgtcagatatggggtcccgcacctatatctggatgaagaggtagaaactctggacctcattaatgagttatttcttggccttcttctaaggactaggagagctccttatctgtctgagaatggggaccagctctgagtggggttgctgcctgtattccctgtttctcaggaacttacatgggtctggggaggctaggtaggtgattgtacgtggttgctcttctccttggctgggggaggtaatgagcagatctctgtgggtgtggagcttgttggggggatgtctaggaagcttcagcttagccacattcccaagtttaggtgcactgagccatatagcccagtgtatgcatgtgtgggtgtgttcatgcacacacacactctctctcttgtctctctgtctctctctcactctttcttactctcttctcaggtcacttgtacacttggtttcctagtagaagctcacttgccacctctcaggggggtcccggattgcatccatcacaatcccaaaactagagttggggggaactggagggagcaaaacactgatttgatactagtcagtttgcttgaaactagttcacctaaagctagatctcttaaaaccaatttactgaaaacttgtttgcttaaagttaatgacttaatgactaatttgccaaaagctcaattcctattttggtgtgtttatatccatttaggtgtcctattcttttttgtcatgctttggatatttcaaggatttatatctattcatccaagagtacttctgagctattatcagcaacataaatttatcaaatttgcagcactttgtaaatgatgagattgcttcctacctttatggatgtctttttctatgttatctaccattcaaaaacttttttaaaaagtttaaagtttctagcaataaatacaattggtacagacattttgtgtatcatttttttgtttcttaatccaatattcctttacaaattaaatgccttgaaaaatataatggagttcaatgtgattttgatgctttggtctaacttctacattcctactgttaaaaaggccagtatatcttaaacaaatgaataggcatgaggcatattcagttgacttacaatgaaaagttatacagacaacagtaataactaaaagggtgaatctgctaaatccttttgaaatgctgcagatttgataaatatttattttagactaattggttttaggtgaattggttttaggcaaattaatttagtaatctttgatctttagtcttcattttctgtcactcagtgagtttcttactggaaatgatgactcctgacaacagaatttccacatttgggggctattctaaggtgactatgccagccaacctgggaaatacataaaagagatctctgagtgagagggaaagaggtcagatttatacaactgagcgccagaggggaaaatgcaccttgttggagtgagaaatgttctgaaactgaattacttcttgtacagctgagatagcttcttctgaactattattaaataagtgaatacaaaggccctatgatgggaaatccag

SEQ ID NO: 25407 - DNA, 4474 bp, Homo sapiens
aaagtagatccggccaggcagacaaaagtttgggagagaagttcggtctgtggctagcgtgagagctaggggggcgggggccggggagagtggggcagtcgggcgagtcgacgcgtgaacagatagacctgcggactggacagccgcggccagagaccctgctagccccgctcagccccagatgcgcggggggacgcagcccctcccgctgggggatgctgtgggattcctggcgcagggcatccaggccgcccgctaagcccctgtgcctcccctgtgcccctggggaaccagagtccggctgcagggaaagagaaccggccgccgagacgccgcagggtgccaggcggggagggggcgagaggccccaggcccgagggcatggagcggttaggagagaaagccagtcgcctgctggagaagttcggccgcagaaagggtgaatctagccggtctgggtctgacgggacccccgggccgggcaaggggcgcctaagtgggttggggggacctaggaagtcagggccccgaggagctactgggggacctggggatgagccgttggagccggcccgggagcaaggttccctggacgctgagcgaaatcagcgcggctcctttgaggcgccgcgctacgaaggctcttttcccgcggggccgccgcccacccgggccttgcctctacctcagtcgttgccccccgattttcggctggagcccacggccccggccctcagcccccgctctagcttcgccagtagctcggccagcgacgcgagcaagccgtccagcccccggggcagcctgctgctggacggggcgggggctggcggagctggaggtagccggccctgcagcaatcgcaccagcggcatcagcatgggctacgaccagcgccacgggagccccttgccagcggggccgtgcctgtttggcccacccctggccggagcaccggcaggctattctcccggaggggtcccgtccgcctacccggagctccacgccgccctggaccgattgtacgctcagcggcccgcggggttcggctgccaggaaagccgccactcgtatcccccggccctgggcagccctggagctctagccggggccggagtgggagcggcggggcccttggagagacggggggcgcaacccggacgacactctgtgaccggctacggggactgcgccgtgggcgcccggtaccaggacgagctaacagctttgcttcgcctgacggtgggcaccggtgggcgagaagccggagcccgcggagaaccctcggggattgagccgtcgggtctggaggagccaccaggtcctttcgttccggaggccgcccgggcccggatgcgggagccagaggccagggaggactacttcggcacctgtatcaagtgcaacaaaggcatctatgggcagagcaatgcctgccaggccctggacagcctctaccacacccagtgctttgtttgctgctcttgtgggcgaactttgcgttgcaaggctttctacagtgtcaatggctctgtgtactgtgaggaagattatctgttttcagggtttcaggaggcagctgagaaatgctgtgtctgtggtcacttgattttggagaagatcctacaagcaatggggaagtcctatcatccaggctgtttccgatgcattgtttgcaacaagtgcctggatggcatccccttcacagtggacttctccaaccaagtatactgtgtcaccgactaccacaaaaattatgctcctaagtgtgcagcctgtggccaacccatcctcccctctgagggctgtgaggacatcgtgagggtgatatccatggaccgggattatcactttgagtgctaccactgtgaggactgccggatgcagctgagtgatgaggaaggctgctgctgtttccctctggatgggcacttgctctgccatggttgccacatgcagcggctcaatgcccgacaaccccctgccaactatatctgagctgcaatcactgctgctgctgtcaccctgcagacaaactgctgtggccagtgggcccctctgaggccagccaaggcaaagaatgcactctgcaggcctggcagaagagtcctctggggaggaccccaagggccggagacccaaagatcatgatattccaaatggattgtggaagagaaaccttatatttaccagggtgggggcgactggcctttttcccatgtgtgcagtctgagcttaggcacacacaggagggttccaggactttctgaacatctgattctgtatcttcagtatatatattttgtttgttttagagatgggatctcaccatgttgcccaggctagtcttgaactcctgggctcgaatgatcctcccaccttggcctcccaaagtgctgggattataggcgtaagccactgtgtctggcctagtgtatgattatgcatgagtcacgcaatgttctggtcctggattccaggagtagaggacctagctttaaatcaattagtttcagctaaactgactagaaccaggtcaaagtgtaattctccctccagctcccccaaaccccagagttttggggttgtggttgatgcagtgtgggatgtccctgagaggtagcaagtctagggtggtgagttcctgctaggcaaccaaatttaagctcctcactttttgtgacacatggtgtcagatatggggtcccgcacctatatctggatgaagaggtagaaactctggacctcattaatgagttatttcttggccttcttctaaggactaggagagctccttatctgtctgagaatggggaccagctctgagtggggttgctgcctgtattccctgtttctcaggaacttacatgggtctggggaggctaggtaggtgattgtacgtggttgctcttctccttggctgggggaggtaatgagcagatctctgtgggtgtggagcttgttggggggatgtctaggaagcttcagcttagccacattcccaagtttaggtgcactgagccatatagcccagtgtatgcatgtgtgggtgtgttcatgcacacacacactctctctcttgtctctctgtctctctctcactctttcttactctcttctcaggtcacttgtacacttggtttcctagtagaagctcacttgccacctctcaggggggtcccggattgcatccatcacaatcccaaaactagagttggggggaactggagggagcaaaacactgatttgatactagtcagtttgcttgaaactagttcacctaaagctagatctcttaaaaccaatttactgaaaacttgtttgcttaaagttaatgacttaatgactaatttgccaaaagctcaattcctattttggtgtgtttatatccatttaggtgtcctattcttttttgtcatgctttggatatttcaaggatttatatctattcatccaagagtacttctgagctattatcagcaacataaatttatcaaatttgcagcactttgtaaatgatgagattgcttcctacctttatggatgtctttttctatgttatctaccattcaaaaacttttttaaaaagtttaaagtttctagcaataaatacaattggtacagacattttgtgtatcatttttttgtttcttaatccaatattcctttacaaattaaatgccttgaaaaatataatggagttcaatgtgattttgatgctttggtctaacttctacattcctactgttaaaaaggccagtatatcttaaacaaatgaataggcatgaggcatattcagttgacttacaatgaaaagttatacagacaacagtaataactaaaagggtgaatctgctaaatccttttgaaatgctgcagatttgataaatatttattttagactaattggttttaggtgaattggttttaggcaaattaatttagtaatctttgatctttagtcttcattttctgtcactcagtgagtttcttactggaaatgatgactcctgacaacagaatttccacatttgggggctattctaaggtgactatgccagccaacctgggaaatacataaaagagatctctgagtgagagggaaagaggtcagatttatacaactgagcgccagaggggaaaatgcaccttgttggagtgagaaatgttctgaaactgaattacttcttgtacagctgagatagcttcttctgaactattattaaataagtgaatacaaaggccctatgatgggaaatccagacaagcttgtgtaactttacatccatcccctcagggatatttttttttttttttttgagactccatctcaaaaaaaaggaaaaggatggccaggcacagtggctcatgcctgtaatcccagcactttggaaggctgaggtgggaggatcgcttgagtccaggagttcaacaccagcctgggccacatagtgggaccctgactctacaaaaa

SEQ ID NO: 25408 - DNA, 4250 bp, Homo sapiens
aaagtagatccggccaggcagacaaaagtttgggagagaagttcggtctgtggctagcgtgagagctaggggggcgggggccggggagagtggggcagtcgggcgagtcgacgcgtgaacagatagacctgcggactggacagccgcggccagagaccctgctagccccgctcagccccagatgcgcggggggacgcagcccctcccgctgggggatgctgtgggattcctggcgcagggcatccaggccgcccgctaagcccctgtgcctcccctgtgcccctggggaaccagagtccggctgcagggaaagagaaccggccgccgagacgccgcagggtgccaggcggggagggggcgagaggccccaggcccgagggcatggagcggttaggagagaaagccagtcgcctgctggagaagttcggccgcagaaagggtgaatctagccggtctgggtctgacgggacccccgggccgggcaaggggcgcctaagtgggttggggggacctaggaagtcagggccccgaggagctactgggggacctggggatgagccgttggagccggcccgggagcaaggttccctggacgctgagcgaaatcagcgcggctcctttgaggcgccgcgctacgaaggctcttttcccgcggggccgccgcccacccgggccttgcctctacctcagtcgttgccccccgattttcggctggagcccacggccccggccctcagcccccgctctagcttcgccagtagctcggccagcgacgcgagcaagccgtccagcccccggggcagcctgctgctggacggggcgggggctggcggagctggaggtagccggccctgcagcaatcgcaccagcggcatcagcatgggctacgaccagcgccacgggagccccttgccagcggggccgtgcctgtttggcccacccctggccggagcaccggcaggctattctcccggaggggtcccgtccgcctacccggagctccacgccgccctggaccgattgtacgctcagcggcccgcggggttcggctgccaggaaagccgccactcgtatcccccggccctgggcagccctggagctctagccggggccggagtgggagcggcggggcccttggagagacggggggcgcaacccggacgacactctgtgaccggctacggggactgcgccgtgggcgcccggtaccaggacgagctaacagctttgcttcgcctgacggtgggcaccggtgggcgagaagccggagcccgcggagaaccctcggggattgagccgtcgggtctggaggagccaccaggtcctttcgttccggaggccgcccgggcccggatgcgggagccagaggccagggaggactacttcggcacctgtatcaagtgcaacaaaggcatctatgggcagagcaatgcctgccaggccctggacagcctctaccacacccagtgctttgtttgctgctcttgtgggcgaactttgcgttgcaaggctttctacagtgtcaatggctctgtgtactgtgaggaagattatctgttttcagggtttcaggaggcagctgagaaatgctgtgtctgtggtcacttgattttggagaagatcctacaagcaatggggaagtcctatcatccaggctgtttccgatgcattgtttgcaacaagtgcctggatggcatccccttcacagtggacttctccaaccaagtatactgtgtcaccgactaccacaaaaattatgctcctaagtgtgcagcctgtggccaacccatcctcccctctgagggctgtgaggacatcgtgagggtgatatccatggaccgggattatcactttgagtgctaccactgtgaggactgccggatgcagctgagtgatgaggaaggctgctgctgtttccctctggatgggcacttgctctgccatggttgccacatgcagcggctcaatgcccgacaaccccctgccaactatatctgagctgcaatcactgctgctgctgtcaccctgcagacaaactgctgtggccagtgggcccctctgaggccagccaaggcaaagaatgcactctgcaggcctggcagaagagtcctctggggaggaccccaagggccggagacccaaagatcatgatattccaaatggattgtggaagagaaaccttatatttaccagggtgggggcgactggcctttttcccatgtgtgcagtctgagcttaggcacacacaggagggttccaggactttctgaacatctgattctgtatcttcagtatatatattttgtttgttttagagatgggatctcaccatgttgcccaggctagtcttgaactcctgggctcgaatgatcctcccaccttggcctcccaaagtgctgggattataggcgtaagccactgtgtctggcctagtgtatgattatgcatgagtcacgcaatgttctggtcctggattccaggagtagaggacctagctttaaatcaattagtttcagctaaactgactagaaccaggtcaaagtgtaattctccctccagctcccccaaaccccagagttttggggttgtggttgatgcagtgtgggatgtccctgagaggtagcaagtctagggtggtgagttcctgctaggcaaccaaatttaagctcctcactttttgtgacacatggtgtcagatatggggtcccgcacctatatctggatgaagaggtagaaactctggacctcattaatgagttatttcttggccttcttctaaggactaggagagctccttatctgtctgagaatggggaccagctctgagtggggttgctgcctgtattccctgtttctcaggaacttacatgggtctggggaggctaggtaggtgattgtacgtggttgctcttctccttggctgggggaggtaatgagcagatctctgtgggtgtggagcttgttggggggatgtctaggaagcttcagcttagccacattcccaagtttaggtgcactgagccatatagcccagtgtatgcatgtgtgggtgtgttcatgcacacacacactctctctcttgtctctctgtctctctctcactctttcttactctcttctcaggtcacttgtacacttggtttcctagtagaagctcacttgccacctctcaggggggtcccggattgcatccatcacaatcccaaaactagagttggggggaactggagggagcaaaacactgatttgatactagtcagtttgcttgaaactagttcacctaaagctagatctcttaaaaccaatttactgaaaacttgtttgcttaaagttaatgacttaatgactaatttgccaaaagctcaattcctattttggtgtgtttatatccatttaggtgtcctattcttttttgtcatgctttggatatttcaaggatttatatctattcatccaagagtacttctgagctattatcagcaacataaatttatcaaatttgcagcactttgtaaatgatgagattgcttcctacctttatggatgtctttttctatgttatctaccattcaaaaacttttttaaaaagtttaaagtttctagcaataaatacaattggtacagaaaaaaaaaaaaaaaaaaaaaaaaaaaaaaaaaaaaaaaagaaaaaaaaaaaaaaaacaacaacaacaacaaagagagagagagagcgacagcgcccacagaaaaaaaatccaacatgaggggcgcaccacacgaagcacaagagagacgcacacagcaatagaggaaaaccaaagagggaccccactaaagagaggatcaacattaaaaaggaggaagcagggcgagaaagcgaggaccccctaataaagcaaacagcgagactagagggaaaaacaacaagagcaaacaacgcggcgaccacctaacaacaagagacaccacacataaaacaagaggaaggacaaagtaagacacaaatagaggaaacagaaacaagcacgaagaacaggagacaagaacccgaccacgaaagaaggaaaaaacagcaaaagaagaaaagaggaggagagaagagcgaaaaaacagcgggagcaacacaacacacaaagaagaagagaaaaaagacacggaggcccgccaccaaaaaaacacatcggagaaaaagaaaaaggggagagatgcggcgactaagcccgaagaacaacggaacgacacaccacagcgggggaagacacaaaagaaaa

SEQ ID NO: 25409 - DNA, 1988 bp, Homo sapiens
  misc_feature (1)..(1): n is a, c, g, or t
  misc_feature (5)..(5): n is a, c, g, or t
ncttnacaggcatacgccaccacgcccggctgacttctgtatttttagtagagatgttttttcagtatgctggtctcaaactcttgaccttgtgatgtgcctgccttggcctcccaaagtgctgggattataggcgtaagccactgtgtctggcctagtgtatgattatgcatgagtcacgcaatgttctggtcctggattccaggagtagaggacctagctttaaatcaattagtttcagctaaactgactagaaccaggtcaaagtgtaattctccctccagctcccccaaaccccagagttttggggttgtggttgatgcagtgtgggatgtccctgagaggtagcaagtctagggtggtgagttcctgctaggcaaccaaatttaagctcctcactttttgtgacacatggtgtcagatatggggtcccgcacctatatctggatgaagaggtagaaactctggacctcattaatgagttatttcttggccttcttctaaggactaggagagctccttatctgtctgagaatggggaccagctctgagtggggttgctgcctgtattccctgtttctcaggaacttacatgggtctggggaggctaggtaggtgattgtacgtggttgctcttctccttggctgggggaggtaatgagcagatctctgtgggtgtggagcttgttggggggatgtctaggaagcttcagcttagccacattcccaagtttaggtgcactgagccatatagcccagtgtatgcatgtgtgggtgtgttcatgcacacacacactctctctcttgtctctctgtctctctctcactctttcttactctcttctcaggtcacttgtacacttggtttcctagtagaagctcacttgccacctctcaggggggtcccggattgcatccatcacaatcccaaaactagagttggggggaactggagggagcaaaacactgatttgatactagtcagtttgcttgaaactagttcacctaaagctagatctcttaaaaccaatttactgaaaacttgtttgcttaaagttaatgacttaatgactaatttgccaaaagctcaattcctattttggtgtgtttatatccatttaggtgtcctattcttttttgtcatgctttggatatttcaaggatttatatctattcatccaagagtacttctgagctattatcagcaacataaatttatcaaatttgcagcactttgtaaatgatgagattgcttcctacctttatggatgtctttttctatgttatctaccattcaaaaacttttttaaaaagtttaaagtttctagcaataaatacaattggtacagacattttgtgtatcatttttttgtttcttaatccaatattcctttacaaattaaatgccttgaaaaatataatggagttcaatgtgattttgatgctttggtctaacttctacattcctactgttaaaaaggccagtatatcttaaacaaatgaataggcatgaggcatattcagttgacttacaatgaaaagttatacagacaacagtaataactaaaagggtgaatctgctaaatccttttgaaatgctgcagatttgataaatatttattttagactaattggttttaggtgaattggttttaggcaaattaatttagtaatctttgatctttagtcttcattttctgtcactcagtgagtttcttactggaaatgatgactcctgacaacagaatttccacatttgggggctattctaaggtgactatgccagccaacctgggaaatacataaaagagatctctgagtgagagggaaagaggtcagatttatacaactgagcgccagaggggaaaatgcaccttgttggagtgagaaatgttctgaaactgaattacttcttgtacagctgagatagcttcttctgaactattattaaataagtgaatacaaaggccctatgatgggaaatccag

SEQ ID NO: 25410 - DNA, 2006 bp, Homo sapiens
aaagtagatccggccaggcagacaaaagtttgggagagaagttcggtctgtggctagcgtgagagctaggggggcgggggccggggagagtggggcagtcgggcgagtcgacgcgtgaacagatagacctgcggactggacagccgcggccagagaccctgctagccccgctcagccccagatgcgcggggggacgcagcccctcccgctgggggatgctgtgggattcctggcgcagggcatccaggccgcccgctaagcccctgtgcctcccctgtgcccctggggaaccagagtccggctgcagggaaagagaaccggccgccgagacgccgcagggtgccaggcggggagggggcgagaggccccaggcccgagggcatggagcggttaggagagaaagccagtcgcctgctggagaagttcggccgcagaaagggtgaatctagccggtctgggtctgacgggacccccgggccgggcaaggggcgcctaagtgggttggggggacctaggaagtcagggccccgaggagctactgggggacctggggatgagccgttggagccggcccgggagcaaggttccctggacgctgagcgaaatcagcgcggctcctttgaggcgccgcgctacgaaggctcttttcccgcggggccgccgcccacccgggccttgcctctacctcagtcgttgccccccgattttcggctggagcccacggccccggccctcagcccccgctctagcttcgccagtagctcggccagcgacgcgagcaagccgtccagcccccggggcagcctgctgctggacggggcgggggctggcggagctggaggtagccggccctgcagcaatcgcaccagcggcatcagcatgggctacgaccagcgccacgggagccccttgccagcggggccgtgcctgtttggcccacccctggccggagcaccggcaggctattctcccggaggggtcccgtccgcctacccggagctccacgccgccctggaccgattgtacgctcagcggcccgcggggttcggctgccaggaaagccgccactcgtatcccccggccctgggcagccctggagctctagccggggccggagtgggagcggcggggcccttggagagacggggggcgcaacccggacgacactctgtgaccggctacggggactgcgccgtgggcgcccggtaccaggacgagctaacagctttgcttcgcctgacggtgggcaccggtgggcgagaagccggagcccgcggagaaccctcggggattgagccgtcgggtctggaggagccaccaggtcctttcgttccggaggccgcccgggcccggatgcgggagccagaggccagggaggactacttcggcacctgtatcaagtgcaacaaaggcatctatgggcagagcaatgcctgccaggccctggacagcctctaccacacccagtgctttgtttgctgctcttgtgggcgaactttgcgttgcaaggctttctacagtgtcaatggctctgtgtactgtgaggaagattatctgttttcagggtttcaggaggcagctgagaaatgctgtgtctgtggtcacttgattttggagaagatcctacaagcaatggggaagtcctatcatccaggctgtttccgatgcattgtttgcaacaagtgcctggatggcatccccttcacagtggacttctccaaccaagtatactgtgtcaccgactaccacaaatgctaggcctctgttgcatggctgtacaaagaacataagagtccatatttctagtggatttgtaaaataagtgtgtgtgagacacttgcgtttgaagaaagatctagggtcctgggtctcttgcatttatatgtcagaaaaggggcgatatgctgctgaggggtgagtgcatatgagtgtggccctgaggaccagggctggcagatgttgtctacctgctgaagaataaagatttcttttggtaaaaaaaaaaa

SEQ ID NO: 25411 - DNA, 538 bp, Homo sapiens
ctcagttttcttttctgtaaaaacaaaagataggattaaatcagtgattctcaatcatggtagcctagcagatcagctgggaagaactaaaaaacaaaacaaaacaaaaaacagtgtttggatcccatcaccacagattgtgataataggcctggaggagggccaaagcattgatgttttttaaaagctgcctaggtgatcctgatatgcagccagagtgaaacactgctggcctgaatgctctctcaggcacttttcagggtctccgcctccattttacgacttcttcaccgacattacatagcattgttctgggagtatagcagcgggttggatgaggttaatgggagtaataaggagcataatgggcagctggagagctgggactggagggagactgattctcttgctaccccatgagccagatcctacaagcaatggggaagtcctatcatccaggctgtttccgatgcattgtttgcaacaagtgcctggatggcatccccttcacagtggacttctccaaccaagtatactg

SEQ ID NO: 25412 - DNA, 1821 bp, Homo sapiens
aaagtagatccggccaggcagacaaaagtttgggagagaagttcggtctgtggctagcgtgagagctaggggggcgggggccggggagagtggggcagtcgggcgagtcgacgcgtgaacagatagacctgcggactggacagccgcggccagagaccctgctagccccgctcagccccagatgcgcggggggacgcagcccctcccgctgggggatgctgtgggattcctggcgcagggcatccaggccgcccgctaagcccctgtgcctcccctgtgcccctggggaaccagagtccggctgcagggaaagagaaccggccgccgagacgccgcagggtgccaggcggggagggggcgagaggccccaggcccgagggcatggagcggttaggagagaaagccagtcgcctgctggagaagttcggccgcagaaagggtgaatctagccggtctgggtctgacgggacccccgggccgggcaaggggcgcctaagtgggttggggggacctaggaagtcagggccccgaggagctactgggggacctggggatgagccgttggagccggcccgggagcaaggttccctggacgctgagcgaaatcagcgcggctcctttgaggcgccgcgctacgaaggctcttttcccgcggggccgccgcccacccgggccttgcctctacctcagtcgttgccccccgattttcggctggagcccacggccccggccctcagcccccgctctagcttcgccagtagctcggccagcgacgcgagcaagccgtccagcccccggggcagcctgctgctggacggggcgggggctggcggagctggaggtagccggccctgcagcaatcgcaccagcggcatcagcatgggctacgaccagcgccacgggagccccttgccagcggggccgtgcctgtttggcccacccctggccggagcaccggcaggctattctcccggaggggtcccgtccgcctacccggagctccacgccgccctggaccgattgtacgctcagcggcccgcggggttcggctgccaggaaagccgccactcgtatcccccggccctgggcagccctggagctctagccggggccggagtgggagcggcggggcccttggagagacggggggcgcaacccggacgacactctgtgaccggctacggggactgcgccgtgggcgcccggtaccaggacgagctaacagctttgcttcgcctgacggtgggcaccggtgggcgagaagccggagcccgcggagaaccctcggggattgagccgtcgggtctggaggagccaccaggtcctttcgttccggaggccgcccgggcccggatgcgggagccagaggccagggaggactacttcggaatcatgctcacatggtcccctctgcacggagccctctgccaagccagatccttttctccatccttggaagtctgcagtggagagaaatcattctataactgaacagctcgtttgactgatgggaaactgaagtcccagagacgatttctgggcctagcctgctttctctagaaagtattttcaagtctgctgctgagcacctgtggactggcatctttgaccgttcatcctacacactgcaacagagatcataccttgcctgtgtagtcttttctccccaacagaaactaagcatctgaatgccagggaccatatcttcgactttctccaggtttccttaggtagtggtgctgtgttaagcacaaaacagatgctcagaaaatatctgttgagtaattaaataaacaagaatggatctgctcaaacaagatc

SEQ ID NO: 25413 - DNA, 3625 bp, Homo sapiens
aaagtagatccggccaggcagacaaaagtttgggagagaagttcggtctgtggctagcgtgagagctaggggggcgggggccggggagagtggggcagtcgggcgagtcgacgcgtgaacagatagacctgcggactggacagccgcggccagagaccctgctagccccgctcagccccagatgcgcggggggacgcagcccctcccgctgggggatgctgtgggattcctggcgcagggcatccaggccgcccgctaagcccctgtgcctcccctgtgcccctggggaaccagagtccggctgcagggaaagagaaccggccgccgagacgccgcagggtgccaggcggggagggggcgagaggccccaggcccgagggcatggagcggttaggagagaaagccagtcgcctgctggagaagttcggccgcagaaagggtgaatctagccggtctgggtctgacgggacccccgggccgggcaaggggcgcctaagtgggttggggggacctaggaagtcagggccccgaggagctactgggggacctggggatgagccgttggagccggcccgggagcaaggttccctggacgctgagcgaaatcagcgcggctcctttgaggcgccgcgctacgaaggctcttttcccgcggggccgccgcccacccgggccttgcctctacctcagtcgttgccccccgattttcggctggagcccacggccccggccctcagcccccgctctagcttcgccagtagctcggccagcgacgcgagcaagccgtccagcccccggggcagcctgctgctggacggggcgggggctggcggagctggaggtagccggccctgcagcaatcgcaccagcggcatcagcatgggctacgaccagcgccacgggagccccttgccagcggggccgtgcctgtttggcccacccctggccggagcaccggcaggctattctcccggaggggtcccgtccgcctacccggagctccacgccgccctggaccgattgtacgctcagcggcccgcggggttcggctgccaggaaagccgccactcgtatcccccggccctgggcagccctggagctctagccggggccggagtgggagcggcggggcccttggagagacggggggcgcaacccggacgacactctgtgaccggctacggggactgcgccgtgggcgcccggtaccaggacgagctaacagctttgcttcgcctgacggtgggcaccggtgggcgagaagccggagcccgcggagaaccctcggggattgagccgtcgggtctggaggagccaccaggtcctttcgttccggaggccgcccgggcccggatgcgggagccagaggccagggaggactacttcggcacctgtatcaagtgcaacaaaggcatctatgggcagagcaatgcctgccaggccctggacagcctctaccacacccagtgctttgtttgctgctcttgtgggcgaactttgcgttgcaaggctttctacagtgtcaatggctctgtgtactgtgaggaagattatctgttttcagggtttcaggaggcagctgagaaatgctgtgtctgtggtcacttgattttggagaagatcctacaagcaatggggaagtcctatcatccaggctgtttccgatgcattgtttgcaacaagtgcctggatggcatccccttcacagtggacttctccaaccaagtatactgtgtcaccgactaccacaaaaattatgctcctaagtgtgcagcctgtggccaacccatcctcccctctgagggctgtgaggacatcgtgagggtgatatccatggaccgggattatcactttgagtgctaccactgtgaggactgccggatgcagctgagtgatgaggaaggctgctgctgtttccctctggatgggcacttgctctgccatggttgccacatgcagcggctcaatgcccgacaaccccctgccaactatatctgagctgcaatcactgctgctgctgtcaccctgcagacaaactgctgtggccagtgggcccctctgaggccagccaaggcaaagaatgcactctgcaggcctggcagaagagtcctctggggaggaccccaagggccggagacccaaagatcatgatattccaaatggattgtggaagagaaaccttatatttaccagggtgggggcgactggcctttttcccatgtgtgcagtctgagcttaggcacacacaggagggttccaggactttctgaacatctgattctgtatcttcagtatatatattttgtttgttttagagatgggatctcaccatgttgcccaggctagtcttgaactcctgggctcgaatgatcctcccaccttggcctcccaaagtgctgggattataggcgtaagccactgtgtctggcctagtgtatgattatgcatgagtcacgcaatgttctggtcctggattccaggagtagaggacctagctttaaatcaattagtttcagctaaactgactagaaccaggtcaaagtgtaattctccctccagctcccccaaaccccagagttttggggttgtggttgatgcagtgtgggatgtccctgagaggtagcaagtctagggtggtgagttcctgctaggcaaccaaatttaagctcctcactttttgtgacacatggtgtcagatatggggtcccgcacctatatctggatgaagaggtagaaactctggacctcattaatgagttatttcttggccttcttctaaggactaggagagctccttatctgtctgagaatggggaccagctctgagtggggttgctgcctgtattccctgtttctcaggaacttacatgggtctggggaggctaggtaggtgattgtacgtggttgctcttctccttggctgggggaggtaatgagcagatctctgtgggtgtggagcttgttggggggatgtctaggaagcttcagcttagccacattcccaagtttaggtgcactgagccatatagcccagtgtatgcatgtgtgggtgtgttcatgcacacacacactctctctcttgtctctctgtctctctctcactctttcttactctcttctcaggtcacttgtacacttggtttcctagtagaagctcacttgccacctctcaggggggtcccggattgcatccatcacaatcccaaaactagagttggggggaactggagggagcaaaacactgatttgatactagtcagtttgcttgaaactagttcacctaaagctagatctcttaaaaccaatttactgaaaacttgtttgcttaaagttaatgacttaatgactaatttgccaaaagctcaattcctattttggtgtgtttatatccatttaggtgtcctattcttttttgtcatgctttggatatttcaaggatttatatctattcatccaagagtacttctgagctattatcagcaacataaatttatcaaatttgcagcactttgtaaatgatgagattgcttcctacctttatggatgtctttttctatgttatctaccattcaaaaacttttttaaaaagtttaaagtttctagcaataaatacaattggtacaga

SEQ ID NO: 25414 - DNA, 3324 bp, Homo sapiens
aaagtagatccggccaggcagacaaaagtttgggagagaagttcggtctgtggctagcgtgagagctaggggggcgggggccggggagagtggggcagtcgggcgagtcgacgcgtgaacagatagacctgcggactggacagccgcggccagagaccctgctagccccgctcagccccagatgcgcggggggacgcagcccctcccgctgggggatgctgtgggattcctggcgcagggcatccaggccgcccgctaagcccctgtgcctcccctgtgcccctggggaaccagagtccggctgcagggaaagagaaccggccgccgagacgccgcagggtgccaggcggggagggggcgagaggccccaggcccgagggcatggagcggttaggagagaaagccagtcgcctgctggagaagttcggccgcagaaagggtgaatctagccggtctgggtctgacgggacccccgggccgggcaaggggcgcctaagtgggttggggggacctaggaagtcagggccccgaggagctactgggggacctggggatgagccgttggagccggcccgggagcaaggttccctggacgctgagcgaaatcagcgcggctcctttgaggcgccgcgctacgaaggctcttttcccgcggggccgccgcccacccgggccttgcctctacctcagtcgttgccccccgattttcggctggagcccacggccccggccctcagcccccgctctagcttcgccagtagctcggccagcgacgcgagcaagccgtccagcccccggggcagcctgctgctggacggggcgggggctggcggagctggaggtagccggccctgcagcaatcgcaccagcggcatcagcatgggctacgaccagcgccacgggagccccttgccagcggggccgtgcctgtttggcccacccctggccggagcaccggcaggctattctcccggaggggtcccgtccgcctacccggagctccacgccgccctggaccgattgtacgctcagcggcccgcggggttcggctgccaggaaagccgccactcgtatcccccggccctgggcagccctggagctctagccggggccggagtgggagcggcggggcccttggagagacggggggcgcaacccggacgacactctgtgaccggctacggggactgcgccgtgggcgcccggtaccaggacgagctaacagctttgcttcgcctgacggtgggcaccggtgggcgagaagccggagcccgcggagaaccctcggggattgagccgtcgggtctggaggagccaccaggtcctttcgttccggaggccgcccgggcccggatgcgggagccagaggccagggaggactacttcggcacctgtatcaagtgcaacaaaggcatctatgggcagagcaatgcctgccaggccctggacagcctctaccacacccagtgctttgtttgctgctcttgtgggcgaactttgcgttgcaaggctttctacagtgtcaatggctctgtgtactgtgaggaagattatctgttttcagggtttcaggaggcagctgagaaatgctgtgtctgtggtcacttgattttggagaagatcctacaagcaatggggaagtcctatcatccaggctgtttccgatgcattgtttgcaacaagtgcctggatggcatccccttcacagtggacttctccaaccaagtatactgtgtcaccgactaccacaaaaattatgctcctaagtgtgcagcctgtggccaacccatcctcccctctgagggctgtgaggacatcgtgagggtgatatccatggaccgggattatcactttgagtgctaccactgtgaggactgccggatgcagctgagtgatgaggaaggctgctgctgtttccctctggatgggcacttgctctgccatggttgccacatgcagcggctcaatgcccgacaaccccctgccaactatatctgagctgcaatcactgctgctgctgtcaccctgcagacaaactgctgtggccagtgggcccctctgaggccagccaaggcaaagaatgcactctgcaggcctggcagaagagtcctctggggaggaccccaagggccggagacccaaagatcatgatattccaaatggattgtggaagagaaaccttatatttaccagggtgggggcgactggcctttttcccatgtgtgcagtctgagcttaggcacacacaggagggttccaggactttctgaacatctgattctgtatcttcagtatatatattttgtttgttttagagatgggatctcaccatgttgcccaggctagtcttgaactcctgggctcgaatgatcctcccaccttggcctcccaaagtgctgggattataggcgtaagccactgtgtctggcctagtgtatgattatgcatgagtcacgcaatgttctggtcctggattccaggagtagaggacctagctttaaatcaattagtttcagctaaactgactagaaccaggtcaaagtgtaattctccctccagctcccccaaaccccagagttttggggttgtggttgatgcagtgtgggatgtccctgagaggtagcaagtctagggtggtgagttcctgctaggcaaccaaatttaagctcctcactttttgtgacacatggtgtcagatatggggtcccgcacctatatctggatgaagaggtagaaactctggacctcattaatgagttatttcttggccttcttctaaggactaggagagctccttatctgtctgagaatggggaccagctctgagtggggttgctgcctgtattccctgtttctcaggaacttacatgggtctggggaggctaggtaggtgattgtacgtggttgctcttctccttggctgggggaggtaatgagcagatctctgtgggtgtggagcttgttggggggatgtctaggaagcttcagcttagccacattcccaagtttaggtgcactgagccatatagcccagtgtatgcatgtgtgggtgtgttcatgcacacacacactctctctcttgtctctctgtctctctctcactctttcttactctcttctcaggtcacttgtacacttggtttcctagtagaagctcacttgccacctctcaggggggtcccggattgcatccatcacaatcccaaaccccagagttttggggcttgtggttgatagcagtgtgggatgtccctgagaggtagcaagtctagggtggtgagttcctgctaggcaaccaaatttaaactcctcactataatcaag

SEQ ID NO: 25415 - DNA, 468 bp, Homo sapiens
tccctctccctaccacccagttactctgaagggatgataacagccattggggggttaaaaagaggcagtgaaccccccagttaatgagtaggaattcagcaggcagtgtaagataaatggagctctctctgcttctgctagagtcagcatgaactgccgccctgcggcttgtttgtggcaaatggagtgcgcgaaatatcaaagggcagtgatccagaagaagaccgactttgacaaattttaaattggccagaaagaaaaccagcaaaaagaaaaaaaaaagggaaaagaaaaaggaagaaaaaaaggaaaaaggaaaatgatgcaatttgctgtgtcctgcaatttgcgcattgctgcctttgtatggaattagtggtaaacacagcggcaacaattgggggatgctgggagcaattatgagccatctaagtgagatgcttatcagtggtgaagcttttagagctc

SEQ ID NO: 25416 - DNA, 461 bp, Homo sapiens
ctgcattttaggcaatgtggaccccacctcagtttagaatctggctagatatcttttctatacatggtctaacctgaatgtataaagcagttatttccaacaagtggcaacctgtcatgacactaactgtacaagcagttaatgcacagaatgagccttacctgccagagatcacagagatctatggaggtcacagcacaggtgtgacttgaaggacgagaaggaatggggaaggcagaccaggaagaagggggacatcggcaaagaccccaaagtgggaaaactcaaggtcaattcagggctcaagatgtgctgcctgcttatctgaagtagcgtctctgcgatgagctcagactaaagagggtctttggttacctttttaaactttgggcccataatgaggactcaagaaatacttgctgggttgttaattaatccagtgtagcagagatttgtttttt

SEQ ID NO: 25417 - DNA, 231 bp, Homo sapiens
gttaaataaaaaagatgccacaaatataacagaaaaagaaaagggcaatacaaatatagttttgtcatactgctattctatgacaaaataaatcaattgtatcagcatagtctaattgccctttctactgatagatactcctcctcctgcatcttagcagcttctaaccccagtgcattctcaaacttgactgcaatggaatcatctagaaagcttaaaaaaaaaaaaaaa

SEQ ID NO: 25418 - DNA, 428 bp, Homo sapiens
tttcacaatgttgggcaggatggtttcgatctcttgacctcatgatctgcctgcctcggccttccaaagtgctgggattacaggtgtgagccactgcgcccgggcttatttgcttttttgtttgttcatttattgctctttgtgggcaaggactcatccctgttgttcgttgttgtatttgtattccaagaacataaattactgcctggcacataaagagtgttccataatttcatgtgcgtccgtgtgaagagaccaccaaacaggctttgtgtgagcaataaagctgtttatttcacctgggtgcaggcgggctgagtctgaaaagagagtcagtgaagggagatagaggtggggcattttataggatttgggtaggtaaaggaaaaaggatggttgttctgtggtgggcaggagtgggggtcaca

SEQ ID NO: 25419 - DNA, 492 bp, Homo sapiens
cctgctccatacttaaggtttgtgatgccaacatttggattctctcttggtgccaatcagtggctgttagaggctactcaggtgtaccccaaacagaaggcacatggatctggggcgactgttccaggtcctcccaacctctgaagtgctcagtagcccaacaacaaggctgctgggggcctgttcttcagcccccgtcagggcggggccagcctctctgtccaatgctgcctggacatttactggggaggtgagtagcaggcccagctccaggatctgaattggaatctcagattctctggataaagaatctgtctcaagtcaggaggtcctcattctgcgactcccaaccagggtggagtgggcacagacaggatgccttatgcttatctctagcacattccagggggttccagggttcctgcacctggaatccagtgtgtccaagccagtattaaattatctcaacacattccacagaccagactgcct

SEQ ID NO: 25420 - DNA, 705 bp, Homo sapiens
tttctgtatacccaaaatatgtacatttaatatatgtgatataacatctttccgtgttccagtagatttcccattctttttcacaggtacccagtgttctgtataatttattaaccatttatctacgcataaacacctgagttaatagtttttaaatattacaaatggtgctgcagtaaatattgctaggcatatttatgtatctttgctacttttgtgaatatatataatagggataaattcctggaagtgaaattgctggttatagggaaatatttgactaaaattttattgtttcgggaggtccacatctgaaattttgataactattgtcaaactgttcaaaaatcctgaaccagtgtacatctctgttaacagttgatccctcctgactctcccacattctcacaaatataaactgatttcttctttctcccctccttccttccctcccttctctccttctctcccaccctccttccttcttcttccttttttaaacagtttaattttctaatttctgatcacagcccctatgtttgcattatctacaaaaatcttcttgcctggcacagtagctcaagtctttaatcccagctctttgggaggccaaggagggcagattgcttgagcccaggagttcaaaccagcctgggcaacgtggtgaaaacctgtctctaccaaaaaaaaaaaaaaaaaaaaaat

SEQ ID NO: 25421 - DNA, 459 bp, Homo sapiens
gcaatgcccagccctaaaagccatgttttaactttcctaaaaatttctcatcataaaatttgtgaccattaatggatactattgctgacctgcaaaaaaagctagactgaggcggggtgcagtggctcacgccagtaatcccaacactttgggaggctgaggcaggcagatcatctgaggtcaggagttcaagaccagcctggcaaacatggtgaaacctgtctctaggttgggcgcggtggctcacgcctgtaatcccagcactttgggaggccgagatgggcggatcatgaggtcaggagattgagaccatcctggctaacacggtgaaaccccgtttctactaaaaatacaaaaaaaattagccaggtgtggtggcaggcgcccgtagtcccaactattcgggaggctgaggcaggagaattgcgggaacccaggaggcagaggttgcagtgagcc

SEQ ID NO: 25422 - DNA, 262 bp, Homo sapiens
taaaatacatctggatggccgggcgcggtggctcacgcctgtaatcccagcactttgggaggccgaggtgggcagatcacgaggtcgggtgatcgagaccatcctggctaacacggtgaaaccccgtctctactaaaaatacaaaaaaaaatagccatccaaatgtggagagtccagcaaggtcctagcatggtggcaggcgcctatagtcccagctaatcgggaggctgaggtaggagaatggcgtgaaccctggaggcgg

SEQ ID NO: 25423 - DNA, 463 bp, Homo sapiens
tcattccaactgcttcctcccattgtggccatacatttactatgctcaacaatcattatagtactaaatcactcatcagatgatacataatctcaaatgtatggaatataagttgtataaggaaaaaggcccctgaacagtcaaaatagagcctatgcatgcattccaaggtgagcttctcagaacattattcaagtttctgcccttgaacacagttctgatgagcttaattacctatgcctagaaggcaaataaaatggcaaagaagaaagagggatagcttctattatgaggctgtgggacggtacaaacaggaatacaggataaatagatgtgggagaaaacaaaaaatataaaaagcaagtataagactccaaagggcatttctgaattaaggttttcttcacatttaatgaaagcagagaagagtgaatatcactgtagaatatcctgcctgtaacat

SEQ ID NO: 25424 - DNA, 286 bp, Homo sapiens
ccagaagatctcaatctgcaaatacttaacaaggtcaggcatcatgggagatatttaaaaaacatgtgtgtgcctttgagccgtttactaagttgagaccaaacatatacaaatgggaagttgactctcagtaccaggcagtacaggccaactgcttatagacagtaactgctgtggacttcagggatggccagcttcctaggatcttaggtagtccggaaatcttttcaggttcttgagctggcctaagcaggatttaggtgggctcaacataatgccagatctg

SEQ ID NO: 25425 - DNA, 420 bp, Homo sapiens
attcaacaatgccactttcgactcctagaaaaataaaataaccctaaccctattcatgcctgggaatagaatgtacttcaagaggcaaatacaagaatgtcatatgatataaatagactccaccagttcaaggagagggtgttaaaactgaaacattgacaggtaattatcaaaagtaccttagaaaagcaagtttctgtggacgatagctgcaatttattattattattgttgctagcctccctgatgttctccatttatgattcgagtaatcttgtctcttttgatgaatctaccttttgtttttcattaagatgtcaacgctctagacaaaagccctgctgagtacaacaaaaccgaaaacctgacagaggaaaaacctttatatctgtcgacgcggccgcgaatttagtagtagta

SEQ ID NO: 25426 - DNA, 739 bp, Homo sapiens
ggaaagcagagcagccttgtgtttgctccaaatcccagcttctcatccatgatgtcgttaaccccagaatccacatgtacccccagtgctctttcctctcagcaggctccggctatggacgtgtgtctgagctccgcgcagcagcctgggcgccggcgggaaggactcagctccccgggtggctggttagaggctgagaagaagggggctccgcagaaagacagcaccgggggagtcctagaaggtaacctccttcttcatcacttcaacagttttcctcagttgttttcctggcgatgacatcttcaagtaaatttcagtgacaagaatttccatttccttttaacattagattttttgctataatgaagcttagcagaaaaatgttttgcaagtataaacataattcctgttttttcattatttacttattaaaagtaattcctggtttttcattacttatcaaagtttgcacatttgttttttttctatgtatagatctaagcttgctgtatttttgtaacaagaacttaaaagaagaacaaaaaatctaggttcatttctgcttttcaccaaaatacattcttggtagctttgtcatacagtgaatctttataaatcaaactgtatttccccgttaggacaatgtaacagtttagggttacatttctgggcatggattcagttgtaaataaataatagacataacaaatgatctaataaaagccaagatgcagca

SEQ ID NO: 25427 - DNA, 1370 bp, Homo sapiens
  misc_feature (1369)..(1369): n is a, c, g, or t
agcggggaacaactggtttcctcttggagtctgggaggaggaaagcggagccggcagggagcgaaccaggactggggtgacggcagggcagggggcgcctggccggggagaagcgcgggggctggagcaccaccaactggagggtccggagtagcgagcgccccgaaggaggccatcggggagccgggaggggggactgcgagaggaccccggcgtccgggctcccggtgccagcgctatgaggccactcctcgtcctgctgctcctgggcctggcggccggctcgcccccactggacgacaacaagatccccagcctctgcccggggcaccccggccttccaggcacgccgggccaccatggcagccagggcttgccgggccgcgatggccgcgacggccgcgacggcgcgcccggggctccgggagagaaaggcgagggcgggaggccgggactgccgggacctcgaggggaccccgggccgcgaggagaggcgggacccgcggggcccaccgggcctgccggggagtgctcggtgcctccgcgatccgccttcagcgccaagcgctccgagagccgggtgcctccgccgtctgacgcacccttgcccttcgaccgcgtgctggtgaacgagcagggacattacgacgccgtcaccggcaagttcacctgccaggtgcctggggtctactacttcgccgtccatgccaccgtctaccgggccagcctgcagtttgatctggtgaagaatggcgaatccattgcctctttcttccagtttttcggggggtggcccaagccagcctcgctctcggggggggccatggtgaggctggagcctgaggaccaagtgtgggtgcaggtgggtgtgggtgactacattggcatctatgccagcatcaagacagacagcaccttctccggatttctggtgtactccgactggcacagctccccagtctttgcttagtgcccactgcaaagtgagctcatgctctcactcctagaaggagggtgtgaggctgacaaccaggtcatccaggagggctggcccccctggaatattgtgaatgactagggaggtggggtagagcactctccgtcctgctgctggcaaggaatgggaacagtggctgtctgcgatcaggtctggcagcatggggcagtggctggatttctgcccaagaccagaggagtgtgctgtgctggcaagtgtaagtcccccagttgctctggtccaggagcccacggtggggtgctctcttcctggtcctctgcttctctggatcctccccaccccctcctgctcctggggccggcccttttctcagagatcactcaataaacctaagaaccctcaaaaaaaaanc

SEQ ID NO: 25428 - DNA, 425 bp, Homo sapiens
  misc_feature (424)..(424): n is a, c, g, or t
gctgacaacctggtcatcctcacaccctccttctaggagtgagctcatgctctcactcctagaaggagggtgtgaggctgacaaccaggtcatccaggagggctggcccccctggaatattgtgaatgactagggaggtggggtagagcactctccgtcctgctgctggcaaggaatgggaacagtggctgtctgcgatcaggtctggcagcatggggcagtggctggatttctgcccaagaccagaggagtgtgctgtgctggcaagtgtaagtcccccagttgctctggtccaggagcccacggtggggtgctctcttcctggtcctctgcttctctggatcctccccaccccctcctgctcctggggccggcccttttctcagagatcactcaataaacctaagaaccctcaaaaaaaaanc

SEQ ID NO: 25429 - DNA, 1208 bp, Homo sapiens
  misc_feature (2)..(2): n is a, c, g, or t
  misc_feature (4)..(5): n is a, c, g, or t
  misc_feature (7)..(7): n is a, c, g, or t
  misc_feature (13)..(13): n is a, c, g, or t
  misc_feature (1207)..(1207): n is a, c, g, or t
gngnncngagctnccagctcccggtgtccgggactcgggtctcccgccagggggcgccactccccgcgctttgcagccctgagcgggggaggggcccaggcggcgggagcccccttggccagccccccagatctgccctgcgggaaggggtggaggaggtacccgtgcgggaggaggcgctggccgaagctcaggcaggggcggggaggggtacggtgaccttagagtcgccgccccgctgcgggctgagccgccgctactctcaccctgccgccccgcttaccccgcaggactgccgggacctcgaggggaccccgggccgcgaggagaggcgggacccgcggggcccaccgggcctgccggggagtgctcggtgcctccgcgatccgccttcagcgccaagcgctccgagagccgggtgcctccgccgtctgacgcacccttgcccttcgaccgcgtgctggtgaacgagcagggacattacgacgccgtcaccggcaagttcacctgccaggtgcctggggtctactacttcgccgtccatgccaccgtctaccgggccagcctgcagtttgatctggtgaagaatggcgaatccattgcctctttcttccagtttttcggggggtggcccaagccagcctcgctctcggggggggccatggtgaggctggagcctgaggaccaagtgtgggtgcaggtgggtgtgggtgactacattggcatctatgccagcatcaagacagacagcaccttctccggatttctggtgtactccgactggcacagctccccagtctttgcttagtgcccactgcaaagtgagctcatgctctcactcctagaaggagggtgtgaggctgacaaccaggtcatccaggagggctggcccccctggaatattgtgaatgactagggaggtggggtagagcactctccgtcctgctgctggcaaggaatgggaacagtggctgtctgcgatcaggtctggcagcatggggcagtggctggatttctgcccaagaccagaggagtgtgctgtgctggcaagtgtaagtcccccagttgctctggtccaggagcccacggtggggtgctctcttcctggtcctctgcttctctggatcctccccaccccctcctgctcctggggccggcccttttctcagagatcactcaataaacctaagaaccctcaaaaaaaaanc

SEQ ID NO: 25430 - DNA, 1271 bp, Homo sapiens
  misc_feature (2)..(2): n is a, c, g, or t
  misc_feature (4)..(5): n is a, c, g, or t
  misc_feature (7)..(7): n is a, c, g, or t
  misc_feature (13)..(13): n is a, c, g, or t
gngnncngagctnccagctcccggtgtccgggactcgggtctcccgccagggggcgccactccccgcgctttgcagccctgagcgggggaggggcccaggcggcgggagcccccttggccagccccccagatctgccctgcgggaaggggtggaggaggtacccgtgcgggaggaggcgctggccgaagctcaggcaggggcggggaggggtacggtgaccttagagtcgccgccccgctgcgggctgagccgccgctactctcaccctgccgccccgcttaccccgcaggactgccgggacctcgaggggaccccgggccgcgaggagaggcgggacccgcggggcccaccgggcctgccggggagtgctcggtgcctccgcgatccgccttcagcgccaagcgctccgagagccgggtgcctccgccgtctgacgcacccttgcccttcgaccgcgtgctggtgaacgagcagggacattacgacgccgtcaccggcaagttcacctgccaggtgcctggggtctactacttcgccgtccatgccaccgtctaccgggccagcctgcagtttgatctggtgaagaatggcgaatccattgcctctttcttccagtttttcggggggtggcccaagccagcctcgctctcggggggggccatggtgaggctggagcctgaggaccaagtgtgggtgcaggtgggtgtgggtgactacattggcatctatgccagcatcaagacagacagcaccttctccggatttctggtgtactccgactggcacagctccccagtctttgcttagtgcccactgcaaagtgagctcatgctctcactcctagaaggagggtgtgaggctgacaaccaggtcatccaggagggctggcccccctggaatattgtgaatgactagggaggtggggtagagcactctccgtcctgctgctggcaaggaatgggaacagtggctgtctgcgatcaggtctggcagcatggggcagtggctggatttctgcccaagaccagaggagtgtgctgtgctggcaagtgtaagtcccccagttgctctggtccaggagcccacggtggggtgctctcttcctggtcctctgcttctctggatcctccccaccccctcctgctcctggggccggcccttttctcagagatcacgagctggctcaatcactagtgaattcgcgccgcctgcagtcgacaatatggagagctcccaacgcgtgagcatagctgatattctatagtcaccg

SEQ ID NO: 25431 - DNA, 1122 bp, Homo sapiens
  misc_feature (1121)..(1121): n is a, c, g, or t
agcggggaacaactggtttcctcttggagtctgggaggaggaaagcggagccggcagggagcgaaccaggactggggtgacggcagggcagggggcgcctggccggggagaagcgcgggggctggagcaccaccaactggagggtccggagtagcgagcgccccgaaggaggccatcggggagccgggaggggggactgcgagaggaccccggcgtccgggctcccggtgccagcgctatgaggccactcctcgtcctgctgctcctgggcctggcggccggctcgcccccactggacgacaacaagatccccagcctctgcccggggcaccccggccttccaggcacgccgggccaccatggcagccagggcttgccgggccgcgatggccgcgacggccgcgacggcgcgcccggggctccgggagagaaaggcgagggcgggaggccgggactgccgggacctcgaggggaccccgggccgcgaggagaggcgggacccgcggggcccaccgggcctgccggggagtgctcggtgcctccgcgatccgccttcagcgccaagcgctccgagagccgggtgcctccgccgtctgacgcacccttgcccttcgaccgcgtgctggtgaacgagcagggacattacgacgccgtcaccggcaagttcacctgccaggtgcctggggtctactacttcgccgtccatgccaccgtctaccgggccagcctgcagtttgatctggtgaagaatggcgaatccattgcctctttcttccagtttttcggggggtggcccaagccagcctcgctctcggggggggccatggtgaggctggagcctgaggaccaagtgtgggtgcaggtgggtgtgggtgactacattggcatctatgccagcatcaagacagacagcaccttctccggattttctgcccaagaccagaggagtgtgctgtgctggcaagtgtaagtcccccagttgctctggtccaggagcccacggtggggtgctctcttcctggtcctctgcttctctggatcctccccaccccctcctgctcctggggccggcccttttctcagagatcactcaataaacctaagaaccctcaaaaaaaaanc

SEQ ID NO: 25432 - DNA, 1053 bp, Homo sapiens
  misc_feature (1052)..(1052): n is a, c, g, or t
cggcctgcgagcgctcagcctcaggtgcacggcagtggggtggggaccgactgggccgcgccggggtggggagagaggcaggtcccaggattctgggtcccgactccagtcctgcctggtccacagactgcgagaggaccccggcgtccgggctcccggtgccagcgctatgaggccactcctcgtcctgctgctcctgggcctggcggccggctcgcccccactggacgacaacaagatccccagcctctgcccggggcaccccggccttccaggcacgccgggccaccatggcagccagggcttgccgggccgcgatggccgcgacggccgcgacggcgcgcccggggctccgggagagaaaggcgagggcgggaggccgggactgccgggacctcgaggggaccccgggccgcgaggagaggcgggacccgcggggcccaccgggcctgccggggagtgctcggtgcctccgcgatccgccttcagcgccaagcgctccgagagccgggtgcctccgccgtctgacgcacccttgcccttcgaccgcgtgctggtgaacgagcagggacattacgacgccgtcaccggcaagttcacctgccaggtgcctggggtctactacttcgccgtccatgccaccgtctaccgggccagcctgcagtttgatctggtgaagaatggcgaatccattgcctctttcttccagtttttcggggggtggcccaagccagcctcgctctcggggggggccatggtgaggctggagcctgaggaccaagtgtgggtgcaggtgggtgtgggtgactacattggcatctatgccagcatcaagacagacagcaccttctccggattttctgcccaagaccagaggagtgtgctgtgctggcaagtgtaagtcccccagttgctctggtccaggagcccacggtggggtgctctcttcctggtcctctgcttctctggatcctccccaccccctcctgctcctggggccggcccttttctcagagatcactcaataaacctaagaaccctcaaaaaaaaanc

SEQ ID NO: 25433 - DNA, 211 bp, Homo sapiens
  misc_feature (210)..(210): n is a, c, g, or t
gatagggacgtgatgctgaggtcgctctagagatcccgtgcacattgtgggcagtgtaagtcccccagttgctctggtccaggagcccacggtggggtgctctcttcctggtcctctgcttctctggatcctccccaccccctcctgctcctggggccggcccttttctcagagatcactcaataaacctaagaaccctcaaaaaaaaanc

SEQ ID NO: 25434 - DNA, 1244 bp, Homo sapiens
  misc_feature (1243)..(1243): n is a, c, g, or t
agcggggaacaactggtttcctcttggagtctgggaggaggaaagcggagccggcagggagcgaaccaggactggggtgacggcagggcagggggcgcctggccggggagaagcgcgggggctggagcaccaccaactggagggtccggagtagcgagcgccccgaaggaggccatcggggagccgggaggggggactgcgagaggaccccggcgtccgggctcccggtgccagcgctatgaggccactcctcgtcctgctgctcctgggcctggcggccggctcgcccccactggacgacaacaagatccccagcctctgcccgggactgccgggacctcgaggggaccccgggccgcgaggagaggcgggacccgcggggcccaccgggcctgccggggagtgctcggtgcctccgcgatccgccttcagcgccaagcgctccgagagccgggtgcctccgccgtctgacgcacccttgcccttcgaccgcgtgctggtgaacgagcagggacattacgacgccgtcaccggcaagttcacctgccaggtgcctggggtctactacttcgccgtccatgccaccgtctaccgggccagcctgcagtttgatctggtgaagaatggcgaatccattgcctctttcttccagtttttcggggggtggcccaagccagcctcgctctcggggggggccatggtgaggctggagcctgaggaccaagtgtgggtgcaggtgggtgtgggtgactacattggcatctatgccagcatcaagacagacagcaccttctccggatttctggtgtactccgactggcacagctccccagtctttgcttagtgcccactgcaaagtgagctcatgctctcactcctagaaggagggtgtgaggctgacaaccaggtcatccaggagggctggcccccctggaatattgtgaatgactagggaggtggggtagagcactctccgtcctgctgctggcaaggaatgggaacagtggctgtctgcgatcaggtctggcagcatggggcagtggctggatttctgcccaagaccagaggagtgtgctgtgctggcaagtgtaagtcccccagttgctctggtccaggagcccacggtggggtgctctcttcctggtcctctgcttctctggatcctccccaccccctcctgctcctggggccggcccttttctcagagatcactcaataaacctaagaaccctcaaaaaaaaanc

SEQ ID NO: 25435 - DNA, 823 bp, Homo sapiens
caaggcctcccccttcacctgtgcctcagatgctacccaatcccgccttctctgtccctccagaaggcaccctttgcttaggcctccctctcttcctgaaccacctctggaagtttcttattggcctatgaatgcattcttatttcttcttatcaaataaagccttccctttaatttatggcacatttatgctttggaatccactctcaggaataatcagtatgtagcatattacacgtcaggcggcaacattctttttttttttttttttttttgaggcagggtcccgctctgtcatccaggctagagtacggtggtgcaatcatagttcactgcagcctcaacttcctggggtcaagccatcttcccacctcagtctcccaagtagctggaaccacatgtgtgcactaccacacccagctagtttttttttgtagagacagggccttgccttgttgcccaggctggtctccaagtcctgggctcaagtgatgctcctgccttggccttccaaagtgctaggattacaggtgtgagctaccatgcctggtccaacattcttcatttggtaaatggctaaacttagtgcagagtatgagcctgattttgtttaaaaaaaaaatgtgtgtgggtgtgtatatgtatctttgagtgtatataaaaagactgaaagagggctgggcacggtggctcatgcctgtaatcccagcactttgggaggctgagggaggcggatcacttaagtcaggagtttgagaccagactgggtgaaaccccatctctactaaaaaatgcaaaaattagctgggcatggtggcgggca

SEQ ID NO: 25436 - DNA, 420 bp, Homo sapiens
aaatcattagatcccgtgagacttactcactgccatgaaaacagtataggggcaactgcccccatgattgaattatctcccaccggctccctcccacaacacatgggaattatgggagctacaattcaagatgagatttgggtggggacacagccaaattgtaccagtatccatgtgtgcattgaccaaatcattcagcatctcttgtgtgctccttatctgtctagagcagagatggggcagaaatgaagttcctagaagtgggcattttatctgaaattctcaggattaaaatagcactgtccaaaataattgtaattcaagctacaaatataatttaaaattttctagtagtcaaattttaaaagtgtagactagtatgcaaggtcaaatattttaaatactttagtagtcacatta

SEQ ID NO: 25437 - DNA, 417 bp, Homo sapiens
gatcagatctcactatgtttctcaggctggtctcaaactcctgggctcaaactatctgcctgccttggcctcccgaagtgctaggattacaggcatgagccaccacacttggctgttgttaattaatatggaatttcaacttccatcactcctggacaagtcttagctcttaaagtcttaatgccagatctctctggccacagagctaacaattcagacttgatgcctctgagcactgctgtgaatattcaagcctgctgtgaaacactatatgatctctgaccgtgtctccattatctcacatggttgatatcatttgccattcttaacatagaaaaaaactaaagtgggggaagggatatgcaaggaccccagagttttcccatcagtgaatcccatagcctgtgatttccatgc

SEQ ID NO: 25438 - DNA, 408 bp, Homo sapiens
cgtatcacacacatgtggctgggacatcagaatcttagccaaaatttggtaaatacctaagtgaaagactagttaaattctatgttcacaataacaagcattggcaaagatagggagaaactggaaccctcatacattgtgacagaaatataaatagtgtggccactttgaaaacatttcagtagctcatcaaaagattaaacatagggttaccatttaacctagcaatttcactcctagatatctgcccgagagacttgaaaacacatatccacacaaaaacatgtacatgggctgggtgcagtggctcacgcctgtaaccctagcactttgggaggctgaggcaggtggatcacttgagtccaggagtttaagaccagcctgggcaacatggcaaaaccccttctc

SEQ ID NO: 25439 - DNA, 176 bp, Homo sapiens
gtgccccaagtgtaaaatacatatcagatcaaagatgcagcacagaaatgtaaaatatctcatgaatagtgtttttttactgattacatattgaagtaatatattgggttcactaaaatatattattaaaatatttcacccacccactttttttttactttttaaatgtgactact

SEQ ID NO: 25440 - DNA, 3516 bp, Homo sapiens
agggggcggggaaggggcgttttccagccccgaaggagtcctttggggttggaggaggggcgcgagcgcgcggcaaatcgggcgggaagaggtaaaaaaggaactgggagcgcgccgcggcggttcctgtccttacagttgcgctgcccagggaccgatgttgcgcgaggaaaatgcgggacgcccaggtcggtgctcggcccagacttatgcccgtgttttcacagcccacactcgtgcccgaagccccttaccccgccccgggctgtggtctgtgggctgtgggacgagctgcggcgcgggccatttctgagcagtggaggtttcaagtaatccactaacaaccagttccaaattctgtcatcaaatcctgtgctgctgttcctcgtggtaatagatgcatattatttcttttatttaaaagaaatgaatgtgactagtattgcattaagagctgaaacttggcttttagctgcatggcatgttaaagtacctccgatgtggctggaagcttgtattaactggattcaagaagaaaataataatgttaacttgagtcaggcccaaatgaataaacaagtgtttgagcagtggctccttactgatctgagggatttggagcatcctcttttacccgatggcattttagaaattccaaaaggagaattaaatggattttatgctctgcagattaattccttggttgatgtaagtcagcctgcatactcccagatacagaagttgagaggaaagaatacaacaaatgatctagttacagctgaagcacaagtaaccccaaaaccttgggaagcaaagccttcacgaatgttgatgctgcagctaactgatggaatcgtacaaatacagggaatggaatatcagcctattccaattcttcatagtgatcttcctccaggtacaaaaattttgatttatggaaatatatctttccgtcttggtgttctcttattgaaaccagaaaacgtgaaagtgttaggaggtgaagtagatgctcttttagaagaatatgcccaagaaaaagtacttgcaagattaataggggaacctgatcttgtagtttcagtcataccaaacaattctaacgaaaacattcccagagttacagatgttctagatcctgcattaggtccttctgatgaagaactcttggcaagtcttgatgaaaatgatgagcttacagcaaataatgacacttcctcagaacgatgtttcaccacaggtagttcctcaaataccattcccacaagacagtcaagttttgagccagaatttgttatttctccaagaccaaaagaggaaccatcaaacctatctatacatgtaatggatggagaattagatgacttttcactggaggaggccttgcttttagaagaaactgtccagaaagaacagatggaaactaaggaattgcaaccattgacttttaacagaaatgccgatcgaagtatagagagattttcacataatcctaatactacgaataacttttctttgacttgcaaaaatggaaacaataattggagtgaaaaaaatgtatctgaacaaatgactaatgaagacaaatcatttggttgtccatctgttagagaccaaaacaggagtattttttcagttcattgtaatgtacccttagcccatgattttacaaataaagaaaagaacttagagacagataataaaataaaacaaaccagcagttcagatagccattccttaaataataaaatattaaatagagaggtggtcaactatgtacagaaaaggagttcacaaatttctaatgaaaatgattgtaatttacagagttgttctttaagatcatcagagaatagcattaatctttctattgccatggatttgtattctccaccctttgtctatttgtctgttctaatggccagcaaaccaaaggaagttacaacagtgaaagtgaaagcatttattgtaaccttaactggaaatctctcaagttctggtggtatttggagtataactgcaaaggtgtctgatggtactgcatatctagatgtagactttgtggatgaaatacttactagcttgatagggttctcagtaccagaaatgaaacagtcaaaaaaggatcctcttcaataccaaaagttcctggaagggttgcagaaatgtcaaagagatctaatagatttgtgctgtctaatgactatttcatttaatccttccttgtctaaagcaatggtactggcattacaagatgttaatatggaacaccttgagaatctaaagaagcggttaaataaataattaaactaaaatagtattaggaacaattaaaaacaacaaggaaatatttagaatttgttcacaattttacttatgatactttgtgtaaaaaggaaaaatgaaatttcatagcttatttcagtttaattttaaagtgtttaatcatgtttgttatatgtggagcttttgaaaataagttaatctttttttttttttttaatgtcagggtattgctctgttgcccaggctagagtgcagtggcatgatcataggttattgcatcaacctcttgagctcaagcgatcctcctgccttagcctcttgagttgctgggactataggcatgtaccaccatgcccagctaatttataattactattattgttttgtagggacagagttttgctatgttgcccagattggtctcaaactcctggcctctcactcctgccgtcatggcctccaaagtttaatttttttaaaagtaactgttagatggaggaatatggtgacccactattgttgagaaatttgttttccacttgtcacgtcacataagatgattgctaaaatattgtactggtgttcggtggtgagtcatatttttgaaagttaataattataaataggtaatttccttctaatatgttggtactgtctatggccataccaccctgaacatgcctgagcttgtcataatatgttgagtacccaaaagatttgtttatattgttaatcttagggaaaaaaaattaaaatccagtagatcagaacatcaggctttcagatacaaattgatttactggtttttattttgctgattataatatttggtatatttaaggtaatctagttaactagatgctatttcatagattatattgaatgatttaaaactttattttcaaggatagtttattttaaatggcatattgaaaacatcattattaagatccagtaggtaggacatttattggattaaaatgaagcatttatctatgtctttaggtgtcattgttccctttctgaattagctgtacatataagccttcctttggttttaagtactgatttttttttaaaaaaaagagggactgtttaccattcttccactgtgctgttataaagttgtatttgaaaggtaatgttgtttttattaatcttttgtcttaaaataatttaaagtgctttgaattttaaaacattaaacaaatccttaaataacaaaataca

SEQ ID NO: 25441 - DNA, 363 bp, Homo sapiens
  misc_feature (1)..(1): n is a, c, g, or t
nacccaagaccaaaagcactggaggaggccgcagaagaaactgtccagaaagaacagatggaaactaaggaattgcaaccattgacttttaacagaaatgccgatcgaagtatagagagattttcacataatcctaatactacgaataacttttctttgacttgcaaaaatggaaacaataattggagtgaaaaaaatgtatctgaacaaatgactaatgaagacaaatcatttggttgtccatctgttagagaccaaaacaggagtattttttcagttcattgtaatgtacccttagcccatgattttacaaataaagaaaaaaaactcgagacagttctcctcgtaccgaattcctcagcc

SEQ ID NO: 25442 - DNA, 3403 bp, Homo sapiens
agggggcggggaaggggcgttttccagccccgaaggagtcctttggggttggaggaggggcgcgagcgcgcggcaaatcgggcgggaagaggtaaaaaaggaactgggagcgcgccgcggcggttcctgtccttacagttgcgctgcccagggaccgatgttgcgcgaggaaaatgcgggacgcccagggccatttctgagcagtggaggtttcaagtaatccactaacaaccagttccaaattctgtcatcaaatcctgtgctgctgttcctcgtggtaatagatgcatattatttcttttatttaaaagaaatgaatgtgactagtattgcattaagagctgaaacttggcttttagctgcatggcatgttaaagtacctccgatgtggctggaagcttgtattaactggattcaagaagaaaataataatgttaacttgagtcaggcccaaatgaataaacaagtgtttgagcagtggctccttactgatctgagggatttggagcatcctcttttacccgatggcattttagaaattccaaaaggagaattaaatggattttatgctctgcagattaattccttggttgatgtaagtcagcctgcatactcccagatacagaagttgagaggaaagaatacaacaaatgatctagttacagctgaagcacaagtaaccccaaaaccttgggaagcaaagccttcacgaatgttgatgctgcagctaactgatggaatcgtacaaatacagggaatggaatatcagcctattccaattcttcatagtgatcttcctccaggtacaaaaattttgatttatggaaatatatctttccgtcttggtgttctcttattgaaaccagaaaacgtgaaagtgttaggaggtgaagtagatgctcttttagaagaatatgcccaagaaaaagtacttgcaagattaataggggaacctgatcttgtagtttcagtcataccaaacaattctaacgaaaacattcccagagttacagatgttctagatcctgcattaggtccttctgatgaagaactcttggcaagtcttgatgaaaatgatgagcttacagcaaataatgacacttcctcagaacgatgtttcaccacaggtagttcctcaaataccattcccacaagacagtcaagttttgagccagaatttgttatttctccaagaccaaaagaggaaccatcaaacctatctatacatgtaatggatggagaattagatgacttttcactggaggaggccttgcttttagaagaaactgtccagaaagaacagatggaaactaaggaattgcaaccattgacttttaacagaaatgccgatcgaagtatagagagattttcacataatcctaatactacgaataacttttctttgacttgcaaaaatggaaacaataattggagtgaaaaaaatgtatctgaacaaatgactaatgaagacaaatcatttggttgtccatctgttagagaccaaaacaggagtattttttcagttcattgtaatgtacccttagcccatgattttacaaataaagaaaagaacttagagacagataataaaataaaacaaaccagcagttcagatagccattccttaaataataaaatattaaatagagaggtggtcaactatgtacagaaaaggagttcacaaatttctaatgaaaatgattgtaatttacagagttgttctttaagatcatcagagaatagcattaatctttctattgccatggatttgtattctccaccctttgtctatttgtctgttctaatggccagcaaaccaaaggaagttacaacagtgaaagtgaaagcatttattgtaaccttaactggaaatctctcaagttctggtggtatttggagtataactgcaaaggtgtctgatggtactgcatatctagatgtagactttgtggatgaaatacttactagcttgatagggttctcagtaccagaaatgaaacagtcaaaaaaggatcctcttcaataccaaaagttcctggaagggttgcagaaatgtcaaagagatctaatagatttgtgctgtctaatgactatttcatttaatccttccttgtctaaagcaatggtactggcattacaagatgttaatatggaacaccttgagaatctaaagaagcggttaaataaataattaaactaaaatagtattaggaacaattaaaaacaacaaggaaatatttagaatttgttcacaattttacttatgatactttgtgtaaaaaggaaaaatgaaatttcatagcttatttcagtttaattttaaagtgtttaatcatgtttgttatatgtggagcttttgaaaataagttaatctttttttttttttttaatgtcagggtattgctctgttgcccaggctagagtgcagtggcatgatcataggttattgcatcaacctcttgagctcaagcgatcctcctgccttagcctcttgagttgctgggactataggcatgtaccaccatgcccagctaatttataattactattattgttttgtagggacagagttttgctatgttgcccagattggtctcaaactcctggcctctcactcctgccgtcatggcctccaaagtttaatttttttaaaagtaactgttagatggaggaatatggtgacccactattgttgagaaatttgttttccacttgtcacgtcacataagatgattgctaaaatattgtactggtgttcggtggtgagtcatatttttgaaagttaataattataaataggtaatttccttctaatatgttggtactgtctatggccataccaccctgaacatgcctgagcttgtcataatatgttgagtacccaaaagatttgtttatattgttaatcttagggaaaaaaaattaaaatccagtagatcagaacatcaggctttcagatacaaattgatttactggtttttattttgctgattataatatttggtatatttaaggtaatctagttaactagatgctatttcatagattatattgaatgatttaaaactttattttcaaggatagtttattttaaatggcatattgaaaacatcattattaagatccagtaggtaggacatttattggattaaaatgaagcatttatctatgtctttaggtgtcattgttccctttctgaattagctgtacatataagccttcctttggttttaagtactgatttttttttaaaaaaaagagggactgtttaccattcttccactgtgctgttataaagttgtatttgaaaggtaatgttgtttttattaatcttttgtcttaaaataatttaaagtgctttgaattttaaaacattaaacaaatccttaaataacaaaataca

SEQ ID NO: 25443 - DNA, 3592 bp, Homo sapiens
agggggcggggaaggggcgttttccagccccgaaggagtcctttggggttggaggaggggcgcgagcgcgcggcaaatcgggcgggaagaggtaaaaaaggaactgggagcgcgccgcggcggttcctgtccttacagttgcgctgcccagggaccgatgttgcgcgaggaaaatgcgggacgcccaggtcggtgctcggcccagacttatgcccgtgttttcacagcccacactcgtgcccgaagccccttaccccgccccgggctgtggtctgtgggctgtgggacgagctgcggcgcgggtcttgctctatcgcccaagctggagagcagaggcatgatcacatctcactgcagccttgtcctcctaggctcagggccatttctgagcagtggaggtttcaagtaatccactaacaaccagttccaaattctgtcatcaaatcctgtgctgctgttcctcgtggtaatagatgcatattatttcttttatttaaaagaaatgaatgtgactagtattgcattaagagctgaaacttggcttttagctgcatggcatgttaaagtacctccgatgtggctggaagcttgtattaactggattcaagaagaaaataataatgttaacttgagtcaggcccaaatgaataaacaagtgtttgagcagtggctccttactgatctgagggatttggagcatcctcttttacccgatggcattttagaaattccaaaaggagaattaaatggattttatgctctgcagattaattccttggttgatgtaagtcagcctgcatactcccagatacagaagttgagaggaaagaatacaacaaatgatctagttacagctgaagcacaagtaaccccaaaaccttgggaagcaaagccttcacgaatgttgatgctgcagctaactgatggaatcgtacaaatacagggaatggaatatcagcctattccaattcttcatagtgatcttcctccaggtacaaaaattttgatttatggaaatatatctttccgtcttggtgttctcttattgaaaccagaaaacgtgaaagtgttaggaggtgaagtagatgctcttttagaagaatatgcccaagaaaaagtacttgcaagattaataggggaacctgatcttgtagtttcagtcataccaaacaattctaacgaaaacattcccagagttacagatgttctagatcctgcattaggtccttctgatgaagaactcttggcaagtcttgatgaaaatgatgagcttacagcaaataatgacacttcctcagaacgatgtttcaccacaggtagttcctcaaataccattcccacaagacagtcaagttttgagccagaatttgttatttctccaagaccaaaagaggaaccatcaaacctatctatacatgtaatggatggagaattagatgacttttcactggaggaggccttgcttttagaagaaactgtccagaaagaacagatggaaactaaggaattgcaaccattgacttttaacagaaatgccgatcgaagtatagagagattttcacataatcctaatactacgaataacttttctttgacttgcaaaaatggaaacaataattggagtgaaaaaaatgtatctgaacaaatgactaatgaagacaaatcatttggttgtccatctgttagagaccaaaacaggagtattttttcagttcattgtaatgtacccttagcccatgattttacaaataaagaaaagaacttagagacagataataaaataaaacaaaccagcagttcagatagccattccttaaataataaaatattaaatagagaggtggtcaactatgtacagaaaaggagttcacaaatttctaatgaaaatgattgtaatttacagagttgttctttaagatcatcagagaatagcattaatctttctattgccatggatttgtattctccaccctttgtctatttgtctgttctaatggccagcaaaccaaaggaagttacaacagtgaaagtgaaagcatttattgtaaccttaactggaaatctctcaagttctggtggtatttggagtataactgcaaaggtgtctgatggtactgcatatctagatgtagactttgtggatgaaatacttactagcttgatagggttctcagtaccagaaatgaaacagtcaaaaaaggatcctcttcaataccaaaagttcctggaagggttgcagaaatgtcaaagagatctaatagatttgtgctgtctaatgactatttcatttaatccttccttgtctaaagcaatggtactggcattacaagatgttaatatggaacaccttgagaatctaaagaagcggttaaataaataattaaactaaaatagtattaggaacaattaaaaacaacaaggaaatatttagaatttgttcacaattttacttatgatactttgtgtaaaaaggaaaaatgaaatttcatagcttatttcagtttaattttaaagtgtttaatcatgtttgttatatgtggagcttttgaaaataagttaatctttttttttttttttaatgtcagggtattgctctgttgcccaggctagagtgcagtggcatgatcataggttattgcatcaacctcttgagctcaagcgatcctcctgccttagcctcttgagttgctgggactataggcatgtaccaccatgcccagctaatttataattactattattgttttgtagggacagagttttgctatgttgcccagattggtctcaaactcctggcctctcactcctgccgtcatggcctccaaagtttaatttttttaaaagtaactgttagatggaggaatatggtgacccactattgttgagaaatttgttttccacttgtcacgtcacataagatgattgctaaaatattgtactggtgttcggtggtgagtcatatttttgaaagttaataattataaataggtaatttccttctaatatgttggtactgtctatggccataccaccctgaacatgcctgagcttgtcataatatgttgagtacccaaaagatttgtttatattgttaatcttagggaaaaaaaattaaaatccagtagatcagaacatcaggctttcagatacaaattgatttactggtttttattttgctgattataatatttggtatatttaaggtaatctagttaactagatgctatttcatagattatattgaatgatttaaaactttattttcaaggatagtttattttaaatggcatattgaaaacatcattattaagatccagtaggtaggacatttattggattaaaatgaagcatttatctatgtctttaggtgtcattgttccctttctgaattagctgtacatataagccttcctttggttttaagtactgatttttttttaaaaaaaagagggactgtttaccattcttccactgtgctgttataaagttgtatttgaaaggtaatgttgtttttattaatcttttgtcttaaaataatttaaagtgctttgaattttaaaacattaaacaaatccttaaataacaaaataca

SEQ ID NO: 25444 - DNA, 448 bp, Homo sapiens
cttccttctttcttccagaaccagcagtcatcggcggctccaacctcacaggagagaagcagcaacccagccccccgcaggcagcaggcgtttgtggcccctctctcccaagccccctacaccttccagcatggcagcccgctacactcgacagggcacccacaccttgccccggcccctgctcacctgccaagccaggctcatctgtatacgtatgctgccccgacttctgctgctgcactgggctcaaccagctccattgctcatcttttctccccacagggttcctcaaggcatgctgcagcctataccactcaccctagcactttggtgcaccaggtccctgtcagtgttgggcccagcctcctcacttctgccagcgtggcccctgctcagtactaccaacagcttcagagtacccccttttaagggaaccatgcacctaaca

SEQ ID NO: 25445 - DNA, 5938 bp, Homo sapiens
caatagctggactacaagcaacaacaaagcattctggattccctgtgaggatggataatgctgtaccgattgtaccccaggcaccagctgctcagccactacagattcagtcaggagttctcacgcagggaagctgtacaccactaatggtagcaactctccaccctcaagtagccaccatcacaccgcagtatgcggtgccctttactctgagctgcgcagccggccggccggcgctggttgaacagactgccgctgtactggcgtggcctggagggactcagcaaattctcctgccttcaacttggcaacagttgcctggggtagctctacacaactctgtccagcccacagcaatgattccagaggccatggggagtggacagcagctagctgactggaggaatgcccactctcatggcaaccagtacagcactatcatgcagcagccatccttgctgactaaccatgtgacattggccactgctcagcctctgaatgttggtgttgcccatgttgtcagacaacaacaatccagttccctcccttcgaagaagaataagcagtcagctccagtctcttccaagtcctctctagatgttctgccttcccaagtctattctctggttgggagcagtcccctccgcaccacatcttcttataattccttggtccctgtccaagatcagcatcagcccatcatcattccagatactcccagccctcctgtgagtgtcatcactatccgaagtgacactgatgaggaagaggacaacaaatacaagcccagtagctctggactgaagccaaggtctaatgtcatcagttatgtcactgtcaatgattctccagactctgactcttctttgagcagcccttattccactgataccctgagtgctctccgaggcaatagtggatccgttttggaggggcctggcagagttgtggcagatggcactggcacccgcactatcattgtgcctccactgaaaactcagcttggtgactgcactgtagcaacccaggcctcaggtctcctgagcaataagactaagccagtcgcttcagtgagtgggcagtcatctggatgctgtatcacccccacagggtatcgagctcaacgcggggggaccagtgcagcacaaccactcaatcttagccagaaccagcagtcatcggcggctccaacctcacaggagagaagcagcaacccagccccccgcaggcagcaggcgtttgtggcccctctctcccaagccccctacaccttccagcatggcagcccgctacactcgacagggcacccacaccttgccccggcccctgctcacctgccaagccaggctcatctgtatacgtatgctgccccgacttctgctgctgcactgggctcaaccagctccattgctcatcttttctccccacagggttcctcaaggcatgctgcagcctataccactcaccctagcactttggtgcaccaggtccctgtcagtgttgggcccagcctcctcacttctgccagcgtggcccctgctcagtaccaacaccagtttgccacccaatcctacattgggtcttcccgaggctcaacaatttacactggatacccgctgagtcctaccaagatcagccagtattcctacttatagttggtgagcatgagggaggaggaatcatggctaccttctcctggccctgcgttcttaatattgggctatggagagatcctcctttaccctcttgaaatttcttagccagcaacttgttctgcaggggcccactgaagcagaaggtttttctctgggggaacctgtctcagtgttgactgcattgttgtagtcttcccaaagtttgccctatttttaaattcattatttttgtgacagtaattttggtacttggaagagttcagatgcccatcttctgcagttaccaaggaagagagattgttctgaagttaccctctgaaaaatattttgtctctctgacttgatttctataaatgcttttaaaaacaagtgaagcccctctttatttcattttgtgttattgtgattgctggtcaggaaaaatgctgatagaaggagttgaaatctgatgacaaaaaaagaaaaattactttttgtttgtttataaactcagacttgcctattttattttaaaagcggcttacacaatctcccttttgtttattggacatttaaacttacagagtttcagttttgttttaatgtcatattatacttaatgggcaattgttatttttgcaaaactggttacgtattactctgtgttactattgagattctctcaattgctcctgtgtttgttataaagtagtgtttaaaaggcagctcaccatttgctggtaacttaatgtgagagaatccatatctgcgtgaaaacaccaagtattctttttaaatgaagcaccatgaattcttttttaaattattttttaaaagtctttctctctctgattcagcttaaatttttttatcgaaaaagccattaaggtggttattattacatggtggtggtggttttattatatgcaaaatctctgtctattatgagatactggcattgatgagctttgcctaaagattagtatgaattttcagtaatacacctctgttttgctcatctctcccttctgttttatgtgatttgtttggggagaaagctaaaaaaacctgaaaccagataagaacatttcttgtgtatagcttttatacttcaaagtagcttcctttgtatgccagcagcaaattgaatgctctcttattaagacttatataataagtgcatgtaggaattgcaaaaaatattttaaaaatttattactgaatttaaaaatattttagaagttttgtaatggtggtgttttaatattttacataattaaatatgtacatattgattagaaaaatataacaagcaatttttcctgctaacccaaaatgttatttgtaatcaaatgtgtagtgattacacttgaattgtgtacttagtgtgtatgtgatcctccagtgttatcccggagatggattgatgtctccattgtatttaaaccaaaatgaactgatacttgttggaatgtatgtgaactaattgcaattatattagagcatattactgtagtgctgaatgagcaggggcattgcctgcaaggagaggagacccttggaattgttttgcacaggtgtgtctggtgaggagtttttcagtgtgtgtctcttccttccctttcttcctccttcccttattgtagtgccttatatgataatgtagtggttaatagagtttacagtgagcttgccttaggatggaccagcaagcccccgtggaccctaagttgttcaccgggatttatcagaacaggattagtagctgtattgtgtaatgcattgttctcagtttccctgccaacattgaaaaataaaaacagcagcttttctcctttaccaccacctctacccctttccattttggattctcggctgagttctcacagaagcattttccccatgtggctctctcactgtgcgttgctaccttgcttctgtgagaattcaggaagcaggtgagaggagtcaagccaatattaaatatgcattcttttaaagtatgtgcaatcacttttagaatgaatttttttttccttttcccatgtggcagtccttcctgcacatagttgacattcctagtaaaatatttgcttgttgaaaaaaacatgttaacagatgtgtttataccaaagagcctgttgtattgcttaccatgtccccatactatgaggagaagttttgtggtgccgctggtgacaaggaactcacagaaaggtttcttagctggtgaagaatatagagaaggaaccaaagcctgttgagtcattgaggcttttgaggtttcttttttaacagcttgtatagtcttggggcccttcaagctgtgaaattgtccttgtactctcagctcctgcatggatctgggtcaagtagaaggtactggggatggggacattcctgcccataaaggatttggggaaagaagattaatcctaaaatacaggtgtgttccatctgaattgaaaatgatatatttgagatataattttaggactggttctgtgtagatagagatggtgtcaaggaggtgcaggatggagatgggagatttcatggagcctggtcagccagctctgtaccaggttgaacaccgaggagctgtcaaagtatttggagtttcttcattgtaaggagtaagggcttccaagatggggcaggtagtccgtacagcctaccaggaacatgttgtgttttctttattttttaaaatcattatattgagttgtgttttcagcactatattggtcaagatagccaagcagtttgtataatttctgtcactagtgtcatacagttttctggtcaacatgtgtgatctttgtgtctcctttttgccaagcacattctgattttcttgttggaacacaggtctagtttctaaaggacaaattttttgttccttgtcttttttctgtaagggacaagatttgttgttttgtaagaaatgagatgcaggaaagaaaaccaaatcccattcctgcaccccagtccaataagcagataccacttaagataggagtctaaactccacagaaaaggataataccaagagcttgtattgttaccttagtcacttgcctagcagtgtgtggctttaaaaactagagatttttcagtcttagtctgcaaactggcatttccgattttccagcataaaaatccacctgtgtctgctgaatgtgtatgtatgtgctcactgtggctttagattctgtccctggggttaggcctgttggccctgacaggaagggaggaagcctggtgaatttagtgagcagctggcctgggtcacagtgacctgacctcaaaccagcttaaggctttaagtcctctctcagaacttggcatttccaacttcttcctttccgggtgagagaagaagcggagaagggttcagtgtagccactctgggctcatagggacacttggtcactccagagtttttaatagctcccaggaggtgatattattttcagtgctcagctgaaataccaaccccaggaataagaactccatttcaaacagttctggccattctgagcctgcttttgtgattgctcatccattgtcctccactagaggggctaagcttgactgcccttagccaggcaagcacagtaatgtgtgttttgttcagcattattatgcaaaaattcactagttgagatggtttgttttaggataggaaatgaaattgcctctcagtgacaggagtggcccgagcctgcttcctattttgattttttttttttttaactgatagatggtgcagcatgtctacatggttgtttgttgctaaactttatataatgtgtggtttcaattcagcttgaaaaataatctcactacatgtagcagtacattatatgtacattatatgtaatgttagtatttctgctttgaatccttgatattgcaatggaattcctactttattaaatgtatttgatatgctagttattgtgtgcgatttaaactttttttgctttctccctttttttggttgtgcgctttcttttacaacaagcctctagaaacagatagtttctgagaattactgagctatgtttgtaatgcagatgtacttagggagtatgtaaaataatcattttaacaaaagaaatagatatttaaaatttaatactaactatgggaaaagggtccattgtgtaaaacatagtttatctttggattcaatgtttgtctttggttttacaaagtagcttgtattttcagtattttctacataatatggtaaaatgtagagcaattgcaatgcatcaataaaatgggtaaatttt

SEQ ID NO: 25446 - DNA, 4840 bp, Homo sapiens
  misc_feature (20)..(20): n is a, c, g, or t
gctaacccaaaatgttattngtaatcaaatgtgtagtgattacacttgaattgtgtacttagtgtgtatgtgatcctccagtgttatcccggagatggattgatgtctccattgtatttaaaccaaaatgaactgatacttgttggaatgtatgtgaactaattgcaattatcttccagcatggcagcccgctacactcgacagggcacccacaccttgccccggcccctgctcacctgccaagccaggctcatctgtatacgtatgctgccccgacttctgctgctgcactgggctcaaccagctccattgctcatcttttctccccacagggttcctcaaggcatgctgcagcctataccactcaccctagcactttggtgcaccaggtccctgtcagtgttgggcccagcctcctcacttctgccagcgtggcccctgctcagtaccaacaccagtttgccacccaatcctacattgggtcttcccgaggctcaacaatttacactggatacccgctgagtcctaccaagatcagccagtattcctacttatagttggtgagcatgagggaggaggaatcatggctaccttctcctggccctgcgttcttaatattgggctatggagagatcctcctttaccctcttgaaatttcttagccagcaacttgttctgcaggggcccactgaagcagaaggtttttctctgggggaacctgtctcagtgttgactgcattgttgtagtcttcccaaagtttgccctatttttaaattcattatttttgtgacagtaattttggtacttggaagagttcagatgcccatcttctgcagttaccaaggaagagagattgttctgaagttaccctctgaaaaatattttgtctctctgacttgatttctataaatgcttttaaaaacaagtgaagcccctctttatttcattttgtgttattgtgattgctggtcaggaaaaatgctgatagaaggagttgaaatctgatgacaaaaaaagaaaaattactttttgtttgtttataaactcagacttgcctattttattttaaaagcggcttacacaatctcccttttgtttattggacatttaaacttacagagtttcagttttgttttaatgtcatattatacttaatgggcaattgttatttttgcaaaactggttacgtattactctgtgttactattgagattctctcaattgctcctgtgtttgttataaagtagtgtttaaaaggcagctcaccatttgctggtaacttaatgtgagagaatccatatctgcgtgaaaacaccaagtattctttttaaatgaagcaccatgaattcttttttaaattattttttaaaagtctttctctctctgattcagcttaaatttttttatcgaaaaagccattaaggtggttattattacatggtggtggtggttttattatatgcaaaatctctgtctattatgagatactggcattgatgagctttgcctaaagattagtatgaattttcagtaatacacctctgttttgctcatctctcccttctgttttatgtgatttgtttggggagaaagctaaaaaaacctgaaaccagataagaacatttcttgtgtatagcttttatacttcaaagtagcttcctttgtatgccagcagcaaattgaatgctctcttattaagacttatataataagtgcatgtaggaattgcaaaaaatattttaaaaatttattactgaatttaaaaatattttagaagttttgtaatggtggtgttttaatattttacataattaaatatgtacatattgattagaaaaatataacaagcaatttttcctgctaacccaaaatgttatttgtaatcaaatgtgtagtgattacacttgaattgtgtacttagtgtgtatgtgatcctccagtgttatcccggagatggattgatgtctccattgtatttaaaccaaaatgaactgatacttgttggaatgtatgtgaactaattgcaattatattagagcatattactgtagtgctgaatgagcaggggcattgcctgcaaggagaggagacccttggaattgttttgcacaggtgtgtctggtgaggagtttttcagtgtgtgtctcttccttccctttcttcctccttcccttattgtagtgccttatatgataatgtagtggttaatagagtttacagtgagcttgccttaggatggaccagcaagcccccgtggaccctaagttgttcaccgggatttatcagaacaggattagtagctgtattgtgtaatgcattgttctcagtttccctgccaacattgaaaaataaaaacagcagcttttctcctttaccaccacctctacccctttccattttggattctcggctgagttctcacagaagcattttccccatgtggctctctcactgtgcgttgctaccttgcttctgtgagaattcaggaagcaggtgagaggagtcaagccaatattaaatatgcattcttttaaagtatgtgcaatcacttttagaatgaatttttttttccttttcccatgtggcagtccttcctgcacatagttgacattcctagtaaaatatttgcttgttgaaaaaaacatgttaacagatgtgtttataccaaagagcctgttgtattgcttaccatgtccccatactatgaggagaagttttgtggtgccgctggtgacaaggaactcacagaaaggtttcttagctggtgaagaatatagagaaggaaccaaagcctgttgagtcattgaggcttttgaggtttcttttttaacagcttgtatagtcttggggcccttcaagctgtgaaattgtccttgtactctcagctcctgcatggatctgggtcaagtagaaggtactggggatggggacattcctgcccataaaggatttggggaaagaagattaatcctaaaatacaggtgtgttccatctgaattgaaaatgatatatttgagatataattttaggactggttctgtgtagatagagatggtgtcaaggaggtgcaggatggagatgggagatttcatggagcctggtcagccagctctgtaccaggttgaacaccgaggagctgtcaaagtatttggagtttcttcattgtaaggagtaagggcttccaagatggggcaggtagtccgtacagcctaccaggaacatgttgtgttttctttattttttaaaatcattatattgagttgtgttttcagcactatattggtcaagatagccaagcagtttgtataatttctgtcactagtgtcatacagttttctggtcaacatgtgtgatctttgtgtctcctttttgccaagcacattctgattttcttgttggaacacaggtctagtttctaaaggacaaattttttgttccttgtcttttttctgtaagggacaagatttgttgttttgtaagaaatgagatgcaggaaagaaaaccaaatcccattcctgcaccccagtccaataagcagataccacttaagataggagtctaaactccacagaaaaggataataccaagagcttgtattgttaccttagtcacttgcctagcagtgtgtggctttaaaaactagagatttttcagtcttagtctgcaaactggcatttccgattttccagcataaaaatccacctgtgtctgctgaatgtgtatgtatgtgctcactgtggctttagattctgtccctggggttaggcctgttggccctgacaggaagggaggaagcctggtgaatttagtgagcagctggcctgggtcacagtgacctgacctcaaaccagcttaaggctttaagtcctctctcagaacttggcatttccaacttcttcctttccgggtgagagaagaagcggagaagggttcagtgtagccactctgggctcatagggacacttggtcactccagagtttttaatagctcccaggaggtgatattattttcagtgctcagctgaaataccaaccccaggaataagaactccatttcaaacagttctggccattctgagcctgcttttgtgattgctcatccattgtcctccactagaggggctaagcttgactgcccttagccaggcaagcacagtaatgtgtgttttgttcagcattattatgcaaaaattcactagttgagatggtttgttttaggataggaaatgaaattgcctctcagtgacaggagtggcccgagcctgcttcctattttgattttttttttttttaactgatagatggtgcagcatgtctacatggttgtttgttgctaaactttatataatgtgtggtttcaattcagcttgaaaaataatctcactacatgtagcagtacattatatgtacattatatgtaatgttagtatttctgctttgaatccttgatattgcaatggaattcctactttattaaatgtatttgatatgctagttattgtgtgcgatttaaactttttttgctttctccctttttttggttgtgcgctttcttttacaacaagcctctagaaacagatagtttctgagaattactgagctatgtttgtaatgcagatgtacttagggagtatgtaaaataatcattttaacaaaagaaatagatatttaaaatttaatactaactatgggaaaagggtccattgtgtaaaacatagtttatctttggattcaatgtttgtctttggttttacaaagtagcttgtattttcagtattttctacataatatggtaaaatgtagagcaattgcaatgcatcaataaaatgggtaaatttt

SEQ ID NO: 25447 - DNA, 4762 bp, Homo sapiens
tcatagctgattcctgaggataaacagcgggcaggtgacccccacccgtggcaagagctatttccggacccaaatactcccaggccccctacaccttccagcatggcagcccgctacactcgacagggcacccacaccttgccccggcccctgctcacctgccaagccaggctcatctgtatacgtatgctgccccgacttctgctgctgcactgggctcaaccagctccattgctcatcttttctccccacagggttcctcaaggcatgctgcagcctataccactcaccctagcactttggtgcaccaggtccctgtcagtgttgggcccagcctcctcacttctgccagcgtggcccctgctcagtaccaacaccagtttgccacccaatcctacattgggtcttcccgaggctcaacaatttacactggatacccgctgagtcctaccaagatcagccagtattcctacttatagttggtgagcatgagggaggaggaatcatggctaccttctcctggccctgcgttcttaatattgggctatggagagatcctcctttaccctcttgaaatttcttagccagcaacttgttctgcaggggcccactgaagcagaaggtttttctctgggggaacctgtctcagtgttgactgcattgttgtagtcttcccaaagtttgccctatttttaaattcattatttttgtgacagtaattttggtacttggaagagttcagatgcccatcttctgcagttaccaaggaagagagattgttctgaagttaccctctgaaaaatattttgtctctctgacttgatttctataaatgcttttaaaaacaagtgaagcccctctttatttcattttgtgttattgtgattgctggtcaggaaaaatgctgatagaaggagttgaaatctgatgacaaaaaaagaaaaattactttttgtttgtttataaactcagacttgcctattttattttaaaagcggcttacacaatctcccttttgtttattggacatttaaacttacagagtttcagttttgttttaatgtcatattatacttaatgggcaattgttatttttgcaaaactggttacgtattactctgtgttactattgagattctctcaattgctcctgtgtttgttataaagtagtgtttaaaaggcagctcaccatttgctggtaacttaatgtgagagaatccatatctgcgtgaaaacaccaagtattctttttaaatgaagcaccatgaattcttttttaaattattttttaaaagtctttctctctctgattcagcttaaatttttttatcgaaaaagccattaaggtggttattattacatggtggtggtggttttattatatgcaaaatctctgtctattatgagatactggcattgatgagctttgcctaaagattagtatgaattttcagtaatacacctctgttttgctcatctctcccttctgttttatgtgatttgtttggggagaaagctaaaaaaacctgaaaccagataagaacatttcttgtgtatagcttttatacttcaaagtagcttcctttgtatgccagcagcaaattgaatgctctcttattaagacttatataataagtgcatgtaggaattgcaaaaaatattttaaaaatttattactgaatttaaaaatattttagaagttttgtaatggtggtgttttaatattttacataattaaatatgtacatattgattagaaaaatataacaagcaatttttcctgctaacccaaaatgttatttgtaatcaaatgtgtagtgattacacttgaattgtgtacttagtgtgtatgtgatcctccagtgttatcccggagatggattgatgtctccattgtatttaaaccaaaatgaactgatacttgttggaatgtatgtgaactaattgcaattatattagagcatattactgtagtgctgaatgagcaggggcattgcctgcaaggagaggagacccttggaattgttttgcacaggtgtgtctggtgaggagtttttcagtgtgtgtctcttccttccctttcttcctccttcccttattgtagtgccttatatgataatgtagtggttaatagagtttacagtgagcttgccttaggatggaccagcaagcccccgtggaccctaagttgttcaccgggatttatcagaacaggattagtagctgtattgtgtaatgcattgttctcagtttccctgccaacattgaaaaataaaaacagcagcttttctcctttaccaccacctctacccctttccattttggattctcggctgagttctcacagaagcattttccccatgtggctctctcactgtgcgttgctaccttgcttctgtgagaattcaggaagcaggtgagaggagtcaagccaatattaaatatgcattcttttaaagtatgtgcaatcacttttagaatgaatttttttttccttttcccatgtggcagtccttcctgcacatagttgacattcctagtaaaatatttgcttgttgaaaaaaacatgttaacagatgtgtttataccaaagagcctgttgtattgcttaccatgtccccatactatgaggagaagttttgtggtgccgctggtgacaaggaactcacagaaaggtttcttagctggtgaagaatatagagaaggaaccaaagcctgttgagtcattgaggcttttgaggtttcttttttaacagcttgtatagtcttggggcccttcaagctgtgaaattgtccttgtactctcagctcctgcatggatctgggtcaagtagaaggtactggggatggggacattcctgcccataaaggatttggggaaagaagattaatcctaaaatacaggtgtgttccatctgaattgaaaatgatatatttgagatataattttaggactggttctgtgtagatagagatggtgtcaaggaggtgcaggatggagatgggagatttcatggagcctggtcagccagctctgtaccaggttgaacaccgaggagctgtcaaagtatttggagtttcttcattgtaaggagtaagggcttccaagatggggcaggtagtccgtacagcctaccaggaacatgttgtgttttctttattttttaaaatcattatattgagttgtgttttcagcactatattggtcaagatagccaagcagtttgtataatttctgtcactagtgtcatacagttttctggtcaacatgtgtgatctttgtgtctcctttttgccaagcacattctgattttcttgttggaacacaggtctagtttctaaaggacaaattttttgttccttgtcttttttctgtaagggacaagatttgttgttttgtaagaaatgagatgcaggaaagaaaaccaaatcccattcctgcaccccagtccaataagcagataccacttaagataggagtctaaactccacagaaaaggataataccaagagcttgtattgttaccttagtcacttgcctagcagtgtgtggctttaaaaactagagatttttcagtcttagtctgcaaactggcatttccgattttccagcataaaaatccacctgtgtctgctgaatgtgtatgtatgtgctcactgtggctttagattctgtccctggggttaggcctgttggccctgacaggaagggaggaagcctggtgaatttagtgagcagctggcctgggtcacagtgacctgacctcaaaccagcttaaggctttaagtcctctctcagaacttggcatttccaacttcttcctttccgggtgagagaagaagcggagaagggttcagtgtagccactctgggctcatagggacacttggtcactccagagtttttaatagctcccaggaggtgatattattttcagtgctcagctgaaataccaaccccaggaataagaactccatttcaaacagttctggccattctgagcctgcttttgtgattgctcatccattgtcctccactagaggggctaagcttgactgcccttagccaggcaagcacagtaatgtgtgttttgttcagcattattatgcaaaaattcactagttgagatggtttgttttaggataggaaatgaaattgcctctcagtgacaggagtggcccgagcctgcttcctattttgattttttttttttttaactgatagatggtgcagcatgtctacatggttgtttgttgctaaactttatataatgtgtggtttcaattcagcttgaaaaataatctcactacatgtagcagtacattatatgtacattatatgtaatgttagtatttctgctttgaatccttgatattgcaatggaattcctactttattaaatgtatttgatatgctagttattgtgtgcgatttaaactttttttgctttctccctttttttggttgtgcgctttcttttacaacaagcctctagaaacagatagtttctgagaattactgagctatgtttgtaatgcagatgtacttagggagtatgtaaaataatcattttaacaaaagaaatagatatttaaaatttaatactaactatgggaaaagggtccattgtgtaaaacatagtttatctttggattcaatgtttgtctttggttttacaaagtagcttgtattttcagtattttctacataatatggtaaaatgtagagcaattgcaatgcatcaataaaatgggtaaatttt

SEQ ID NO: 25448 - DNA, 5661 bp, Homo sapiens
caatagctggactacaagcaacaacaaagcattctggattccctgtgaggatggataatgctgtaccgattgtaccccaggcaccagctgctcagccactacagattcagtcaggagttctcacgcagggaagctgtacaccactaatggtagcaactctccaccctcaagtagccaccatcacaccgcagtatgcggtgccctttactctgagctgcgcagccggccggccggcgctggttgaacagactgccgctgtactggcgtggcctggagggactcagcaaattctcctgccttcaacttggcaacagttgcctggggtagctctacacaactctgtccagcccacagcaatgattccagaggccatggggagtggacagcagctagctgactggaggaatgcccactctcatggcaaccagtacagcactatcatgcagcagccatccttgctgactaaccatgtgacattggccactgctcagcctctgaatgttggtgttgcccatgttgtcagacaacaacaatccagttccctcccttcgaagaagaataagcagtcagctccagtctcttccaagtcctctctagatgttctgccttcccaagtctattctctggttgggagcagtcccctccgcaccacatcttcttataattccttggtccctgtccaagatcagcatcagcccatcatcattccagatactcccagccctcctgtgagtgtcatcactatccgaagtgacactgatgaggaagaggacaacaaatacaagcccagtagctctggactgaagccaaggtctaatgtcatcagttatgtcactgtcaatgattctccagactctgactcttctttgagcagcccttattccactgataccctgagtgctctccgaggcaatagtggatccgttttggaggggcctggcagagttgtggcagatggcactggcacccgcactatcattgtgcctccactgaaaactcagcttggtgactgcactgtagcaacccaggcctcaggtctcctgagcaataagactaagccagtcgcttcagtgagtgggcagtcatctggatgctgtatcacccccacagggtatcgagctcaacgcggggggaccagtgcagcacaaccactcaatcttagccagaaccagcagtcatcggcggctccaacctcacaggagagaagcagcaacccagccccccgcaggcagcaggcgtttgtggcccctctctcccaagccccctacaccaacaccagtttgccacccaatcctacattgggtcttcccgaggctcaacaatttacactggatacccgctgagtcctaccaagatcagccagtattcctacttatagttggtgagcatgagggaggaggaatcatggctaccttctcctggccctgcgttcttaatattgggctatggagagatcctcctttaccctcttgaaatttcttagccagcaacttgttctgcaggggcccactgaagcagaaggtttttctctgggggaacctgtctcagtgttgactgcattgttgtagtcttcccaaagtttgccctatttttaaattcattatttttgtgacagtaattttggtacttggaagagttcagatgcccatcttctgcagttaccaaggaagagagattgttctgaagttaccctctgaaaaatattttgtctctctgacttgatttctataaatgcttttaaaaacaagtgaagcccctctttatttcattttgtgttattgtgattgctggtcaggaaaaatgctgatagaaggagttgaaatctgatgacaaaaaaagaaaaattactttttgtttgtttataaactcagacttgcctattttattttaaaagcggcttacacaatctcccttttgtttattggacatttaaacttacagagtttcagttttgttttaatgtcatattatacttaatgggcaattgttatttttgcaaaactggttacgtattactctgtgttactattgagattctctcaattgctcctgtgtttgttataaagtagtgtttaaaaggcagctcaccatttgctggtaacttaatgtgagagaatccatatctgcgtgaaaacaccaagtattctttttaaatgaagcaccatgaattcttttttaaattattttttaaaagtctttctctctctgattcagcttaaatttttttatcgaaaaagccattaaggtggttattattacatggtggtggtggttttattatatgcaaaatctctgtctattatgagatactggcattgatgagctttgcctaaagattagtatgaattttcagtaatacacctctgttttgctcatctctcccttctgttttatgtgatttgtttggggagaaagctaaaaaaacctgaaaccagataagaacatttcttgtgtatagcttttatacttcaaagtagcttcctttgtatgccagcagcaaattgaatgctctcttattaagacttatataataagtgcatgtaggaattgcaaaaaatattttaaaaatttattactgaatttaaaaatattttagaagttttgtaatggtggtgttttaatattttacataattaaatatgtacatattgattagaaaaatataacaagcaatttttcctgctaacccaaaatgttatttgtaatcaaatgtgtagtgattacacttgaattgtgtacttagtgtgtatgtgatcctccagtgttatcccggagatggattgatgtctccattgtatttaaaccaaaatgaactgatacttgttggaatgtatgtgaactaattgcaattatattagagcatattactgtagtgctgaatgagcaggggcattgcctgcaaggagaggagacccttggaattgttttgcacaggtgtgtctggtgaggagtttttcagtgtgtgtctcttccttccctttcttcctccttcccttattgtagtgccttatatgataatgtagtggttaatagagtttacagtgagcttgccttaggatggaccagcaagcccccgtggaccctaagttgttcaccgggatttatcagaacaggattagtagctgtattgtgtaatgcattgttctcagtttccctgccaacattgaaaaataaaaacagcagcttttctcctttaccaccacctctacccctttccattttggattctcggctgagttctcacagaagcattttccccatgtggctctctcactgtgcgttgctaccttgcttctgtgagaattcaggaagcaggtgagaggagtcaagccaatattaaatatgcattcttttaaagtatgtgcaatcacttttagaatgaatttttttttccttttcccatgtggcagtccttcctgcacatagttgacattcctagtaaaatatttgcttgttgaaaaaaacatgttaacagatgtgtttataccaaagagcctgttgtattgcttaccatgtccccatactatgaggagaagttttgtggtgccgctggtgacaaggaactcacagaaaggtttcttagctggtgaagaatatagagaaggaaccaaagcctgttgagtcattgaggcttttgaggtttcttttttaacagcttgtatagtcttggggcccttcaagctgtgaaattgtccttgtactctcagctcctgcatggatctgggtcaagtagaaggtactggggatggggacattcctgcccataaaggatttggggaaagaagattaatcctaaaatacaggtgtgttccatctgaattgaaaatgatatatttgagatataattttaggactggttctgtgtagatagagatggtgtcaaggaggtgcaggatggagatgggagatttcatggagcctggtcagccagctctgtaccaggttgaacaccgaggagctgtcaaagtatttggagtttcttcattgtaaggagtaagggcttccaagatggggcaggtagtccgtacagcctaccaggaacatgttgtgttttctttattttttaaaatcattatattgagttgtgttttcagcactatattggtcaagatagccaagcagtttgtataatttctgtcactagtgtcatacagttttctggtcaacatgtgtgatctttgtgtctcctttttgccaagcacattctgattttcttgttggaacacaggtctagtttctaaaggacaaattttttgttccttgtcttttttctgtaagggacaagatttgttgttttgtaagaaatgagatgcaggaaagaaaaccaaatcccattcctgcaccccagtccaataagcagataccacttaagataggagtctaaactccacagaaaaggataataccaagagcttgtattgttaccttagtcacttgcctagcagtgtgtggctttaaaaactagagatttttcagtcttagtctgcaaactggcatttccgattttccagcataaaaatccacctgtgtctgctgaatgtgtatgtatgtgctcactgtggctttagattctgtccctggggttaggcctgttggccctgacaggaagggaggaagcctggtgaatttagtgagcagctggcctgggtcacagtgacctgacctcaaaccagcttaaggctttaagtcctctctcagaacttggcatttccaacttcttcctttccgggtgagagaagaagcggagaagggttcagtgtagccactctgggctcatagggacacttggtcactccagagtttttaatagctcccaggaggtgatattattttcagtgctcagctgaaataccaaccccaggaataagaactccatttcaaacagttctggccattctgagcctgcttttgtgattgctcatccattgtcctccactagaggggctaagcttgactgcccttagccaggcaagcacagtaatgtgtgttttgttcagcattattatgcaaaaattcactagttgagatggtttgttttaggataggaaatgaaattgcctctcagtgacaggagtggcccgagcctgcttcctattttgattttttttttttttaactgatagatggtgcagcatgtctacatggttgtttgttgctaaactttatataatgtgtggtttcaattcagcttgaaaaataatctcactacatgtagcagtacattatatgtacattatatgtaatgttagtatttctgctttgaatccttgatattgcaatggaattcctactttattaaatgtatttgatatgctagttattgtgtgcgatttaaactttttttgctttctccctttttttggttgtgcgctttcttttacaacaagcctctagaaacagatagtttctgagaattactgagctatgtttgtaatgcagatgtacttagggagtatgtaaaataatcattttaacaaaagaaatagatatttaaaatttaatactaactatgggaaaagggtccattgtgtaaaacatagtttatctttggattcaatgtttgtctttggttttacaaagtagcttgtattttcagtattttctacataatatggtaaaatgtagagcaattgcaatgcatcaataaaatgggtaaatttt

SEQ ID NO: 25449 - DNA, 6016 bp, Homo sapiens
caatagctggactacaagcaacaacaaagcattctggattccctgtgaggatggataatgctgtaccgattgtaccccaggcaccagctgctcagccactacagattcagtcaggagttctcacgcagggaagctgtacaccactaatggtagcaactctccaccctcaagtagccaccatcacaccgcagtatgcggtgccctttactctgagctgcgcagccggccggccggcgctggttgaacagactgccgctgtactggcgtggcctggagggactcagcaaattctcctgccttcaacttggcaacagttgcctggggtagctctacacaactctgtccagcccacagcaatgattccagaggccatggggagtggacagcagctagctgactggaggaatgcccactctcatggcaaccagtacagcactatcatgcagcagccatccttgctgactaaccatgtgacattggccactgctcagcctctgaatgttggtgttgcccatgttgtcagacaacaacaatccagttccctcccttcgaagaagaataagcagtcagctccagtctcttccaagtcctctctagatgttctgccttcccaagtctattctctggttgggagcagtcccctccgcaccacatcttcttataattccttggtccctgtccaagatcagcatcagcccatcatcattccagatactcccagccctcctgtgagtgtcatcactatccgaagtgacactgatgaggaagaggacaacaaatacaagcccagtagctctggactgaagccaaggtctaatgtcatcagttatgtcactgtcaatgattctccagactctgactcttctttgagcagcccttattccactgataccctgagtgctctccgaggcaatagtggatccgttttggaggggcctggcagagttgtggcagatggcactggcacccgcactatcattgtgcctccactgaaaactcagcttggtgactgcactgtagcaacccaggcctcaggtctcctgagcaataagactaagccagtcgcttcagtgagtgggcagtcatctggatgctgtatcacccccacagggtatcgagctcaacgcggggggaccagtgcagcacaaccactcaatcttagccagaaccagcagtcatcggcggctccaacctcacaggagagaagcagcaacccagccccccgcaggcagcaggcgtttgtggcccctctctcccaagccccctacaccttccagcatggcagcccgctacactcgacagggcacccacaccttgccccggcccctgctcacctgccaagccaggctcatctgtatacgtatgctgccccgacttctgctgctgcactgggctcaaccagctccattgctcatcttttctccccacagggttcctcaaggcatgctgcagcctataccactcaccctagcactttggtgcaccaggtccctgtcagtgttgggcccagcctcctcacttctgccagcgtggcccctgctcagtaccaacaccagtttgccacccaatcctacattgggtcttcccgaggctcaacaatttacactggatacccgctgagtcctaccaagatcagccagtattcctacttatagttggtgagcatgagggaggaggaatcatggctaccttctcctggccctgcgttcttaatattgggctatggagagatcctcctttaccctcttgaaatttcttagccagcaacttgttctgcaggggcccactgaagcagaaggtttttctctgggggaacctgtctcagtgttgactgcattgttgtagtcttcccaaagtttgccctatttttaaattcattatttttgtgacagtaattttggtacttggaagagttcagatgcccatcttctgcagttaccaaggaagagagattgttctgaagttaccctctgaaaaatattttgtctctctgacttgatttctataaatgcttttaaaaacaagtgaagcccctctttatttcattttgtgttattgtgattgctggtcaggaaaaatgctgatagaaggagttgaaatctgatgacaaaaaaagaaaaattactttttgtttgtttataaactcagacttgcctattttattttaaaagcggcttacacaatctcccttttgtttattggacatttaaacttacagagtttcagttttgttttaatgtcatattatacttaatgggcaattgttatttttgcaaaactggttacgtattactctgtgttactattgagattctctcaattgctcctgtgtttgttataaagtagtgtttaaaaggcagctcaccatttgctggtaacttaatgtgagagaatccatatctgcgtgaaaacaccaagtattctttttaaatgaagcaccatgaattcttttttaaattattttttaaaagtctttctctctctgattcagcttaaatttttttatcgaaaaagccattaaggtggttattattacatggtggtggtggttttattatatgcaaaatctctgtctattatgagatactggcattgatgagctttgcctaaagattagtatgaattttcagtaatacacctctgttttgctcatctctcccttctgttttatgtgatttgtttggggagaaagctaaaaaaacctgaaaccagataagaacatttcttgtgtatagcttttatacttcaaagtagcttcctttgtatgccagcagcaaattgaatgctctcttattaagacttatataataagtgcatgtaggaattgcaaaaaatattttaaaaatttattactgaatttaaaaatattttagaagttttgtaatggtggtgttttaatattttacataattaaatatgtacatattgattagaaaaatataacaagcaatttttcctgctaacccaaaatgttatttgtaatcaaatgtgtagtgattacacttgaattgtgtacttagtgtgtatgtgatcctccagtgttatcccggagatggattgatgtctccattgtatttaaaccaaaatgaactgatacttgttggaatgtatgtgaactaattgcaattatattagagcatattactgtagtgctgaatgagcaggggcattgcctgcaaggagaggagacccttggaattgttttgcacaggtgtgtctggtgaggagtttttcagtgtgtgtctcttccttccctttcttcctccttcccttattgtagtgccttatatgataatgtagtggttaatagagtttacagtgagcttgccttaggatggaccagcaagcccccgtggaccctaagttgttcaccgggatttatcagaacaggattagtagctgtattgtgtaatgcattgttctcagtttccctgccaacattgaaaaataaaaacagcagcttttctcctttaccaccacctctacccctttccattttggattctcggctgagttctcacagaagcattttccccatgtggctctctcactgtgcgttgctaccttgcttctgtgagaattcaggaagcaggtgagaggagtcaagccaatattaaatatgcattcttttaaagtatgtgcaatcacttttagaatgaatttttttttccttttcccatgtggcagtccttcctgcacatagttgacattcctagtaaaatatttgcttgttgaaaaaaacatgttaacagatgtgtttataccaaagagcctgttgtattgcttaccatgtccccatactatgaggagaagttttgtggtgccgctggtgacaaggaactcacagaaaggtttcttagctggtgaagaatatagagaaggaaccaaagcctgttgagtcattgaggcttttgaggtttcttttttaacagcttgtatagtcttggggcccttcaagctgtgaaattgtccttgtactctcagctcctgcatggatctgggtcaagtagaaggtactggggatggggacattcctgcccataaaggatttggggaaagaagattaatcctaaaatacaggtgtgttccatctgaattgaaaatgatatatttgagatataattttaggactggttctgtgtagatagagatggtgtcaaggaggtgcaggatggagatgggagatttcatggagcctggtcagccagctctgtaccaggttgaacaccgaggagctgtcaaagtatttggagtttcttcattgtaaggagtaagggcttccaagatggggcaggtagtccgtacagcctaccaggaacatgttgtgttttctttattttttaaaatcattatattgagttgtgttttcagcactatattggtcaagatagccaagcagtttgtataatttctgtcactagtgtcatacagttttctggtcaacatgtgtgatctttgtgtctcctttttgccaagcacattctgattttcttgttggaacacaggtctagtttctaaaggacaaattttttgttccttgtcttttttctgtaagggacaagatttgttgttttgtaagaaatgagatgcaggaaagaaaaccaaatcccattcctgcaccccagtccaataagcagataccacttaagataggagtctaaactccacagaaaaggataataccaagagcttgtattgttaccttagtcacttgcctagcagtgtgtggctttaaaaactagagatttttcagtcttagtctgcaaactggcatttccgattttccagcataaaaatccacctgtgtctgctgaatgtgtatgtatgtgctcactgtggctttagattctgtccctggggttaggcctgttggccctgacaggaagggaggaagcctggtgaatttagtgagcagctggcctgggtcacagtgacctgacctcaaaccagcttaaggctttaagtcctctctcagaacttggcatttccaacttcttcctttccgggtgagagaagaagcggagaagggttcagtgtagccactctgggctcatagggacacttggtcactccagagtttttaatagctcccaggaggtgatattattttcagtgctcagctgaaataccaaccccaggaataagaactccatttcaaacagttctggccattctgagcctgcttttgtgattgctcatccattgtcctccactagaggggctaagcttgactgcccttagccaggcaagcacagtaatgtgtgttttgttcagcattattatgcaaaaattcactagttgagatggtttgttttaggataggaaatgaaattgcctctcagtgacaggagtggcccgagcctgcttcctattttgattttttttttttttaactgatagatggtgcagcatgtctacatggttgtttgttgctaaactttatataatgtgtggtttcaattcagcttgaaaaataatctcactacatgtagcagtacattatatgtacattatatgtaatgttagtatttctgctttgaatccttgatattgcaatggaattcctactttattaaatgtatttgatatgctagttattgtgtgcgatttaaactttttttgctttctccctttttttggttgtgcgctttcttttacaacaagcctctagaaacagatagtttctgagaattactgagctatgtttgtaatgcagatgtacttagggagtatgtaaaataatcattttaacaaaagaaatagatatttaaaatttaatactaactatgggaaaagggtccattgtgtaaaacatagtttatctttggattcaatgtttgtctttggttttacaaagtagcttgtattttcagtattttctacataatatggtaaaatgtagagcaattgcaatgcatcaataaaatgggtaaattttctgacttatgtggctgtttttgacttctgttataggatataaaggggatcaataaatgacatctttgaaagtggctaa

SEQ ID NO: 25450 - DNA, 4052 bp, Homo sapiens
caatagctggactacaagcaacaacaaagcattctggattccctgtgaggatggataatgctgtaccgattgtaccccaggcaccagctgctcagccactacagattcagtcaggagttctcacgcagggaagctgtacaccactaatggtagcaactctccaccctcaagtagccaccatcacaccgcagtatgcggtgccctttactctgagctgcgcagccggccggccggcgctggttgaacagactgccgctgtactggcgtggcctggagggactcagcaaattctcctgccttcaacttggcaacagttgcctggggtagctctacacaactctgtccagcccacagcaatgattccagaggccatggggagtggacagcagctagctgactggaggaatgcccactctcatggcaaccagtacagcactatcatgcagcagccatccttgctgactaaccatgtgacattggccactgctcagcctctgaatgttggtgttgcccatgttgtcagacaacaacaatccagttccctcccttcgaagaagaataagcagtcagctccagtctcttccaagtcctctctagatgttctgccttcccaagtctattctctggttgggagcagtcccctccgcaccacatcttcttataattccttggtccctgtccaagatcagcatcagcccatcatcattccagatactcccagccctcctgtgagtgtcatcactatccgaagtgacactgatgaggaagaggacaacaaatacaagcccagtagctctggactgaagccaaggtctaatgtcatcagttatgtcactgtcaatgattctccagactctgactcttctttgagcagcccttattccactgataccctgagtgctctccgaggcaatagtggatccgttttggaggggcctggcagagttgtggcagatggcactggcacccgcactatcattgtgcctccactgaaaactcagcttggtgactgcactgtagcaacccaggcctcaggtctcctgagcaataagactaagccagtcgcttcagtgagtgggcagtcatctggatgctgtatcacccccacagggtatcgagctcaacgcggggggaccagtgcagcacaaccactcaatcttagccagaaccagcagtcatcggcggctccaacctcacaggagagaagcagcaacccagccccccgcaggcagcaggcgtttgtggcccctctctcccaagccccctacaccttccagcatggcagcccgctacactcgacagggcacccacaccttgccccggcccctgctcacctgccaagccaggctcatctgtatacgtatgctgccccgacttctgctgctgcactgggctcaaccagctccattgctcatcttttctccccacagggttcctcaaggcatgctgcagcctataccactcaccctagcactttggtgcaccaggtccctgtcagtgttgggcccagcctcctcacttctgccagcgtggcccctgctcagtaccaacaccagtttgccacccaatcctacattgggtcttcccgaggctcaacaatttacactggatacccgctgagtcctaccaagatcagccagtattcctacttatagttggtgagcatgagggaggaggaatcatggctaccttctcctggccctgcgttcttaatattgggctatggagagatcctcctttaccctcttgaaatttcttagccagcaacttgttctgcaggggcccactgaagcagaaggtttttctctgggggaacctgtctcagtgttgactgcattgttgtagtcttcccaaagtttgccctatttttaaattcattatttttgtgacagtaattttggtacttggaagagttcagatgcccatcttctgcagttaccaaggaagagagattgttctgaagttaccctctgaaaaatattttgtctctctgacttgatttctataaatgcttttaaaaacaagtgaagcccctctttatttcattttgtgttattgtgattgctggtcaggaaaaatgctgatagaaggagttgaaatctgatgacaaaaaaagaaaaattactttttgtttgtttataaactcagacttgcctattttattttaaaagcggcttacacaatctcccttttgtttattggacatttaaacttacagagtttcagttttgttttaatgtcatattatacttaatgggcaattgttatttttgcaaaactggttacgtattactctgtgttactattgagattctctcaattgctcctgtgtttgttataaagtagtgtttaaaaggcagctcaccatttgctggtaacttaatgtgagagaatccatatctgcgtgaaaacaccaagtattctttttaaatgaagcaccatgaattcttttttaaattattttttaaaagtctttctctctctgattcagcttaaatttttttatcgaaaaagccattaaggtggttattattacatggtggtggtggttttattatatgcaaaatctctgtctattatgagatactggcattgatgagctttgcctaaagattagtatgaattttcagtaatacacctctgttttgctcatctctcccttctgttttatgtgatttgtttggggagaaagctaaaaaaacctgaaaccagataagaacatttcttgtgtatagcttttatacttcaaagtagcttcctttgtatgccagcagcaaattgaatgctctcttattaagacttatataataagtgcatgtaggaattgcaaaaaatattttaaaaatttattactgaatttaaaaatattttagaagttttgtaatggtggtgttttaatattttacataattaaatatgtacatattgattagaaaaatataacaagcaatttttcctgctaacccaaaatgttatttgtaatcaaatgtgtagtgattacacttgaattgtgtacttagtgtgtatgtgatcctccagtgttatcccggagatggattgatgtctccattgtatttaaaccaaaatgaactgatacttgttggaatgtatgtgaactaattgcaattatattagagcatattactgtagtgctgaatgagcaggggcattgcctgcaaggagaggagacccttggaattgttttgcacaggtgtgtctggtgaggagtttttcagtgtgtgtctcttccttccctttcttcctccttcccttattgtagtgccttatatgataatgtagtggttaatagagtttacagtgagcttgccttaggatggaccagcaagcccccgtggaccctaagttgttcaccgggatttatcagaacaggattagtagctgtattgtgtaatgcattgttctcagtttccctgccaacattgaaaaataaaaacagcagcttttctcctttaccaccacctctacccctttccattttggattctcggctgagttctcacagaagcattttccccatgtggctctctcactgtgcgttgctaccttgcttctgtgagaattcaggaagcaggtgagaggagtcaagccaatattaaatatgcattcttttaaagtatgtgcaatcacttttagaatgaatttttttttccttttcccatgtggcagtccttcctgcacatagttgacattcctagtaaaatatttgcttgttgaaaaaaacatgttaacagatgtgtttataccaaagagcctgttgtattgcttaccatgtccccatactatgaggagaagttttgtggtgccgctggtgacaaggaactcacagaaaggtttcttagctggtgaagaatatagagaaggaaccaaagcctgttgagtcattgaggcttttgaggtttcttttttaacagcttgtatagtcttggggcccttcaagctgtgaaattgtccttgtactctcagctcctgcatggatctgggtcaagtagaaggttgtaggggtaaggaaggttgtaacgaagttagctagg

SEQ ID NO: 25451 - DNA, 3998 bp, Homo sapiens
caatagctggactacaagcaacaacaaagcattctggattccctgtgaggatggataatgctgtaccgattgtaccccaggcaccagctgctcagccactacagattcagtcaggagttctcacgcagggaagctgtacaccactaatggtagcaactctccaccctcaagtagccaccatcacaccgcagtatgcggtgccctttactctgagctgcgcagccggccggccggcgctggttgaacagactgccgctgtactggcgtggcctggagggactcagcaaattctcctgccttcaacttggcaacagttgcctggggtagctctacacaactctgtccagcccacagcaatgattccagaggccatggggagtggacagcagctagctgactggaggaatgcccactctcatggcaaccagtacagcactatcatgcagcagccatccttgctgactaaccatgtgacattggccactgctcagcctctgaatgttggtgttgcccatgttgtcagacaacaacaatccagttccctcccttcgaagaagaataagcagtcagctccagtctcttccaagtcctctctagatgttctgccttcccaagtctattctctggttgggagcagtcccctccgcaccacatcttcttataattccttggtccctgtccaagatcagcatcagcccatcatcattccagatactcccagccctcctgtgagtgtcatcactatccgaagtgacactgatgaggaagaggacaacaaatacaagcccagtagctctggactgaagccaaggtctaatgtcatcagttatgtcactgtcaatgattctccagactctgactcttctttgagcagcccttattccactgataccctgagtgctctccgaggcaatagtggatccgttttggaggggcctggcagagttgtggcagatggcactggcacccgcactatcattgtgcctccactgaaaactcagcttggtgactgcactgtagcaacccaggcctcaggtctcctgagcaataagactaagccagtcgcttcagtgagtgggcagtcatctggatgctgtatcacccccacagggtatcgagctcaacgcggggggaccagtgcagcacaaccactcaatcttagccagaaccagcagtcatcggcggctccaacctcacaggagagaagcagcaacccagccccccgcaggcagcaggcgtttgtggcccctctctcccaagccccctacaccttccagcatggcagcccgctacactcgacagggcacccacaccttgccccggcccctgctcacctgccaagccaggctcatctgtatacgtatgctgccccgacttctgctgctgcactgggctcaaccagctccattgctcatcttttctccccacagggttcctcaaggcatgctgcagcctataccactcaccctagcactttggtgcaccaggtccctgtcagtgttgggcccagcctcctcacttctgccagcgtggcccctgctcagtaccaacaccagtttgccacccaatcctacattgggtcttcccgaggctcaacaatttacactggatacccgctgagtcctaccaagatcagccagtattcctacttatagttggtgagcatgagggaggaggaatcatggctaccttctcctggccctgcgttcttaatattgggctatggagagatcctcctttaccctcttgaaatttcttagccagcaacttgttctgcaggggcccactgaagcagaaggtttttctctgggggaacctgtctcagtgttgactgcattgttgtagtcttcccaaagtttgccctatttttaaattcattatttttgtgacagtaattttggtacttggaagagttcagatgcccatcttctgcagttaccaaggaagagagattgttctgaagttaccctctgaaaaatattttgtctctctgacttgatttctataaatgcttttaaaaacaagtgaagcccctctttatttcattttgtgttattgtgattgctggtcaggaaaaatgctgatagaaggagttgaaatctgatgacaaaaaaagaaaaattactttttgtttgtttataaactcagacttgcctattttattttaaaagcggcttacacaatctcccttttgtttattggacatttaaacttacagagtttcagttttgttttaatgtcatattatacttaatgggcaattgttatttttgcaaaactggttacgtattactctgtgttactattgagattctctcaattgctcctgtgtttgttataaagtagtgtttaaaaggcagctcaccatttgctggtaacttaatgtgagagaatccatatctgcgtgaaaacaccaagtattctttttaaatgaagcaccatgaattcttttttaaattattttttaaaagtctttctctctctgattcagcttaaatttttttatcgaaaaagccattaaggtggttattattacatggtggtggtggttttattatatgcaaaatctctgtctattatgagatactggcattgatgagctttgcctaaagattagtatgaattttcagtaatacacctctgttttgctcatctctcccttctgttttatgtgatttgtttggggagaaagctaaaaaaacctgaaaccagataagaacatttcttgtgtatagcttttatacttcaaagtagcttcctttgtatgccagcagcaaattgaatgctctcttattaagacttatataataagtgcatgtaggaattgcaaaaaatattttaaaaatttattactgaatttaaaaatattttagaagttttgtaatggtggtgttttaatattttacataattaaatatgtacatattgattagaaaaatataacaagcaatttttcctgctaacccaaaatgttatttgtaatcaaatgtgtagtgattacacttgaattgtgtacttagtgtgtatgtgatcctccagtgttatcccggagatggattgatgtctccattgtatttaaaccaaaatgaactgatacttgttggaatgtatgtgaactaattgcaattatattagagcatattactgtagtgctgaatgagcaggggcattgcctgcaaggagaggagacccttggaattgttttgcacaggtgtgtctggtgaggagtttttcagtgtgtgtctcttccttccctttcttcctccttcccttattgtagtgccttatatgataatgtagtggttaatagagtttacagtgagcttgccttaggatggaccagcaagcccccgtggaccctaagttgttcaccgggatttatcagaacaggattagtagctgtattgtgtaatgcattgttctcagtttccctgccaacattgaaaaataaaaacagcagcttttctcctttaccaccacctctacccctttccattttggattctcggctgagttctcacagaagcattttccccatgtggctctctcactgtgcgttgctaccttgcttctgtgagaattcaggaagcaggtgagaggagtcaagccaatattaaatatgcattcttttaaagtatgtgcaatcacttttagaatgaatttttttttccttttcccatgtggcagtccttcctgcacatagttgacattcctagtaaaatatttgcttgttgaaaaaaacatgttaacagatgtgtttataccaaagagcctgttgtattgcttaccatgtccccatactatgaggagaagttttgtggtgccgctggtgacaaggaactcacagaaaggtttcttagctggtgaagaatatagagaaggaaccaaagcctgttgagtcattgaggggtgggcaggtgttgtcaatataatcaggtatgtgttcttaaccattgtattggcatatcatgctgagtaacagattaccccatacatag

SEQ ID NO: 25452 - DNA, 1282 bp, Homo sapiens
caatagctggactacaagcaacaacaaagcattctggattccctgtgaggatggataatgctgtaccgattgtaccccaggcaccagctgctcagccactacagattcagtcaggagttctcacgcagggaagctgtacaccactaatggtagcaactctccaccctcaagtagccaccatcacaccgcagtatgcggtgccctttactctgagctgcgcagccggccggccggcgctggttgaacagactgccgctgtactggcgtggcctggagggactcagcaaattctcctgccttcaacttggcaacagttgcctggggtagctctacacaactctgtccagcccacagcaatgattccagaggccatggggagtggacagcagctagctgactggaggaatgcccactctcatggcaaccagtacagcactatcatgcagcagccatccttgctgactaaccatgtgacattggccactgctcagcctctgaatgttggtgttgcccatgttgtcagacaacaacaatccagttccctcccttcgaagaagaataagcagtcagctccagtctcttccaagtcctctctagatgttctgccttcccaagtctattctctggttgggagcagtcccctccgcaccacatcttcttataattccttggtccctgtccaagatcagcatcagcccatcatcattccagatactcccagccctcctgtgagtgtcatcactatccgaagtgacactgatgaggaagaggacaacaaatacaagcccagtagctctggactgaagccaaggtctaatgtcatcagttatgtcactgtcaatgattctccagactctgactcttctttgagcagcccttattccactgataccctgagtgctctccgaggcaatagtggatccgttttggaggggcctggcagagttgtggcagatggcactggcacccgcactatcattgtgcctccactgaaaactcagcttggtgactgcactgtagcaacccaggcctcaggtctcctgagcaataagactaagccagtcgcttcagtgagtgggcagtcatctggatgctgtatcacccccacagggtatcgagctcaacgcggggggaccagtgcagcacaaccactcaatcttagccaggtaagtgctatgggctactgccttctgtttgggccctgcactgttgttactttctggagaaccctgcttctggctggatgctgaataaagccaaatgaagccccttttgtgtcaaa

SEQ ID NO: 25453 - DNA, 673 bp, Homo sapiens
  misc_feature (1)..(1): n is a, c, g, or t
nttttttctcatttcgttgatttcagagcaataaaatttcccatggtgggggaagttttacttaaaaccaattactagttcaatctaccaggaagaaagcctaaggcctttcaatgctgcactatattttttttaattaaaaatatcttctctctcattggtataagcaaaattttcaagtgctagcgccacagttatagctatgaaatctttaatcttcattttatcaaaattatattgcctctgaggaattttcagcccttgtgtgatttcaggtttccccagatgtgtttataaagataatgattatatttaacaactacagctattaagatacagtaacacagcaaaaagttgcccattttaaatggagaaaaagaaattaaggcagtatttctttttcactgctttgaacaacttcattctgctcaggatcccagctcagaaccaacgtagaataatcgtagttaacatttttcaagttcattttcagaaacatcagttgttctatattgtcaaagtccaggctcatgatctgttttggatgaaagtggctatttttagtaaagatacattcagattgccaactacacatggggcaacttagatactggatggcaacctgggtcaaagccggccatatgcttatcttcctctgccagtaaattaaagg

SEQ ID NO: 25454 - DNA, 702 bp, Homo sapiens
aacaaggaaagaggacacattacagatgacgttcagggactggggaagaagggaaaaaagcaagaaatgttgagttcaagatgtctgtgaagatccaaatggctatgtctacctgccagatgggatgtataaattagtcagggctagagacatagatttgaataatcagatttgaaacacccttgtaagggtagttcagactcaaaagtatataagatgccctaggaaaatatgtagagaaagaacaataggacaaggatgaaatcctggagaataccaattatcacagaggtggaaagagaaggaatatagagacatttgtgaaagagcaattataaatatatgatagagactgccagtgtccattaatattggtgtgcctctcttcttccataaaagtactgctaaactacatatctcagcctttgcagttaggtaaagccatttgaaaatattttgtccaaagatctatgggcagaagtaatatatgcacttctaggcctggtttctgaaacttcttccatgatcctctgtgctgtctcatttttcatggaagacttggaagccacaaactgaggaagccaagtctctgaatgtctctaaggagctgcacttaggacagacactgtagtaaatatcaatattttgtgtcagaggtctaaaccctgaaaaacctacatggtttgcaccacaaaaaaaaaa

SEQ ID NO: 25455 - DNA, 2237 bp, Homo sapiens
gcagcgagcgcggctccacattgttgcggatcgccggcacccggcagagcggcggcggctgggacgcgcggcgcctccgacccgttctcctcgcgcccggccgcgcagccagagccacccgggccgccgaccgccgagccccgcgcccgccgcctgggccccgagccttctgcgccgcccgggtgcgtcccgccaccctcggaggacggccggccatggacgcctgcaagttggagccgagcgggagggtgtgagcgggccggggccaggagcccgcgccgcgcaaccgggcagccgggcgcgccgggggtgggtccctctccccagccccgctctgcgtggaagaagagggcggggaccggcgccgggaggagagcggaggaggcgaaggggcatgactcgtgcaacttgcggcgggcatctgccgagcctctgagccggcggcggcccggggcccggactgcggccgcgcggatcccacccagcccaccccgccccggccgacggctgcagctgacctggatccttcgagcgcccgccgaccgccagcgatcttccctcatcttccgggctggtttctgctgcgcgaggagcgctgccctcgccgcccctctcgccggacccccggcccccgatggctcggatggggcttgcgggcgccgctggacgctggtggggactcgctctcggcttgaccgcattcttcctcccaggcgtccactcccaggtggtccaggtgaacgactccatgtatggcttcatcggcacagacgtggttctgcactgcagctttgccaacccgcttcccagcgtgaagatcacccaggtcacatggcagaagtccaccaatggctccaagcagaacgtggccatctacaacccatccatgggcgtgtccgtgctggctccctaccgcgagcgtgtggaattcctgcggccctccttcaccgatggcactatccgcctctcccgcctggagctggaggatgagggtgtctacatctgcgagtttgctaccttccctacgggcaatcgagaaagccagctcaatctcacggtgatggccaaacccaccaattggatagagggtacccaggcagtgcttcgagccaagaaggggcaggatgacaaggtcctggtggccacctgcacctcagccaatgggaagcctcccagtgtggtatcctgggaaactcggttaaaaggtgaggcagagtaccaggagatccggaaccccaatggcacagtgacggtcatcagccgctaccgcctggtgcccagcagggaagcccaccagcagtccttggcctgcatcgtcaactaccacatggaccgcttcaaggaaagcctcactctcaacgtgcagtatgagcctgaggtaaccattgaggggtttgatggcaactggtacctgcagcggatggacgtgaagctcacctgcaaagctgatgctaaccccccagccactgagtaccactggaccacgctaaatggctctctccccaagggtgtggaggcccagaacagaaccctcttcttcaagggacccatcaactacagcctggcagggacctacatctgtgaggccaccaaccccatcggtacacgctcaggccaggtggaggtcaatatcacagaattcccctacaccccgtctcctcccgaacatgggcggcgcgccgggccggtgcccacggccatcattgggggcgtggcggggagcatcctgctggtgttgattgtggtcggcgggatcgtggtcgccctgcgtcggcgccggcacaccttcaagggtgactacagcaccaagaagcacgtgtatggcaacggctacagcaaggcaggcatcccccagcaccacccaccaatggcacagaacctgcagtaccccgacgactcagacgacgagaagaaggccggcccactgggtggaagcagctatgaggaggaggaggaggaggaggagggcggtggagggggcgagcgcaaggtgggcggcccccaccccaaatatgacgaggacgccaagcggccctacttcaccgtggatgaggccgaggcccgtcaggacggctacggggaccggactctgggctaccagtacgaccctgagcagctggacttggctgagaacatggtttctcagaacgacgggtctttcatttccaagaaggagtggtacgtgtagccccccttccagagcctctgtctgtgaccgctcctccccagcccctccc

SEQ ID NO: 25456 - DNA, 455 bp, Homo sapiens
  misc_feature (37)..(37): n is a, c, g, or t
ccccccccaagcccattgaagtacccctttggccccncgctaaatggctctctccccaagggtgtggaggcccagaacagaaccctcttcttcaagggacccatcaactacagcctggcagggacctacatctgtgaggccaccaaccccatcggtacacgctcaggccaggtggaggtcaatatcacagctttctgtcaacttatctatccgggcaaagggaggacaagagctaggatgttctgaggagagacttcacctgggacgtgaaaggagcatgggcttgatgtcagacagctgtgaccctggacagggccccccccaccatctgtaaaacggggacagtatgatgtaccttgaagggctgttgtcagaattctacgtgatgtaagtcaagcacctagcacagatcagtctgtcaataaatggccaatgttccgtgattattaaactga

SEQ ID NO: 25457 - DNA, 731 bp, Homo sapiens
aagctgcatcctccccagcctctccgcacccacgggttccttcgccacctgcatccctcacctttgagcaatgccactgcaggaagattatctccttttcctgcttctctagttctcccttgagctctggccattggttttgctttgcttttctctttctttcattaaagggtgcaaatgagacagtcagggtgacccccaatcagagaggggcaggaggaaggctctgagagggaagaaggaagtgctgtttacagcaatgctgttttgggggccaatagaacctgcccgtagatctgccagcagaacacgctgtgggatgctggcatggtggggataggtttgcaggtggagctcatctcctccaagctctgcacctgtggtcaaggacctcttcatgggccagaaagtgaggcttacctcaagcagggagactggagagaaagcgaagatgtagcccaaagccatagtgctttgtgtgccctgcaactgagctttccctgcagctttctgtcaacttatctatccgggcaaagggaggacaagagctaggatgttctgaggagagacttcacctgggacgtgaaaggagcatgggcttgatgtcagacagctgtgacctatgatgtaccttgaagggctgttgtcagaattctacgtgatgtaagtcaagcacctagcacagatcagtctgtcaataaatggccaatgttccgtgattattaaactga

SEQ ID NO: 25458 - DNA, 1902 bp, Homo sapiens
gcagcgagcgcggctccacattgttgcggatcgccggcacccggcagagcggcggcggctgggacgcgcggcgcctccgacccgttctcctcgcgcccggccgcgcagccagagccacccgggccgccgaccgccgagccccgcgcccgccgcctgggccccgagccttctgcgccgcccgggtgcgtcccgccaccctcggaggacggccggccatggacgcctgcaagttggagccgagcgggagggtgtgagcgggccggggccaggagcccgcgccgcgcaaccgggcagccgggcgcgccgggggtgggtccctctccccagccccgctctgcgtggaagaagagggcggggaccggcgccgggaggagagcggaggaggcgaaggggcatgactcgtgcaacttgcggcgggcatctgccgagcctctgagccggcggcggcccggggcccggactgcggccgcgcggatcccacccagcccaccccgccccggccgacggctgcagctgacctggatccttcgagcgcccgccgaccgccagcgatcttccctcatcttccgggctggtttctgctgcgcgaggagcgctgccctcgccgcccctctcgccggacccccggcccccgatggctcggatggggcttgcgggcgccgctggacgctggtggggactcgctctcggcttgaccgcattcttcctcccaggcgtccactcccaggtggtccaggtgaacgactccatgtatggcttcatcggcacagacgtggttctgcactgcagctttgccaacccgcttcccagcgtgaagatcacccaggtcacatggcagaagtccaccaatggctccaagcagaacgtggccatctacaacccatccatgggcgtgtccgtgctggctccctaccgcgagcgtgtggaattcctgcggccctccttcaccgatggcactatccgcctctcccgcctggagctggaggatgagggtgtctacatctgcgagtttgctaccttccctacgggcaatcgagaaagccagctcaatctcacggtgatggccaaacccaccaattggatagagggtacccaggcagtgcttcgagccaagaaggggcaggatgacaaggtcctggtggccacctgcacctcagccaatgggaagcctcccagtgtggtatcctgggaaactcggttaaaaggtgaggcagagtaccaggagatccggaaccccaatggcacagtgacggtcatcagccgctaccgcctggtgcccagcagggaagcccaccagcagtccttggcctgcatcgtcaactaccacatggaccgcttcaaggaaagcctcactctcaacgtgcagtatgagcctgaggtaaccattgaggggtttgatggcaactggtacctgcagcggatggacgtgaagctcacctgcaaagctgatgctaaccccccagccactgagtaccactggaccacgctaaatggctctctccccaagggtgtggaggcccagaacagaaccctcttcttcaagggacccatcaactacagcctggcagggacctacatctgtgaggccaccaaccccatcggtacacgctcaggccaggtggaggtcaatatcacagctttctgtcaacttatctatccgggcaaagggaggacaagagctaggatgttctgaggagagacttcacctgggacgtgaaaggagcatgggcttgatgtcagacagctgtgaccctggacagggccccccccaccatctgtaaaacggggacagtatgatgtaccttgaagggctgttgtcagaattctacgtgatgtaagtcaagcacctagcacagatcagtctgtcaataaatggccaatgttccgtgattattaaactga

SEQ ID NO: 25459 - DNA, 1072 bp, Homo sapiens
aataggcagtcacggtatccgtgagttttgctcaagaggatccccgacaggcgcacgatggcgtgtccgtgctggctccctaccgcgagcgtgtggaattcctgcggccctccttcaccgatggcactatccgcctctcccgcctggagctggaggatgagggtgtctacatctgcgagtttgctaccttccctacgggcaatcgagaaagccagctcaatctcacggtgatggccaaacccaccaattggatagagggtacccaggcagtgcttcgagccaagaaggggcaggatgacaaggtcctggtggccacctgcacctcagccaatgggaagcctcccagtgtggtatcctgggaaactcggttaaaaggtgaggcagagtaccaggagatccggaaccccaatggcacagtgacggtcatcagccgctaccgcctggtgcccagcagggaagcccaccagcagtccttggcctgcatcgtcaactaccacatggaccgcttcaaggaaagcctcactctcaacgtgcagtatgagcctgaggtaaccattgaggggtttgatggcaactggtacctgcagcggatggacgtgaagctcacctgcaaagctgatgctaaccccccagccactgagtaccactggaccacgctaaatggctctctccccaagggtgtggaggcccagaacagaaccctcttcttcaagggacccatcaactacagcctggcagggacctacatctgtgaggccaccaaccccatcggtacacgctcaggccaggtggaggtcaatatcacagctttctgtcaacttatctatccgggcaaagggaggacaagagctaggatgttctgaggagagacttcacctgggacgtgaaaggagcatgggcttgatgtcagacagctgtgaccctggacagggccccccccaccatctgtaaaacggggacagtatgatgtaccttgaagggctgttgtcagaattctacgtgatgtaagtcaagcacctagcacagatcagtctgtcaataaatggccaatgttccgtgattattaaactga

SEQ ID NO: 25460 - DNA, 1635 bp, Homo sapiens
gcagcgagcgcggctccacattgttgcggatcgccggcacccggcagagcggcggcggctgggacgcgcggcgcctccgacccgttctcctcgcgcccggccgcgcagccagagccacccgggccgccgaccgccgagccccgcgcccgccgcctgggccccgagccttctgcgccgcccgggtgcgtcccgccaccctcggaggacggccggccatggacgcctgcaagttggagccgagcgggagggtgtgagcgggccggggccaggagcccgcgccgcgcaaccgggcagccgggcgcgccgggggtgggtccctctccccagccccgctctgcgtggaagaagagggcggggaccggcgccgggaggagagcggaggaggcgaaggggcatgactcgtgcaacttgcggcgggcatctgccgagcctctgagccggcggcggcccggggcccggactgcggccgcgcggatcccacccagcccaccccgccccggccgacggctgcagctgacctggatccttcgagcgcccgccgaccgccagcgatcttccctcatcttccgggctggtttctgctgcgcgaggagcgctgccctcgccgcccctctcgccggacccccggcccccgatggctcggatggggcttgcgggcgccgctggacgctggtggggactcgctctcggcttgaccgcattcttcctcccaggcgtccactcccaggtggtccaggtgaacgactccatgtatggcttcatcggcacagacgtggttctgcactgcagctttgccaacccgcttcccagcgtgaagatcacccaggtcacatggcagaagtccaccaatggctccaagcagaacgtggccatctacaacccatccatgggcgtgtccgtgctggctccctaccgcgagcgtgtggaattcctgcggccctccttcaccgatggcactatccgcctctcccgcctggagctggaggatgagggtgtctacatctgcgagtttgctaccttccctacgggcaatcgagaaagccagctcaatctcacggtgatggccaaacccaccaattggatagagggtacccaggcagtgcttcgagccaagaaggggcaggatgacaaggtcctggtggccacctgcacctcagccaatgggaagcctcccagtgtggtatcctgggaaactcggttaaaaggtgaggcagagtaccaggagatccggaaccccaatggcacagtgacggtcatcagccgctaccgcctggtgcccagcagggaagcccaccagcagtccttggcctgcatcgtcaactaccacatggaccgcttcaaggaaagcctcactctcaacgtgcagtatgagcctgaggtaaccattgaggggtttgatggcaactggtacctgcagcggatggacgtgaagctcacctgcaaagctgatgctaaccccccagccactgagtaccactggaccacctggacagggccccccccaccatctgtaaaacggggacagtatgatgtaccttgaagggctgttgtcagaattctacgtgatgtaagtcaagcacctagcacagatcagtctgtcaataaatggccaatgttccgtgattattaaactga

SEQ ID NO: 25461 - DNA, 906 bp, Homo sapiens
gtagtcggtaccggacatgctgatctcacgtgcagtatgagcctgaggtaaccattgaggggtttgatggcaactggtacctgcagcggatggacgtgaagctcacctgcaaagctgatgctaaccccccagccactgagtaccactggaccacgctaaatggctctctccccaagggtgtggaggcccagaacagaaccctcttcttcaagggacccatcaactacagcctggcagggacctacatctgtgaggccaccaaccccatcggtacacgctcaggccaggtggaggtcaatatcacagaattcccctacaccccgtctcctcccgaacatgggcggcgcgccgggccggtgcccacggccatcattgggggcgtggcggggagcatcctgctggtgttgattgtggtcggcgggatcgtggtcgccctgcgtcggcgccggcacaccttcaagggtgactacagcaccaagaagcacgtgtatggcaacggctacagcaaggcaggcatcccccagcaccacccaccaatggcacagaacctgcagtaccccgacgactcagacgacgagaagaaggccggcccactgggtggaagcagctatgaggaggaggaggaggaggaggagggcggtggagggggcgagcgcaaggtgggcggcccccaccccaaatatgacgaggacgccaagcggccctacttcaccgtggatgaggccgaggcccgtcaggacggctacggggaccggactctgggctaccagtacgaccctgagcagctggacttggctgagaacatggtttctcagaacgacgggtctttcatttccaagaaggagtggtacgtgtagccccccttccagagcctctgtctgtgaccgctcctccccagcccctccc

SEQ ID NO: 25462 - DNA, 274 bp, Homo sapiens
caggatgacaaggtcctggtggccacctgcacctcagccaatgggaagcctcccagtgtggtatcctgggaaactcggttaaaaggtgaggcagagtaccaggagatccggaaccccaatggcacagtgacggtcatcagccgctaccgcctggtgcccagcagggaagcccaccagcagtccttggcctgcatcgtcaactaccacatggaccgcttcaaggaaagcctcactctcaacgtgcagtgtgagcagggctggctgccaggggcct

SEQ ID NO: 25463 - DNA, 2011 bp, Homo sapiens
gcagcgagcgcggctccacattgttgcggatcgccggcacccggcagagcggcggcggctgggacgcgcggcgcctccgacccgttctcctcgcgcccggccgcgcagccagagccacccgggccgccgaccgccgagccccgcgcccgccgcctgggccccgagccttctgcgccgcccgggtgcgtcccgccaccctcggaggacggccggccatggacgcctgcaagttggagccgagcgggagggtgtgagcgggccggggccaggagcccgcgccgcgcaaccgggcagccgggcgcgccgggggtgggtccctctccccagccccgctctgcgtggaagaagagggcggggaccggcgccgggaggagagcggaggaggcgaaggggcatgactcgtgcaacttgcggcgggcatctgccgagcctctgagccggcggcggcccggggcccggactgcggccgcgcggatcccacccagcccaccccgccccggccgacggctgcagctgacctggatccttcgagcgcccgccgaccgccagcgatcttccctcatcttccgggctggtttctgctgcgcgaggagcgctgccctcgccgcccctctcgccggacccccggcccccgatggctcggatggggcttgcgggcgccgctggacgctggtggggactcgctctcggcttgaccgcattcttcctcccaggcgtccactcccaggtggtccaggtgaacgactccatgtatggcttcatcggcacagacgtggttctgcactgcagctttgccaacccgcttcccagcgtgaagatcacccaggtcacatggcagaagtccaccaatggctccaagcagaacgtggccatctacaacccatccatgggcgtgtccgtgctggctccctaccgcgagcgtgtggaattcctgcggccctccttcaccgatggcactatccgcctctcccgcctggagctggaggatgagggtgtctacatctgcgagtttgctaccttccctacgggcaatcgagaaagccagctcaatctcacggtgatggccaaacccaccaattggatagagggtacccaggcagtgcttcgagccaagaaggggcaggatgacaaggtcctggtggccacctgcacctcagccaatgggaagcctcccagtgtggtatcctgggaaactcggttaaaaggtgaggcagagtaccaggagatccggaaccccaatggcacagtgacggtcatcagccgctaccgcctggtgcccagcagggaagcccaccagcagtccttggcctgcatcgtcaactaccacatggaccgcttcaaggaaagcctcactctcaacgtgcagtatgagcctgaggtaaccattgaggggtttgatggcaactggtacctgcagcggatggacgtgaagctcacctgcaaagctgatgctaaccccccagccactgagtaccactggaccacgctaaatggctctctccccaagggtgtggaggcccagaacagaaccctcttcttcaagggacccatcaactacagcctggcagggacctacatctgtgaggccaccaaccccatcggtacacgctcaggccaggtggaggtcaatatcacagaaaagccccgcccccagaggggtctgggaagtgcagccaggctcctggcgggcaccgtggccgtgttcctcatcctagttgctgtgctcactgtcttcttcctgtacaaccggcagcagaagagcccaccggagacggatggggccgggaccgaccagcccctctcccagaagccggagccttctcccagcaggcaaagctcccttgtgcctgaggatatccaggttgtccacctggacccagggaggcagcagcagcaagaagaggaggacttgcagaagctgtccctgcagcccccctactatgatctgggggtctccccctcctaccacccctcggtaaggacaaccgaacctcgaggagagtgcccctag

SEQ ID NO: 25464 - DNA, 530 bp, Homo sapiens
tcctggccactttttcaaacttgggtttcgaggacgccggaccaaccaaggatacagatttccatgtggccttggagaacgtggacaccactatgaaggtgcacatcaagaggcccccgagattgacctcgtccatcagtgtgtagcctgcggggccaccttcaccaccccctaccgccctgccccggactcagacgacgagaagaaggccggcccactgggtggaagcagctatgaggaggaggaggaggaggaggagggcggtggagggggcgagcgcaaggtgggcggcccccaccccaaatatgacgaggacgccaagcggccctacttcaccgtggatgaggccgaggcccgtcaggacggctacggggaccggactctgggctaccagtacgaccctgagcagctggacttggctgagaacatggtttctcagaacgacgggtctttcatttccaagaaggagtggtacgtgtagccccccttccagagcctctgtctgtgaccgctcctccccagcccctccc

SEQ ID NO: 25465 - DNA, 1686 bp, Homo sapiens
gcagcgagcgcggctccacattgttgcggatcgccggcacccggcagagcggcggcggctgggacgcgcggcgcctccgacccgttctcctcgcgcccggccgcgcagccagagccacccgggccgccgaccgccgagccccgcgcccgccgcctgggccccgagccttctgcgccgcccgggtgcgtcccgccaccctcggaggacggccggccatggacgcctgcaagttggagccgagcgggagggtgtgagcgggccggggccaggagcccgcgccgcgcaaccgggcagccgggcgcgccgggggtgggtccctctccccagccccgctctgcgtggaagaagagggcggggaccggcgccgggaggagagcggaggaggcgaaggggcatgactcgtgcaacttgcggcgggcatctgccgagcctctgagccggcggcggcccggggcccggactgcggccgcgcggatcccacccagcccaccccgccccggccgacggctgcagctgacctggatccttcgagcgcccgccgaccgccagcgatcttccctcatcttccgggctggtttctgctgcgcgaggagcgctgccctcgccgcccctctcgccggacccccggcccccgatggctcggatggggcttgcgggcgccgctggacgctggtggggactcgctctcggcttgaccgcattcttcctcccaggcgtccactcccaggtggtccaggtgaacgactccatgtatggcttcatcggcacagacgtggttctgcactgcagctttgccaacccgcttcccagcgtgaagatcacccaggtcacatggcagaagtccaccaatggctccaagcagaacgtggccatctacaacccatccatgggcgtgtccgtgctggctccctaccgcgagcgtgtggaattcctgcggccctccttcaccgatggcactatccgcctctcccgcctggagctggaggatgagggtgtctacatctgcgagtttgctaccttccctacgggcaatcgagaaagccagctcaatctcacggtgatggccaaacccaccaattggatagagggtacccaggcagtgcttcgagccaagaaggggcaggatgacaaggtcctggtggccacctgcacctcagccaatgggaagcctcccagtgtggtatcctgggaaactcggttaaaaggtgaggcagagtaccaggagatccggaaccccaatggcacagtgacggtcatcagccgctaccgcctggtgcccagcagggaagcccaccagcagtccttggcctgcatcgtcaactaccacatggaccgcttcaaggaaagcctcactctcaacgtgcagtatgagcctgaggtaaccattgaggggtttgatggcaactggtacctgcagcggatggacgtgaagctcacctgcaaagctgatgctaaccccccagccactgagtaccactggaccacgctaaatggctctctccccaagggtgtggaggcccagaacagaaccctcttcttcaagggacccatcaactacagcctggcagggacctacatctgtgaggccaccaaccccatcggtacacgctcaggccaggtggaggtcaatatcacaggagggtcaacagtctgcccatcagtcaatggagtttcttcagatccaga

SEQ ID NO: 25466 - DNA, 458 bp, Homo sapiens
ctctagacgatcccttaccggatctgggtacactggaccacgctaaatggctctctccccaagggtgtggaggcccagaacagaaccctcttcttcaagggacccatcaactacagcctggcagggacctacatctgtgaggccaccaaccccatcggtacacgctcaggccaggtggaggtcaatatcacagctttctgtcaacttatctatccgggcaaagggaggacaagagctaggatgttctgaggagagacttcacctgggacgtgaaaggagcatgggcttgatgtcagacagctgtgaccctggacagggccccccccaccatctgtaaaacggggacagtatgatgtaccttgaagggctgttgtcagaattctacgtgatgtaagtcaagcacctagcacagatcagtctgtcaataaatggccaatgttccgtgattattaaactga

SEQ ID NO: 25467 - DNA, 489 bp, Homo sapiens
ccaagcagaacgtggccatctacaacccatccatgggcgtgtccgtgctggctccctaccgcgagcgtgtggaattcctgcggccctccttcaccgatggcactatccgcctctcccgcctggagctggaggatgagggtgtctacatctgcgagtttgctaccttccctacgggcaatcgagaaagccagctcaatctcacggtgatgggtaagctgccctgggccccctccctgttcatccagaggcctgtgacctcggggcgtggccatcctcaggatgcctcaatgaccccagacatcccccttgggtgggcatgctgccatcattctaggcatgaggcttccagtcccttctagccaggccaccccacaattcactagggattaggggcaggggcttatctctagacagtggggaacgtgattcttcaggttgaagcccacaaggcactgtgctggcagcagcatcagacaccacggtaaggaa

SEQ ID NO: 25468 - DNA, 509 bp, Homo sapiens
agccatggacaagaagctttaagcatcagagtcaaggtttctaatattgcaaagactaaataattccaaggggggtgggatggaaagaaagagagagagagtgtgtgtgtctgtatgtgggttgtagagatgggacacagagatgaagacaggacagacttggaactatccctgcaattaatacctggcttcccagatccctttccaagccaaaaagatgtttttagacaaaacttgccaagcctcacaacagtcctgtgaggtaggtaagtattattacacccatttggtagatggaaagagctgagctgagagaagctgcatgatccatctagaaatcagcagtagaccctggggaggaaagagaggatggtgcccttcttctccctactctacgtgccttggctttctcttaagacagaaggaggagccccaaggtgctctgcctcttcaaatgtcaccattgagaaggaagaagaaaacagttttgcatgaaggtagctataaga

SEQ ID NO: 25469 - DNA, 536 bp, Homo sapiens
atttcatagacgaggaagctgaggctcagaggagcaaactaacttgcctaagttcacacagctagtaaaaggtgcttgtcattgaacacttatctattactttctgtgtgtcagggactcttctgggtgctttactcatttaactcattttaccctaacaggtagggtatctgttagcaccattttataaatgaggctactaaggcacagagatgttaagcaacttttccaaggtcacacagctagtaagtgattggactagtgtgcaaacccaggtgtgaagggcctagcacagacctggttcagagtagacatttggaggctccctgatctttgatcctcgctcggatatggcctgggatctacttggatagccaggttccccggccccccgatgattttccaggatgttcttggatcacactcgaggaaagctccagctgggcccagatttggggcttctgtcctgaaagcgctgctcctggtgtgaatgggaggcccaggctgtcttgtttaccaccttctgtaagtcctca

SEQ ID NO: 25470 - DNA, 630 bp, Homo sapiens
tttatatgtatgtcctggatcatgattgcaaaatggaattctgactggggttacagtaaaaaaaaaaaaaaaaaatcttgaaaaccactaccataaatacccaatgtctctttttatatattggccagtgttcaaatgcaagcatttgatgatgtttgtccacatgattgagataatgagatcattttcttcagttgagattcctgaatgagatgtccaaatagcaaataggaacgttaaaattgtctcaaatgcaaggcaataacaataagaattttaatttttttcttaattttagaaaaccatactctatcagataatttctcaaaatcccaaaaaccatacctttaatgaaacactcatcttaattcaagagaaaaacaacaaatgtaggctgcccaaaggacattcattaacttgaagggaataatacctttgaatccaaaagaaattcgccaggttatgggagacacaggatgttcccaaattggtagtgcggttccgtaaatgatacaaacttgcaactaattttttggaattttaatcatttacatttcttcaacactcatttagctttgcagatttaaaaagtaaatttttcattttaatttttttgtttcagttcctctg

SEQ ID NO: 25471 - DNA, 181 bp, Homo sapiens
gggtgtcctgtgccaggaaggtgtcctgccgggtggccccttctccccagggcgggagctgacgaggctggtttcaggccttccttccaccctgcggactgtgagaaagttctctgcttcctccgtcttggaggctgggcttggaatttgtgaagcctggaattgctcactccgggggctg

SEQ ID NO: 25472 - DNA, 459 bp, Homo sapiens
tttggtctgtagttgtaatgcctttgtctggttttggtgtcaggatactactagctatatgggatgggttgagaatttctaatatatcaaattaaggatactgttaggtgtgtttaataagagacactgtctgggcatggtgtaatcctagcctgtaatcctgtaatcacacttgtaatcccagcactttgggaggccaaggcaggagggtcacctgaggtcagcagttcgagatcagcctggccaacatggtgaaaccccgtctctactaaaaatacaaaaattagcccggtgtggtagtgggtgcctgtaatcccagccgttcaggaggctgaggcaagagaattgcttgaacccgggaggtggaggttgcagtgagccgagatggcttcattgcactcaagcttgggtgacaagagtgaaattccatctcaaaaaaaaaaaaaaaaagagacactg

SEQ ID NO: 25473 - DNA, 2010 bp, Homo sapiens
agacctgagttgtgtctttaaaagatccctccagcaagaatgaaagctggaatatttgttgggaagctgctgcaatagctctggcaggaaataatgatggcttaggctaggattatggcatgggatatctaagagttggtcagatttgctataaaattttgaggtaaaggcagcaggatttgccggtggattctatttaaggaccataatgggggagagaaagagaaaaatccaggatgactcttagaattagagtttgagcaaacaagcccaagcaaacaagcacaatgtggcagtgccatagtctgtgatagcagagcttagagaagcccatgcatgtttgggggcattgtggaagggagttctttcttgagcatacgaagtgtgagatgcctgttacaaatgtatatcctaccacactcctgacctcccagcttggggtcaggccctatacccaattgcccatccaaccacatggcagatcaccagggatgtgagggagcccagtgtacagactccccactgactgaggggcatcaggatgctcttcactggggacttagcataactcagtgtgaccctgggaagccctctgagccacccacaaaggattcttgtcctcatggtgactgtggtcacccaagcctgtgaccaacactggtctcattaagatgggtatcaacagggaaaacccattgcccccaagaaagcccgagagagacattcgataaggagcagccacatgtgtgtctgatggagccagaatgatccccatatggacacggggctcaatggggctacatactttatcctagaggttggtctctcaggaccatgttttcacttcatccctgtcagagtaggtctgcagtggcaaccctcatctcgtggactgtttaaatattaaatatcgttccttcctagaaggaggaaactcttgagatggttctggagtccttggggataagaggagaaacactgccctttgttaaggagagaaaatgtcccttgaatggggaatgggcaaccacctggaagaaactgatgcagccagatctatttccagctataactgactcactttcatctgtcaaaacagcattaagcaccagtaataagccctttaaacaaacaggctgttcatcctgagactgcaacatcttcagctgcaggaccaccccaggaggaaatactgcaggagattagcctcttcttttagcagggggagaagaaggggaaaaggaggcttggaatggaattctgccaatgatcctctccctccgtggggccattggactctgcagggtgctgggtctaataggacaccaatgaaaagttagggagcatgttcattagcccttgccttggtgggaccttacctggtgttcactgcaagtggaggaatgggctggggagggatgcagtacaaagtcacacgagaaaagaccaagggattgtagagaggaaggctgaggaggaatccggccaagaggcactgtggcctagcatcaaaaccatgggctttggcagtagcgacacctccaaagggtccagaccccagctccgtgactggcttggttgtatcacctgccttcccccagagccccgcagaagacacatgtaattaatcaatcgtgcctactgtgattgtggcagctgccacctgccacttggagagctacaatgtgggaaagacataagacttgtcctatggactcaagagttccagaggctggagccacaaggaggagagtgcaataggctgaatttaagacaggactctgtagtagtcagagcagtggactaagttaaaccagtcactcatgagttcttcaccttgaagtcccaataatggactgcagtttgcaaaataatcttgtttccttatgttaagatgtgttacccaataaaccccctgtttatagggtatgtgggggggggtgtgaatgaacttttattgtgataaaatatacataacataaaatttatgattttaatgatttttttctt

SEQ ID NO: 25474 - DNA, 613 bp, Homo sapiens
agacctgagttgtgtctttaaaagatccctccagcaagaatgaaagctggaatatttgttgggaagctgctgcaatagctctggcaggaaataatgatggcttaggctaggattatggcatgggatatctaagagttggtcagatttgctataaaattttgaggtaaaggcagcaggatttgccggtggattctatttaaggaccataatgggggagagaaagagaaaaatccaggatgactcttagaattagagtttgagcaaacaagcccaagcaaacaagcacaatgtggcagtgccatagtctgtggttgcataccaggtaccaggagatgtgttaatttgctcaagcaatgaaaccatgtctggtacagcaactgcaattgcagtcaccacttgattaatcttacagtaacccactgtcattctccaagatccatctgtcttctgcacaggccaaatgggaaagttgaatgggaatgtggtgggaatctccaagccggtgtccttcaagtccatgatggtggcactaatctccgcagttcctccagggatgcgatatgggtttggatttactatttttctaagtagatgcagctctaatggcttccat

SEQ ID NO: 25475 - DNA, 429 bp, Homo sapiens
ggttgcagtgagccgagattgtgtcactgcactccagcctgggtgacagagccagactccatctcaaaaaaaaaaaacccttgggcctagaaactaggtcatctacatacattagcagctctcaaacttttaaaaaaatataacacagaaatatattttatattctgatgcagtagtcacatacatatgtaatgaagcaagagtaatgcaaaatagtacttatcactactttgaaacatatactttgttttctattctgcttcattaaaaaccaaaatactagttgtgaccttctagattgatttcacattctattcatggattgtcacctcctattgaaaaacactggccttggatgtctaacctaaaactttgggtccttatgtgcaaggtattatgataagtactatgaggcatttagaaaactct

SEQ ID NO: 25476 - DNA, 375 bp, Homo sapiens
ctggcaaggggctcagcataggcaatggtgtgggtcgggggagggggagctggctggaatgtgagagatctccggtggcaggggccagacagatgatgcgggctttgctctggggtagtggggagccatagaagggtttagagggagggagtggacacccaccaggcctgggagtcagaactttctggagcacagaaaggaggtgacacattgtcaagaggctctcaggggagcatgggttagggggaaggcgaggtccccaaactgggcatccagggagcacaggtctggggaggaccccattgctgctgccctgactggactaagagcacctgggttgaggccgggcgccgccacctccctgcagaccccgga

SEQ ID NO: 25477 - DNA, 431 bp, Homo sapiens
tgaaaataaaatgtcagtagttaaaaaaccgtgataaaatttaaaaccatgggggtaattgattataaaagaccattatgccacagataaaataagttgcctgagagcctgcctggagccattagttaaaacattgccaatctaataatgatagaactgggcagccatggtggctgatgcctgtaatcccatatctttgggaggctaaagtgggaggatcgtttgaggccaggagtttgaaaccagtctgggcaacatagcaagaccctatctctataaaaactttagaagataactgggcatggtggtacatgcctattgtgctagctaggcgggaggaatgcttgagcccaggaatttgaggttacagtaagctatgatcatgcttctgctctccagcctaggcaacaaagtgagaccctatctcaaaa

SEQ ID NO: 25478 - DNA, 548 bp, Homo sapiens
gctattttaattcaagcattcagactctgcatcttggatctttacaactcacatttactcgtcagtctttcaagctccagacaaagggccaagcacatagtgagtttttaatgaacacttgttgcctgtttgatttattgatgaaagtggaaagtaaaaaagctgaggacatgagggcatagtttttcatccatacattgaatggaggtgggcatagctgatgaactggaagatccattttatacacatgcccattctgatctgctccactgtataagtcctgatcatagaggaagaacttagagatactgaaaaatatagccttccttccactgccctgaccaagataaccagcagccttcttgggacacagtaagggaagaagagtcttttgagttgacaatgttagtcctgccataagctgaccaaataggtgtgctattggttacaccacagtatgcttgggtgctagaagcttgtttaaaggtcaataagcagagatacttctagccaccttgagagtttaaataaataaacctatgcacatg

SEQ ID NO: 25479 - DNA, 1501 bp, Homo sapiens
tgcaaagcatgcatcagccacatccatgctatctcctaaagcagtcattctgaaacccaatctggggacagtgcagactaaataaaatttcattttgatttggcctcccgctgcgaatgggactgctttgtctcagccgacagaaccagcaagccagaaagggaatgaagacatttggagaagaagcgtttactgaaaggagattcctgggctggaggaaaaccatgatctacagttcatgttgacagatattgtatttttggtcctagatctgacttttgaaatgacttatcacaaattcaaatttagcaatcatgagtgaagtacccacgatgtgctaagcatctacctctgcagatagaagaacacttactgttcctgagcatgggagggaatagaagttcctgggtcctggcctcacctcatcaggcactgccaaatttgacacctccttcctgttcacggcagtcctttgcgatagggtattagatgccaccaagtagctgcataactcacccatttggtcagagcctgggtctaagccaggtctgacagactccaaagcaagccctgtttacagcatgactgggatccagtggacgagggaactgagctgtcaaaactaagtgacttgattgaggccatgcagctggcgaggggaggaccaggatctgaacccaactgggtctcccaagcctgggccactgaaccatttcacctcttggaaaaacttaatggtcagagtggcccacccagtccatggacagcatggaggataaactgcttccctagaaatcctctccagcattcttgccaccacgactttgggacacattgaccatgaggaggagctggtcaatgatggacaggagtccagattagcagagatgtggtaataaggacaccgatgcctaaatacttgaaatatccaataggaagcattccacctttgtgcaaatgcgaaccacatctcaccaagttcaggccaaggctgccaccggtgacgttttggaaaagaaaaaaaaaagcggggggagaggagagaaacagagaagcaaggaatgcagaagagagcagaggccacaaaaacagcagcaacgtgtcctgtgtattctgtttccttgtaaaactatgaagcatgttaaggagatacttcattttttgaggattcatactcttgtttatattataataaaaacaacccatgttctttctaaaaatttaggcaatgccttcgtgcacataaaagtaaaacaaaatcacctgtaatcctaccacacgcagatcagcacttgctaatcttttcacagggatcctaagaatatcctattctctatagaatatagttgatttatgttacctaataactaactgttaaccattttaaaattcttcagttttacattatgctagaaaaaaggagccgtcactctacgtgacatttctgtatattggtttattcattcaataaacattttttaagtacctacaaaaaaaaaaa

SEQ ID NO: 25480 - DNA, 471 bp, Homo sapiens
tattttctacttccaccaacagtatataagggtttcgattcctctatgtccttgccaacacttgctattttgtgttttttttttaatagtagctatcctaatgggtgtgggataatatctcattgtacttttgagttgcatttccctagtgattagtgatgttgagcatttttcatgtgcttattggccattcatctatcttctttgaagaaattattgcagtataatttacatgaaataaaatgcacccatatttaaagatacagtttgaagagtcttgacaaatgtctctattcatgtaactattaacactacttcaatcaagatttagagcgtctctgtcactccagaatgtcaccttgtgccctttggccaccagttctctcacactcctggccttgtgcaactatcgatgtgctttctgtcactgtagattcattttgcctctcttagcactgcacttacatggaa

SEQ ID NO: 25481 - DNA, 350 bp, Homo sapiens
agctgggattcacgtgcttagcaaataaccaataaaattgttacattttggcccggcacgatggctcatgcctgtaatcccagcactttaagaggccaaggcaggcagataacctgaggtcaggagtttgagaccagcctggtcaacatggcaataccccgtctctactaaaaatacaaaattagccgaatgtagaggcccatgcctataatcccagctacttgggaggctgaggcaggagaatcacttgaacccaggaggcagaggttgcagtgagccgagatcatgccattgcactccagtctcatgccattgcactccagggcgacaagagcgaaactctgtctcaa

SEQ ID NO: 25482 - DNA, 480 bp, Homo sapiens
tacaccaccaccctggagagttattctttgaatatttttgaatagtggtcagattctcagatatggaactctaggatacagagtgccaactgtacctcattttgtacctcattttgcttattaatttattagttgatggacatttgggctgttttcactttctggctactatggataatgctgctatgaacattcttgtgtatgtttttgtgtggacatatgattataattctgttgggtctgtacctaggagtaaaatcctggattatatggaaaatctatgcttcaccctttaaggaactagcagactgttttccaaactggttccaccattttacattctgaagagcaatgtatgaagattccagtttctccactttcttgccaacatttgttactgtctgtctcgttaatgatagctactatagtgtgtatgtagtggtatctcattgtggcttttatttgtatttccctgatgac

SEQ ID NO: 25483 - DNA, 195 bp, Homo sapiens
gggggccagctttgatttatgcctgctgccctggcataattactaatattgcctcctttttcagaagtgccctgctttgggccgggcgtggtggctcaccccggtaatcccagcactttgggaggccgacgcaggtggaccacctgaggtcaggaattcaagaccagcctggccaacacggcgaaaccccgtctc

SEQ ID NO: 25484 - DNA, 663 bp, Homo sapiens
ttacctttctcaacattccacaggttacttcctccttcctttgttctcctctgcctttgcctccttaaaaaagttctaagttgctagccaatcgggccaaataaaaaatgtgaagtcccgttccagccaatggaaactggacacggcagtagggtggacgcgtcaggttataaatgaccctgcctcctttgttctgtgggtgtagtctcatagcaaaactgctggcaagtgtaccctttctgcagaaagtataaaaatggccttgctaaggaatttaaatttacattcaagtgctatttctttacagcaccggaaaacaagcatttcaaacaagacctactatacaatgacagtaattaagataatgtgatactggtggaggaataagcacgtagacaaatcgaacataatagagaacccagaaataaacccctacaaatatatacgcaactattttttaacaaagattcaaaagcaattcagtggagaaaaaatgaccttttcaacaaataatggtggagcagttgaacatctacagcaaaaacaaagctcaacttcaacctcacacctgatataaaacatgaataaaaaactatgaaacttttagaaaaataaataaataaaccttagggatctagggccaggcaacatgtttttatactt

SEQ ID NO: 25485 - DNA, 392 bp, Homo sapiens
aggatggaaggcggtgaatcccgcctccagcatggagctcgggagaggccctgactgcagatggagaggctgccctggccgcagcgcacggggctcctgacccacaaaaatcgcgagataatgagttcatgttgtttgaaagtccgtcatttctggtaatttgctatataaaactattgctatacgattaaaaactaatacagaagaatatttctttaacattatgttaaaaaggaaaaaagctaacattttctttgtagcaaaacactgccatgatttacattaaaattaggaacaaattaggatgtctagtatcattactaatattttacaatatcttttctaattaatgtggtaatgtaggaaaataaacacaaatatataactatcaa

SEQ ID NO: 25486 - DNA, 407 bp, Homo sapiens
atcatgagatcctggcaagagtttttctccacagacattctgttggtggaatagaaatatgtgagatggtgaatggaacagatctaaataagcatgggactaacaaagtacaatgtatgaaagattttacttagaaaaaacaattacaaattgactatacaatcaataagactaaccgaagggaaatgcagtaaaacactttcaaagaaaaatactgtggagcccagaagaaaataagccaattgacagaggtagatttcacgagctcataaaaatgaaaaagtaaatgctgctggacaaaaagtggtccttacttttgctctcaatgtttctagtatgctatgtagaacaattattttgcttttactgaaaaataactattgcatttggtataaaacgattcatag

SEQ ID NO: 25487 - DNA, 474 bp, Homo sapiens
aggatagtcttttcaacaaattgtactggaacaactggacatcccccatgtaaaaaaaatgaaccctcacccatacttctttctaaatttttgtttacttactgatttattatgtttttgagacagggtcttgctctgtcaccaaggcaggagcacactggtgtgatcatggcttactgcagccttgatttcccaggctcaagcgattttcccacctcagcctcccgagtagctgggatcataggcatgtggtcccagcccggctgattttttttattttttgtaaagatggggtctcactatgttgcccaggctgttcttgaactcctgagctcaagtgattcttccaatttggcctcccaaagtagcgggattacaggggtgagccattgcacctgaccttgacccatacttcacatcatatatgaaaactagttcaaaatgaatcatagacctgaaggtagaacctaaaac

SEQ ID NO: 25488 - DNA, 379 bp, Homo sapiens
aaagctaacacagaccttgaggtggagagaaggcaagtggagagaacagtgttggaggatacagaggtacaagcagagactgaaatcaacccacttacaagttgggaatccttgtcagaaaaagcaacagaagtttacagatgcatggatctttgcagatgttgctgttgagtgtaagagctgctatcagtcctctacattgtgtattctgaatgagctacagttccagctgctggctgagtagttgctaagacacaacctcttggttcttacttcccttccatatctttagacctacaccaactaagataacttgaaaatgtcatgtttttctcaaacccaaataggattgactgctaaggacatttatacattgcaa

SEQ ID NO: 25489 - DNA, 408 bp, Homo sapiens
  misc_feature (48)..(48): n is a, c, g, or t
  misc_feature (320)..(320): n is a, c, g, or t
  misc_feature (329)..(329): n is a, c, g, or t
agcctttttttaaaccactgttaattctccatcaacatttaacatagnggattatcacccatttgtgagtagaaaaactgaggcccatagaggttaagtaagctgtgaggaactggcacagccaggattcaaagtgaatctgtgtaattcccaggcctgggtcccttctgctccactggcccctgtagaaggccccacaaaataataggtattcatttaaataatagaataaatttgttgtctgaaagtcaccaccaagtttatttagaaggttgggaattgtgaataacgagatttctggctctttcctaaccttaganacctttganaaacactgtggtttgaatgtcaataattaatggatcattttagctgagagacactagatttggtgtttgatctgaaaaa

SEQ ID NO: 25490 - DNA, 435 bp, Homo sapiens
ggtgtgtgtgtgtgtgtgggggggtgtgtgtgttcttttgggatatctgctttgaaatttcatcatcaaactaggcttttccctgatgaaagttccatactatagagaaaacatccacatttgcttgcagtttgtgcagcttaaactgaagacagatgtcttgtgcagcaaccacaatattttcatttatctcttaatagatttccatctaggaatcaaaagtctgattttatttttcaactctgatgatgaatactaagaattattttaattatagatctatttcattctgcaggaaataaggagaggcattttgaagtttttttctttaaagacctcaataatatttatcttctaaatgggattttcatacataccatgacaatcttatggattactacatattgggagatacctactatggaatccctggca

SEQ ID NO: 25491 - DNA, 441 bp, Homo sapiens
aaaaatattttcccacttcctccttgcttctgttgttgcttttgagtgttacctctgagtctgcctgtgctccctggaaacggcccgggtttcccaccccctgcccaggtttgctccttccctggtttttctgtcattatcacgctcacgtgtttccctcggtcaccccctctgcaattttcacacgtcttttccctctctctttgcttcattacctttggcccgcctgccagctgctgattctctctgaagatgtctctaaatgacttttaactgtgatttgtggaattcttattgtggagttttgcgtcttttcaggtgtaggttttttgtctcgcgtgtttccacgtctgcttgtagcgctttccgcttcgccgttccctgcggcccttccttccgtgcccggtgttcatcctcttgaatgctcttttcctgcctgtt

SEQ ID NO: 25492 - DNA, 601 bp, Homo sapiens
agtgaggccagcttctgttctctttgtttgaaacagggaatggggaggccatctgagctgttttatctgatgataggattgtgctgtgttgctttctcaggcgagatgctcttaaagatgcctctcagagcagatctcacacctctcccccaagcatccaaagatggtctgggcactggggcatccaggctgaaagcagcccagctgggagcctggcctgtcttcaccttcatggaaatgcctctctgccctgaaggggtggaaattcttgctcactcaggaggctccatccaggattgacctgtcagtctcaagtgacacctctagttcctccatgggcttctgtggccctgggcaggaagtctgatgggtgggcttgagtgtgcacatcagggagaaaggaacatcagagaccacggggcctggtggggacgggctgggctctggagcctcacagccctgggttgaaatcttggctctagagacatatgtgtcttggcaagtcacttaatgtctctgcacccctcaccccatatctgcaacctttggataatagtgtcaacctcacaggcttgctgtgaataagtagtagataaaaaaa

SEQ ID NO: 25493 - DNA, 381 bp, Homo sapiens
cctgatgatctgtcactgtctcccgtcacccccagatggggctgtctagttgcaggaaaacaagctcagggctcccactgagtctctgtgatggtgagttgtagaattatttaattatatgttacaatgtaataatagtagaaataaagtgcacaataaatgcaatgcacttgaatcgtcctgaaaccatccctccccgaccccaatccatggaaaaattgtgttccgcgaaaccggtctctggtgccaaaaaggttggggaccgcttctggaaaagctggaaaaggcaagaaaacgcattctctccctcagcctctggaaggaaccagcactgtgggactaatttacatactgtagggtaataaatttgtgttgcttcga

SEQ ID NO: 25494 - DNA, 313 bp, Homo sapiens
ttcctgtaaggttgtgccttggattattttctggccagaacacagaacaaagcattccagagaaaccttggtttgtttatctactttcttcaatgcgctcatttttgcagccccgtcagtatggttatcaggaagagaaattggttataagaagactattttctgcatctactttctcttcaatatgttttgttttcaacagcgttattatagattcacataaactggaaatctttttctgttttatttcctttttcagagattcatagtgttttaaatatctaggtatcttcagatgacttgagctaccaaa

SEQ ID NO: 25495 - DNA, 396 bp, Homo sapiens
tttgagatggagtctcgctctgtcgcccaggctggagtgcagtggcatgatctccgctcactgcaagctctgcctcctgggttcacgccattctccggcctcagcctcccgagtagctgggactacaggcggccgccaccacgcccggctaattttttgtatttttagtagagacggggtttcactgtgttagccaggatggtctcgatctcctgacctcatgatccacccacctcggcctcccaaagtcctgggattacaggcgtgaggtaccgcgcctggcctaaaatctgaattcttaaaaggtatttccctcatcttgtagatgagaaactgcagcctggagatgccagttacttttatcaggtcacacagagtaaggagtagagttgggat

SEQ ID NO: 25496 - DNA, 437 bp, Homo sapiens
ttatattgattgattttgagatgccatctcagctcactgcaacctccgcctcctgggttcataccattctcctgcctcagcctcctgagtagagtagctgggactacaggcacccgccaccacgcccggctaatgtttttgtatttttagtagagacggggtttcaccgtgttagccaggatggtctcgatctcctaacctcgtgacccgcccaccttggcctcccaaagtgctgggattacaggtgtgagccaccacgcctggccttacttcttttttaaatgtttggaaggattggagaattcaccagcaaagccatttgggccttgggttttctttgtgggaaagtttaaagtttggtttttgtttttgtttttgttttccttatctgaaatgtctttactagctatagggatattcatattacctatgtcttc

SEQ ID NO: 25497 - DNA, 339 bp, Homo sapiens
ctgtgaagaagctttttagtttgagataatagtttgtctgtttttgcttttgttgcctgtgcttttgagatcttcttcataaaatcttaacctagaccaatgccctgaagtgtttcctctaaggtttcttctattcattgttggtgtatagaaatgctactaatttctgtgtgttgattttgtattctgcacctttactgaatttatcagttctaacagctttttggtgaagcttttagggttttctatatatgaatttgtgtcatctgctatacatagaacttttaaattactggaatagaatgtagaaggaggaatataaagaaatgtaattcaaca

SEQ ID NO: 25498 - DNA, 308 bp, Homo sapiens
cacagctgaaattttaagttggaatgaatattcactgggcccaaaatgacagttcatatttgaataaaagtgacaaaagcctttttataagtaatcacttttaagtgaaatgttttaactgatttcatgtgatttagaatatgatttaatcaaattattttaatgatagatggaatggcagacaaaaacatgcctgtccttctagactgattttactttaccctctaatattcatctcagtagcagtgttttaaatattctctgggctgcaaaactctttgggaatctgataaaagctatgaacactc

SEQ ID NO: 25499 - DNA, 417 bp, Homo sapiens
ctggctctaaagtgagcactcttaagaattaattatatttctcaaggttgtatccgtttaacttctgtgtagcagtatcttacccagcataatgtatgtttaattttataggtgaaaaaatagtactttaatgctttaatttgcatttctttgactacttaggagaataaaactatgaatagtctgtagagaattttcatttacttttgcactggagtattcaacatatgaatatagggatgtgactaaaaagtaaagagactgaaagcatagtagttaagagtgtgggcttgaataccagctccatgtctttctagctgcatcacctttttttttttttttgagacagagtctccgctctgtcacccaggctggagtgcagtggcgtgatctcagctcagtgcaagctccacctcc

SEQ ID NO: 25500 - DNA, 396 bp, Homo sapiens
taggaagctgcttttataagtaaaaggggaaaaatagcttgataatttttgaggacaggcagcgacggggaaagggcacgttgttcagtttagaagctaaactaggggataggaagaggatgactggccagcttagactgttagaacttgggtttcctcactggcaggcagatattagatttgcttagaatcaagactgctgtgaagatctttcctctcttgctctcgggaataaatcctactttggtgttttaagctgtttctcttctgttagccactccccagattttcactcaaatcctgcatcagtgtcctttgtacctttcctctcactctgtctctgttgtaaaatcaattataatttgcttacatctccagttatgggggtacattttc

SEQ ID NO: 25501 - DNA, 620 bp, Homo sapiens
ccttatcattaaggggtggtgatgatatatctcaattctagaaaaacaccagggggctaatttatcacagtgtcagaactgagcaaataacattccctcctatccactctgagaattgttcctggaaatggaattggagttgggtagcacatgttaccactgcttggtggtacatcctattagcattgtgtgacactgaactcaccaagctgccctttaaatataattttataatttagattcccacataacattttctccagaggaaagaatgatctggtcatgcccaagagccactctgagcctttgggagttatatttatcactgtaaattaataaattggggccatgcgcggtggcttatgcccgtaatcccaatactttgggaggccgaggtggatggatcacgagatcagatcgagaccatcctggctaacacagtgaaaccccatctctactgaaaatacaaaaaattagccgggtgtggtggcgggcgcctgtagtcccaactactcgagaggctgaggcaggagaatggcgtgaacccgggaggcggagcttgcagtgagccgagatcgcgccactgcactccagcctgggcaacagcgagactccgtctc

SEQ ID NO: 25502 - DNA, 614 bp, Homo sapiens
tctgcttttatctttattttatttcattccttctacttactttgggcttactctgttttcaacttcttgagttgaaagattaactcatttattttcactttttctaattttttaaccttaaacatgtatttaaggttatagttttctctctttagctactttacaagatctaatgtggagtaatttcattgtcgttcagctctaaatattttgtaattctcattataattacctccttacccatgcagtatctacaaggaagtttatcagaagtattcttttcttcttcagctaactttttgttgccattacaaaaaaactataacccctccataatctcaattctgtatctccacatcctatttttccagcttattctttctactagggtgatcctgaactactgtgcattgttcaacctcatggaatctccactgactctcatgctcttgatgtcccttcactctcctctttatcgagattacattccatgatttatcattattatcatcactctcccctctctccctttatagtgcttggcaaaactacaaccttgtttaaatccaattttctgcctactccacacctgcacctgtgcaactaaatgtggc

SEQ ID NO: 25503 - DNA, 1276 bp, Homo sapiens
ctcaaatcagtgatctgtcaaaataggccttgtaactgaaataccttacaaagcagttctaactaatgcaatgtgttttttaaaaatttttaatgaaccttacattgtgaacataattgcaacatgttttaagacaaacagtatttaatccttgaagacctgtcttgtatgtctctcaattttgtcagaatttttattattgtttttcacatatgtgaaataagcagttttttcagggtacatagggtatctttgttttacagatttttaaagatgaggttttgaaaagccctcagaggtttttgttaaaagactatcttgcttaataaatgacaacttgttaacagattcacacattacaagtaggacagtataacaggagattggtgtgtgaatgctacaaaacagtcagcaaaaggaatcatgtttgcttgtgaaacttcagaggtaccctgaaagtcatttcctaaagctagtgcatgtgaatcttttccttgaattgtgcagaataattggattgaggcacatattttgaggagtagcaagtggaatggtataatgactacagagaaaattatcttgaaatatagcaaggaagagaaacaagttttctttctccactttattgttggactaattgggtcaatttgctgtgacatatcaaagatctctttgtgccaggccaagactggctactgagttctcaaagcgttttaatatatagattacgtatgagtgcctattttttcctcctcctttcattttttatcttaatacccattttacttctgaaataattcatctgttttgctttatgaccagctttaatttcaattgaggaataataacaaccctagagattcataggaaagagcattgaaatacattttttgcataaagatacctaaaaccatctacccagcttagggttgaactgaatttctgtgaaataaatttgttttaaatactaattattttaaaactacttaattcttaaaaacaatgtcatcagtttcaaaagtttcactttgggaggatattccttaaaaggcatacatagatggtaaagtataaaatatttctgacagaattattcagtattattcaacatttactttcatgtttgttattgtaccacaaagatagtgtcattgttgggttaaaatgttggctgtttttgttaatatacttaaaactgtaaccagtgaataacacctgtagtattttttattatagattatattttatttcaataaactttgatatttagaccaaa

SEQ ID NO: 25504 - DNA, 889 bp, Homo sapiens
  misc_feature (831)..(831): n is a, c, g, or t
ctcaaatcagtgatctgtcaaaataggccttgtaactgaaataccttacaaagcagttctaactaatgcaatgtgttttttaaaaatttttaatgaaccttacattgtgaacataattgcaacatgttttaagacaaacagtatttaatccttgaagacctgtcttgtatgtctctcaattttgtcagaatttttattattgtttttcacatatgtgaaataagcagttttttcagggtacatagggtatctttgttttacagatttttaaagatgaggttttgaaaagccctcagaggtttttgttaaaagactatcttgcttaataaatgacaacttgttaacagattcacacattacaagtaggacagtataacaggagattggtgtgtgaatgctacaaaacagtcagcaaaaggaatcatgtttgcttgtgaaacttcagaggtaccctgaaagtcatttcctaaagctagtgcatgtgaatcttttccttgaattgtgcagaataattggattgaggcacatattttgaggagtagcaagtggaatggtataatgactacagagaaaattatcttgaaatatagcaaggaagagaaacaagttttctttctccactttattgttggactaattgggtcaatttgctgtgacatatcaaagatctctttgtgccaggccaagactggctactgagttctcaaagcgttttaatatatagattacgtatgagtgcctattttttcctcctcctttcattttttatcttaatacccattttacttctgaaataattcatctgttttgctttatttaagcttctatacntgtaattaataataatatactaagataagccagttgacctgtggggatcctcagatca

SEQ ID NO: 25505 - DNA, 1588 bp, Homo sapiens
ctcaaatcagtgatctgtcaaaataggccttgtaactgaaataccttacaaagcagttctaactaatgcaatgtgttttttaaaaatttttaatgaaccttacattgtgaacataattgcaacatgttttaagacaaacagtatttaatccttgaagacctgtcttgtatgtctctcaattttgtcagaatttttattattgtttttcacatatgtgaaataagcagttttttcagggtacatagggtatctttgttttacagatttttaaagatgaggttttgaaaagccctcagaggtttttgttaaaagactatcttgcttaataaatgacaacttgttaacagattcacacattacaagtaggacagtataacaggagattggtgtgtgaatgctacaaaacagtcagcaaaaggaatcatgtttgcttgtgaaacttcagaggtaccctgaaagtcatttcctaaagctagtgcatgtgaatcttttccttgaattgtgcagaataattggattgaggcacatattttgaggagtagcaagtggaatggtataatgactacagagaaaattatcttgaaatatagcaaggaagagaaacaagttttctttctccactttattgttggactaattgggtcaatttgctgtgacatatcaaagatctctttgtgccaggccaagactggctactgagttctcaaagcgttttaatatatagattacgtatgagtgcctattttttcctcctcctttcattttttatcttaatacccattttacttctgaaataattcatctgttttgctttatgaccagctttaatttcaattgaggaataataacaaccctagagattcataggaaagagcattgaaatacattttttgcataaagatacctaaaaccatctacccagcttagggttgaactgaatttctgtgaaataaatttgttttaaatactaattattttaaaactacttaattcttaaaaacaatgtcatcagtttcaaaagtttcactttgggaggatattccttaaaaggcatacatagatggtaaagtataaaatatttctgacagaattattcagtattattcaacatttactttcatgtttgttattgtaccacaaagatagtgtcattgttgggttaaaatgttggctgtttttgttaatatacttaaaactgtaaccagtgaataacacctgtagtattttttattatagattatattttatttcaataaactttgatatttagaccaaaaaaaaaaaaaaaaaaaaaaaaaaaaaaaaaaaaaaaaaaaaaaaaaaaaaaaaaaaaaaaaaaaaaaaaaaaaaaaaaaaaaaaaaaaaaaaaaaaaaaaataaaaagaaaaaacatacagaaaaaattaaaaaaaaaagaataaaataaaaattattaataaaaaaaaaatgttttccccccttagaccaaaactttttttactattgaatatttttctcgtcgcgccttattcgatcttttgtgcatattcccccaattgggagctgtctaaacaatccgggcgccgttatttcaaaattcgccgtcgtt

SEQ ID NO: 25506 - DNA, 1141 bp, Homo sapiens
ctcaaatcagtgatctgtcaaaataggccttgtaactgaaataccttacaaagcagttctaactaatgcaatgtgttttttaaaaatttttaatgaaccttacattgtgaacataattgcaacatgttttaagacaaacagtatttaatccttgaagacctgtcttgtatgtctctcaattttgtcagaatttttattattgtttttcacatatgtgaaataagcagttttttcagggtacatagggtatctttgttttacagatttttaaagatgaggttttgaaaagccctcagaggtttttgttaaaagactatcttgcttaataaatgacaacttgttaacagattcacacattacaagtaggacagtataacaggagattggtgtgtgaatgctacaaaacagtcagcaaaaggaatcatgtttgcttgtgaaacttcagaggtaccctgaaagtcatttcctaaagctagtgcatgtgaatcttttccttgaattgtgcagaataattggattgaggcacatattttgaggagtagcaagtggaatggtataatgactacagagaaaattatcttgaaatatagcaaggaagagaaacaagttttctttctccactttattgttggactaattgggtcaatttgctgtgacatatcaaagatctctttgtgccaggccaagactggctactgagttctcaaagcgttttaatatatagattacgtatgagtgcctattttttcctcctcctttcattttttatcttaatacccattttacttctgaaataattcatctgttttgctttatgaccagctttaatttcaattgaggaataataacaaccctagagattcataggaaagagcattgaaatacattttttgcataaagatacctaaaaccatctacccagcttagggttgaactgaatttctgtgaaataaatttgttttaaatactaattattttaaaactacttaattcttaaaaacaatgtcatcagtttcaaaagtttcactttgggaggatattccttaaaaggcatacatagatggtaaagtataaaatattgaaactgatgacattgtttttaagaattaagcagttttaaaataattgtcgacgcggccgc

SEQ ID NO: 25507 - DNA, 398 bp, Homo sapiens
ttacaggcacccgccatcatgtccagctaatttttgtatatttgtagagacggggtttcaccatgttggccagactggtcttgaactcctgacctcaggtgatctgcccgcctcagcctcccaaagtgctaggattacaagtgtgagccaccacgcccggccccaatattctttcttactagacactgtgtaagctaattattcagcaagtattttgcactgaactctaaataggtaagtattttgtgtccattttacagacaagagaaataaaataggtaaagtatttccccaaagctatgataaatgaatcccatagctagaaatggcagaaaacccatggaaacttctatggggagtggatgtctgccttaccttggcacaatgcttggttctca

SEQ ID NO: 25508 - DNA, 401 bp, Homo sapiens
gagagattttgctggattcttcaaacgctgggtattttctcattgaaacagaggccagagtccagtgactgcaagctaaggacaatgagaagcctacaaagagaggttattgaaagctcacgtcaggcggtgactcacacctgtaatcccagcactttgggaagctgagtcgggcagatcatctgaggtcgggagttcgagaccaacctggccaacacagcaaaacccatctctactaaaaacaccaaaattagccaggtatagtggctcatgcctgcagttcccagccattcaggaggctgaggcacgataatcgcttaaactctggaggcagaggttacagtgcaccaagatcgtgccactgcacttcagcctaggtgacagagcgagactctgtctcc

SEQ ID NO: 25509 - DNA, 152 bp, Homo sapiens
actcctaaaaataatgtgttttaggacacacagtgaaactgatcatgtgtctccattcatggcctgctttcatcattggtttgtgcatgaagacacttctaaaattatttattcatattatcgatatatagatgtattagccattgcttctc

SEQ ID NO: 25510 - DNA, 378 bp, Homo sapiens
ttatataactgatgtcactacttcaaattcctggtctgaaatctcacctggaccctcagtactgcacatcaatccttttaccaatctctactccacttcctctctcattaccttccttcttgataaacttaagtccagttactatgatcttttttcctaaagtcccactcaaaggatgaggctgtcccttctcacatttaaggtcaacctttctacctgccctatatatttcccctgcaattcctacaagctaaaaacctataagtcatacttgactgtactccccatatataatcaacagtcgagctagttctgcatattgtttcctaaataattctttaaattgcaaattatttttatccctatttccacactgtg

SEQ ID NO: 25511 - DNA, 297 bp, Homo sapiens
ttcttttcttactgtatcttgtaacttctgtggtgctttatcgagatttaccagacacaggaagaagatggccatctaaaagtcaaaagaagaagcctggaacagatttttccctcacagttctcagaaggagccagtggtgccgacaacttgatctagtctccagagctataccacaaccaattccacttatttaagccacctaggttgtggtacctcgctacagcatcacctagaaaattaatgcaccttcattacccagagataacctcagtaaacacttactatacatttaaa

SEQ ID NO: 25512 - DNA, 237 bp, Homo sapiens
aagagtgtcacctctcagatgccctttcagaaaccttagagcagttattattgcaatgattaagcaacaattaataataacaagccaaagatcttccttgattttaacttcacgaatttaaaatttattcttatgtatacatagcactgaattgtatttgtttaaaagctcaaaatcactttttaatgtttatgatatattaatatacaatgtaggactaagaaaaattatactttt

SEQ ID NO: 25513 - DNA, 370 bp, Homo sapiens
tgtattttcccaagcagacattcgacttgtacagttttccagcattactctcttctttagcagtttataaattccaagcttgtttgatgaactggaagccttgccaaggatgagagagatagatacatgtgctgcgtcctcatttattatacttactaaacagatgctttttgacttgaccatgtcttcctggcttttcttttagcccttatttgactcccaagacaactggacattttagctgtgtatctaactgggcagaatagtggcacatcctttctcaccttttaaaaccaagatgtggtgcagctgaaacagctaagaagtttgcagcaggctctgacccctactatcagttactgaagtgtat

SEQ ID NO: 25514 - DNA, 394 bp, Homo sapiens
tttttttttaatgagatgctcaaaaagatctgcgtgtaattccagatgacattgccaccttatttatccaaggatgcctgtctcactagtaactgattttgaattccagataatactattatgtccaatcctggatattaggtcaaatggctaaactattgcttattcacttatgtcccagacgtgaggtatcactagatccagaaatgaattatccccggtgggctctctttgacacatggctccaggaactcatcatttagacgtcaatcattttctcctcctagctctgatgtctcacaggtttcctgacaacaattagggggaataaaatcactgataatcacaatcacacctgccttccttattggctcgcaggcaatttacttcactc

SEQ ID NO: 25515 - DNA, 262 bp, Homo sapiens
gctgtgaacagcagagtcaggctttgaaacctgatctgtcaactgcaaagccagagcggctggccatatgactacaggggcttctgctgtttccggtgggtgacttgggagcattgagaagcgctggtggtgggagctgagcttccagctcccacttcatgtcgggtcatggtttagcctgctgaggtgggcttttggcatctttatgcatcttagatttccacctaggagatgtcacagccagctcctctcataagccacc

SEQ ID NO: 25516 - DNA, 310 bp, Homo sapiens
aacatgggtttgaactgcaagaattgcctgtaaaccatttgtttctaactaaacacggattgaaaatacagtatttgtgggatacgaaacctgtttacatggaggtctaacttgttgaatatgcagattactcagagacagctgtagtacttgagtatgcatggattttgctatatgtgagcagtccgagaagcaatcccctgtgtataccaagtggcaagttgtgtgtgtatgtgtatctgtttgataatttattttaatggaacttaaacattttaaccaaaagaataaaatgttcttttgaaatagg

SEQ ID NO: 25517 - DNA, 691 bp, Homo sapiens
ttcattctggattctttggacgttacattgtattggctctgggttctgcctcctgtctatatactgtctgacactgtctatatactgtattccccttgcccctgtggttttccacgtatgaattgagtttacattgcttggactataattgctcatccctaccacagttactttattagtttagctatactattgggaagatgatttttcatcatggttatacaaatttgtttataagcctatttaactcaaatttaaattatgctgctgtgggtaaaaatagtaacaagtactttttcatggatttcttcagagactaactaaaatgatcaatcagcgtgtccaagaaaatatgagaaaatttatctttcagaaatgttttgtatgaaattctcaaatgcttcaaaggcttacaactttacatgaaatgattaaagacagatttaaaaacaagaacaaaatccacaattattatccacattacttttgagtactgttaatacagccattacagagacctccagatagaaggaatgatagtatctaaataatagaaataggatgattaagttgcatttatttaaaaacaagtctttttggttggaaataggatgtataaaaaagctcaataccaaaatttagatgagatgtacatttattggagagaataaaattgttgagatagttttta

SEQ ID NO: 25518 - DNA, 729 bp, Homo sapiens
aggtcacgtggctggagctgagtaagcaaggggaataatggtgggagaaattacgtggaggaggtagtcaggggctagatcatgtatatattgccatgcaggccatggtaaggactttggattttattctgagtaccatgggaagccactgaaaaaccttgcctaagataatgggtttctgttttgcctaaggcaaattaactttttactgaagtatactatacattacggaaaaagtacacaaatcgtaagcttgatgaattttcatgatgtaatcgcatccatatcactagcacccaggtcaataaacagatcattaccagaaccccagaaccctcccttatgcccctttccagtaacgcccatcccccaacccacgggtaactaccatcctgacttctatcaccaaagattagttttgcctgtttatataaaactttatataattgcaatcacaatatgtattcattttgtgtctggcttctttcatttaatattatgtttaggagtttcatcattgcttagcaatagtttattggtgctatatggaagttgagtgcgtgatcacaccacagtttatccattctactgttgatggacatatgagtaatttccggtttggaactactacaaacagtgctgttatgaacattctattacatgtcttttggtgaacaaatatattcactcctgtttgaaataaacttaagaatggaacttatggatcat

SEQ ID NO: 25519 - DNA, 1850 bp, Homo sapiens
agctgagagcccaatcgcatcaggggagcacggcccagcagcaggagctccaggctggctggacacctgggtccccacgcagactgtgagtagagggagctggaccacagtgggacaaggacacctccagacaggttgccagggccccacatggaggaggcaggtgggcccatggcccgggccaaggcccaagtggtaagtgccacattgacatggcggcagtggccccccacccaggaagagatcaaacatggttttcacaaggtgtccctggtgtcaggggcccagatggaagccccgcagaaggagatgtttgagttcagccgtcgagaggaagtggaagtcaatggctttgcaacacaggaagaagagactgtgaattgccagggccctcgggatacagctggctccaagaacttccagagccatggacccatcttttccaagaagtacataccacctcccaaggagaaaaggcctgaggggaggctgaaggaggctgtggaccagagtgatggcagccgccaagctcccaggactgagcccccatgtgtgggagctatggccaggactgagcttttggttcccctgcctgggccccgagagccaagtccccacccaggtgtaggtctcaccagtggtagctcccggagcctcgaggaataccgagtgacacgcactgtgcggaccaccacagtggtgggaggtcatgtggaccggcggatgagcagctctgtgactgtgaggccagtgtcctcaggcgaggccctgccacggggccgtcaggtctcccgcatggtgccgccagtggtggtgggctccccaccaggctcgcccagccgcagccaggccgtgaaagtgctaagtaacctcgtgcctgctgggcacagcccccctgccagtcacctgcccaggcccacggctggcgggccaaggagcacaggtctgggcagcacagtgggggcagccttgaggcagctgcctgagaccgggacagcagagcttaaagacagctctgccctggcctctacaggcatcccagccagtgctcacctgcctaagaatcaggatgcccctgcagcctgtccggacagagaccagggcagagccccggatgccagggcctgtgagctctggcaggtgctgggagcccccagttccactgagctccctctccagacttctcagggtcaagcatcagtcccctcctctcccagactcgagacccatgtcccctctcctggcctaactcaccctgcaaagcagcctgtggtgcccactcaccccggggcccggctcactccccttgttctgccccctaaaaaaaggacgggcccgtggacccccctgctgccaccgtcctgcccatggtgaggagcgagcatgtgacagtccctggacaacctcctgctccatccactacaagaaggaaggatgtccccagcccaggaggtctttctgctccatcgtccccaaggaataagtttgttcagaactctgaaaatgtccctgtcctcccctttacccagagggaggtcgtgaagggccccggtgtgtgggccgagagccgcctgccgcgccagacgtggagcatcagtgaatcgggccacatctgcagccagatgttcgaaggccagatcctggacgtgaagggaggccggggctacgaccgggaccacgtggtgctatgggagccggatgaggacagggcatcccagatctggactatccacgtgctttgaaacttttcccctcaccctccagccctggaggcttttgctgggatgaatgtttttatagggtttttgttgtaacataagctattttctaatatgctgccaggtaccctt

SEQ ID NO: 25520 - DNA, 499 bp, Homo sapiens
attttacagatggggaaataaaggcccagagaagtggacacggatttgctctgcaatcttggcgccgggtttatttccgcctctggaatgcagcactggggggattcctggcagtgccggaccatgtggaggacatgaaagcaggccgtgtggtggtcgccgacccccaagctggaggtagctgcatctggtactacgaggatgggctgctgaagaaccagatggcccccaccatgagcctacaggtgattggaccccctagcccaggctccaaggtggtgctgtgggccgagagccgcctgccgcgccagacgtggagcatcagtgaatcgggccacatctgcagccagatgttcgaaggccagatcctggacgtgaagggaggccggggctacgaccgggaccacgtggtgctatgggagccggatgaggacagggcatcccagatctggactatccacgtgctttgaacttctaaaaggtatcagctcggttcgtt

SEQ ID NO: 25521 - DNA, 1369 bp, Homo sapiens
  misc_feature (58)..(58): n is a, c, g, or t
  misc_feature (150)..(151): n is a, c, g, or t
gggaggctatgacgagttgctgacctccctccgggtcatccggacggacttcgggganccggccgtcgtgctatttgaggccatggacttcgaggggcacggcgtggaggtgagcaaggcattgccggatgtggagctggtgcaacacgnncccagcacacaggccatccacgtgctcagcggcgtgtgggtggcctaccaggaggtgggcttctccggggaacagtacgtgctggagaagggcgtgtatcgtaactgcgaggactggggcgctggcaacagcaccctcgcctcgctgcagccggtcctacaggtcggggagcacgatctgcacttcgtctcaaagattcagcttttctcccgccccgactttctgggcgaccacttctctttcgaagatgaccaggccgctctgcccgcctccttccgacctcagtcctgccgggtccacggcggcagctggatcctgtttgatgagacgaacttcgagggtgaccagcacattctctctgagggcgagttccccactctcacggccatgggctgcctcgcctccacagtcctgggctctctccagaaggtatccctgcacttttcagagccttccattttcctgtatggactcgagtgcttcgaggggaaggagatcgagctcagcagggaggtgcggagcctgcaagccgagggcttcaacaaccatgtgctgtctgtgcggatcaaggggggcatttgggtgctatgtgaacacagtgacttccggggccgccagtggctggtgggaagctgcgagatcaccaactggctgacctacagcggcacccagagggtgggctccctctaccccatcaagcagcgccgggtttatttccgcctctggaatgcagcactggggggattcctggcagtgccggaccatgtggaggacatgaaagcaggccgtgtggtggtcgccgacccccaagctggaggtagctgcatctggtactacgaggatgggctgctgaagaaccagatggcccccaccatgagcctacaggtgattggaccccctagcccaggctccaaggtggtgctgtgggccgagagccgcctgccgcgccagacgtggagcatcagtgaatcgggccacatctgcagccagatgttcgaaggccagatcctggacgtgaagggaggccggggctacgaccgggaccacgtggtgctatgggagccggatgaggacagggcatcccagatctggactatccacgtgctttgaaacttttcccctcaccctccagccctggaggcttttgctgggatgaatgtttttatagggtttttgttgtaacataagctattttctaatatgctgccaggtaccctt

SEQ ID NO: 25522 - DNA, 709 bp, Homo sapiens
gaagataatgtaggtaaaacattattagaacagtgcttgagtgagtcagctctcaacaaacgttagctgtgattattgttattactattattacttttgctaccatctaagagctccagctgatttatggcagagccatgtctgatgtctgacagtccagtgtccatcccgtcaggaaccctcttcaacacagcgccgggtttatttccgcctctggaatgcagcactggggggattcctggcagtgccggaccatgtggaggacatgaaagcaggccgtgtggtggtcgccgacccccaagctggaggtagctgcatctggtactacgaggatgggctgctgaagaaccagatggcccccaccatgagcctacaggtgattggaccccctagcccaggctccaaggtggtgctgtgggccgagagccgcctgccgcgccagacgtggagcatcagtgaatcgggccacatctgcagccagatgttcgaaggccagatcctggacgtgaagggaggccggggctacgaccgggaccacgtggtgctatgggagccggatgaggacagggcatcccagatctggactatccacgtgctttgaaacttttcccctcaccctccagccctggaggcttttgctgggatgaatgtttttatagggtttttgttgtaacataagctattttctaatatgctgccaggtaccctt

SEQ ID NO: 25523 - DNA, 743 bp, Homo sapiens
cacgtgtcatgggtcagttttgaggactgaagataatgtaggtaaaacattattagaacagtgcttgagtgagtcagctctcaacaaacgttagctgtgattattgttattactattattacttttgctaccatctaagagctccagctgatttatggcagagccatgtctgatgtctgacagtccagtgtccatcccgtcaggaaccctcttcaacacaggtgtgtgtgcatttctttctgtaagtgtgtgtgcacatctgtatgcccacacacatccacgcttttagcaagcagaactgcctggtatggagtagactgcatggatctatggttagaacatgtgagttggatggctgcatgtatccatgtgtttgtgtcttctgtgaacttctgtgccatcatgtgtaccagaggtgtatctgtcagtttgtccctctgcacacatctgtgggtacctctatgaccatggaactgtgtgtgtgtgtgtgtgtgtgtgtgtgtgtgagagagagagagatacatgtgctctccgtatgtgtgtgtaaagaagcagtgacttagaaatagagtcaaggaaggtttggggacaggagggagggcttgggagcctgatactggagagtccagagttgagggtactgggggcccaggtcatccctccccggcacccctgactctcagcctctttctgccaccagcgccgggtttatttccgcctctggaatgcagcactggggggat

SEQ ID NO: 25524 - DNA, 835 bp, Homo sapiens
tgattccatttttaaatcaattactgaataaaacacactccatcgtgtggatgaaatgctaccttaatttgtcaaagctatcattttctaaacttttctttttaattcaaatcattaatattttgtggccagatcaatactgattcattgttttaagcttcaaatgcattatacagttgggcagaacacatttcctctcatcaatcttcttttccaggatttgtcagatattcctgacattaattcactactaatatgcacagtttctctaatcatggtcaacaaagatctgacagtgcattgtccctaaacgacccatacttgcctcactgacaccatgtggcccacttcccatctataatctatgtctgggtgtgaagcccttcccatatgatcccccgaatggaacttcacaagttcgaattcactgggtcacagtgtgatagcgtgaagatgggaggacgttaagggaaggctatgggtgagttgggaaatgtgttaggcagggtcagagattaccacatcctaaaaacaacacttaaggcgggagatgacaaaacaatcaatgaataacatgactttttccagtgaaagtgccatatctaatccttttccatttttgttctctgagcttctttcttagggaagatccttcttgagaagcccctgctgagtattaggaaaatgcatttcaggacctctcatcaacacaccctctttctttaccacaaccacatatatgggggcataactcaacatgtgtaaaagacaatcttctgcttttcactgaacctccaggaattcaggacaataaacctctacatgcagaccaaaa

SEQ ID NO: 25525 - DNA, 455 bp, Homo sapiens
tcccagaagtgtccacttaaactaagttttcaagcttattgtcataaagttgctcaaaataatcttatattttaaatatgtttatcttaattttgtccctatttctcttcctaatactatttgtttacacctatagtttttctctagatcagcttttcaaaggtttactgcattttaccctccctgatggggctcagtgtgcgcagctggaaaaagtagatgccctggttatgcatgcagctcatttgttgtacatgttgctttaagggaccttgaagactcttccctctccctattgttgccaaaataactgcctctgatctgtttttgtttgcatcccaggccccagactagcatgtaagatgcctttgagaagtcctagaacactgcagtcaaggtggacgttggaaaataaaaaggcttattgaattttctatcttttcaaagaatcagct

SEQ ID NO: 25526 - DNA, 597 bp, Homo sapiens
tacaacccacatcaaaacaactctgctcactttgccttctaattatctctagaatctgtctagttttctccataattgctgctcttactccagttcaggcttcctggattactgcaacaatcctttctcctggactattgcaacactttcctaactggtcttctttgttagtccattccaccgcttctcaaccttgtagccacagtgggttgggtcttccaaaagggcatttcactttccccacttaaaacgctgcaatagatgttgcccttaggatagcgccctacatcctgaggctgatgctttatgatctagcccctgttccctctcaattcttgccacttccctagttatactaagcttcctgtggctcccccaggagccatgttttccctgggttcatggcctttgaacataatatgttctctggctacagtgctctttctttcccactccttcctcccttttggtctggctacctcctactactggtccttcgggctccagctttctctaaaaactcctcagggctccaaagtaggttggatgctcttcctatgtgctcctgtggcacccgctatttaatacccagaattc

SEQ ID NO: 25527 - DNA, 440 bp, Homo sapiens
ccacagcagcagggatttacatttgctctttgagaacttattggctgtgaatgtggatgaacttaagccagctcttcttccttgcaggggagtccattagttaaggtgacttattgaagccctggccagctctaggagttctcggttttataattgaattactttagtaatattaaataatttggggagggggttaattttgggtcatttatatttcacttgtcaatgtagagggagctacttttattgtcattaagagtgacattcatcctggtgccatggtgagcacctgtggtcttagctacttgggaagctgaggtgggaggatcacttgagcccaggagtttgaggccagcctggcaacaaacaaaatccacatctctaagtaataatgatgatgatgataataaaatcctagaaatgaagaacaggtttggaaa

SEQ ID NO: 25528 - DNA, 9181 bp, Homo sapiens
  misc_feature (7541)..(7541): n is a, c, g, or t
ctggtggtccagtacctccaaagatatggaatacactcctgaaatatcctgaaaacttttttttttcagaatcctttaataagcagttatgtcaatctgaaagttgcttacttgtactttatattaatagctattcttgtttttcttatccaaagaaaaatcctctaatccccttttcacatgatagttgttaccatgtttaggcattagtcacatcaacccctctcctctcccaaacttctcttcttcaaatcaaactttattagtccctcctttataatgattccttgcctcgttttatccagatcaattttttttcactttgatgcccagagctgaagaaatggactactgtataaattattcattgccaagagaataattgcattttaaacccatattataacaaagaataatgattatattttgtgatttgtaacaaataccctttattttcccttaactattgaattaaatattttaattatttgtattctctttaactatcttggtatattaaagtattatcttttatatatttatcaatggtggacacttttataggtactctgtgtcatttttgatactgtaggtatcttatttcatttatctttattcttaatgtacgaattcataatatttgattcagaacaaatttatcactaattaacagagtgtcaattatgctaacatctcatttactgattttaatttaaaacagtttttgttaacatgcatgtttagggttggcttcttaataatttcttcttcctcttctctctctcctcttcttttggtcagtgttgtgcgggttaatacaacaaactgtaacaagtgtacctggtatggacttgttgtccgggacgtacattttcgcggtcctgctagcatgcgtggtgttccactctggcgcccaggagaaaaactacaccatccgagaagaaatgccagaaaacgtcctgataggcgacttgttgaaagaccttaacttgtcgctgattccaaacaagtccttgacaactgctatgcagttcaagctagtgtacaagaccggagatgtgccactgattcgaattgaagaggatactggtgagatcttcactactggcgctcgcattgatcgtgagaaattatgtgctggtatcccaagggatgagcattgcttttatgaagtggaggttgccattttgccggatgaaatatttagactggttaagatacgttttctgatagaagatataaatgataatgcaccattgttcccagcaacagttatcaacatatcaattccagagaactcggctataaactctaaatatactctcccagcggctgttgatcctgacgtaggaataaacggagttcaaaactacgaactaattaagagtcaaaacatttttggcctcgatgtcattgaaacaccagaaggagacaagatgccacaactgattgttcaaaaggagttagatagggaagagaaggatacctacgtgatgaaagtaaaggttgaagatggtggctttcctcaaagatccagtactgctattttgcaagtgagtgttactgatacaaatgacaaccacccagtctttaaggagacagagattgaagtcagtataccagaaaatgctcctgtaggcacttcagtgacacagctccatgccacagatgctgacataggtgaaaatgccaagatccacttctctttcagcaatctagtctccaacattgccaggagattatttcacctcaatgccaccactggacttatcacaatcaaagaaccactggatagggaagaaacaccaaaccacaagttactggttttggcaagtgatggtggattgatgccagcaagagcaatggtgctggtaaatgttacagatgtcaatgataatgtcccatccattgacataagatacatcgtcaatcctgtcaatgacacagttgttctttcagaaaatattccactcaacaccaaaattgctctcataactgtgacggataaggatgcggaccataatggcagggtgacatgcttcacagatcatgaaatccctttcagattaaggccagtattcagtaatcagttcctcctggagactgcagcatatcttgactatgagtccacaaaagaatatgccattaaattactggctgcagatgctggcaaacctcctttgaatcagtcagcaatgctcttcatcaaagtgaaagatgaaaatgacaatgctccagttttcacccagtctttcgtaactgtttctattcctgagaataactctcctggcatccagttgacgaaagtaagtgcaatggatgcagacagtgggcctaatgctaagatcaattacctgctaggccctgatgctccacctgaattcagcctggattgtcgtacaggcatgctgactgtagtgaagaaactagatagagaaaaagaggataaatatttattcacaattctggcaaaagataacggggtaccacccttaaccagcaatgtcacagtctttgtaagcattattgatcagaatgacaatagcccagttttcactcacaatgaatacaacttctatgtcccagaaaaccttccaaggcatggtacagtaggactaatcactgtaactgatcctgattatggagacaattctgcagttacgctctccattttagatgagaatgatgacttcaccattgattcacaaactggtgtcatccgaccaaatatttcatttgatagagaaaaacaagaatcttacactttctatgtaaaggctgaggatggtggtagagtatcacgttcttcaagtgccaaagtaaccataaatgtggttgatgtcaatgacaacaaaccagttttcattgtccctccttccaactgttcttatgaattggttctaccgtccactaatccaggcacagtggtctttcaggtaattgctgttgacaatgacactggcatgaatgcagaggttcgttacagcattgtaggaggaaacacaagagatctgtttgcaatcgaccaagaaacaggcaacataacattgatggagaaatgtgatgttacagaccttggtttacacagagtgttggtcaaagctaatgacttaggacagcctgattctctcttcagtgttgtaattgtcaatctgttcgtgaatgagtcggtgaccaatgctacactgattaatgaactggtgcgcaaaagcactgaagcaccagtgaccccaaatactgagatagctgatgtatcctcaccaactagtgactatgtcaagatcctggttgcagctgttgctggcaccataactgtcgttgtagttattttcatcactgctgtagtaagatgtcgccaggcaccacaccttaaggctgctcagaaaaacaagcagaattctgaatgggctaccccaaacccagaaaacaggcagatgataatgatgaagaaaaagaaaaagaagaagaagcattcccctaagaacttgctgcttaattttgtcactattgaagaaactaaggcagatgatgttgacagtgatggaaacagagtcacactagaccttcctattgatctagaagagcaaacaatgggaaagtacaattgggtaactacacctactactttcaagcccgacagccctgatttggcccgacactacaaatctgcctctccacagcctgccttccaaattcagcctgaaactcccctgaattcgaagcaccacatcatccaagaactgcctctcgataacacctttgtggcctgtgactctatctccaagtgttcctcaagcagttcagatccctacagcgtttctgactgtggctatccagtgacgaccttcgaggtacctgtgtccgtacacaccagaccgccaatgaaggaggttgtgcgatcttgcacccccatgaaagagtctacaactatggagatctggattcatccccaaccacagcggaaatctgaagggaaagtggcaggaaagtcccagcggcgtgtcacatttcacctgccagaaggctctcaggaaagcagcagtgatggtggactgggagaccatgatgcaggcagccttaccagcacatctcatggcctgccccttggctatcctcaggaggagtactttgatcgtgctacacccagcaatcgcactgaaggggatggcaactccgatcctgaatctactttcatacctggactaaagaaagctgcagaaataactgttcaaccaactgtggaagaggcctctgacaactgcactcaagaatgtctcatctatggccattctgatgcctgctggatgccggcatctctggatcattccagctcttcgcaagcacaggcctctgctctatgccacagcccaccactgtcacaggcctctactcagcaccacagcccacgagtgacacagaccattgctctctgccacagccctccagtgacacagaccatcgcattgtgccacagcccaccaccgatacaggtgtctgctctccaccacagtcctcctctagtgcaggctactgcacttcaccacagcccaccatcagcacaggcctcagccctctgctacagccctcctttagcacaggctgctgcaatcagccacagctctcctctgccacaggttattgccctccatcgtagtcaggcccaatcatcagtcagtttgcagcaaggttgggtgcaaggtgctgatgggctatgctctgttgatcagggagtgcaaggtagtgcaacatctcagttttacaccatgtctgaaagacttcatcccagtgatgattcaattaaagtcattcctttgacaaccttcactccacgccaacaggccagaccgtccagaggtgattcccccattatggaagaacatcccttgtaaagctaaaatagttacttcaaattttcagaaaagatgtatatagtcaaaatttaagatacaattccaatgagtattctgattatcagatttgtaaataactatgtaaatagaaacagataccagaataaatctacagctagacccttagtcaatagttaaccaaaaaattgcaatttgtttaattcagaatgtgtatttaaaaagaaaaggaatttaacaatttgcatccccttgtacagtaaggcttatcatgacagagcgcactatttctgatgtacagtattttttgttgtttttatcatcatgtgcaatattactgatttgtttccatgctgattgtgtggaaccagtatgtagcaaatggaaagcctagaaatatcttattttctaagtttacctttagtttacctaaacttttgttcagataacgttaaaaggtatacgtactctagcctttttttgggctttctttttgatttttgtttgttgttttcagtttttttgttgttgttagtgagtctcccttcaaaatacgcagtaggtagtgtaaatactgcttgtttgtgtctctctgctgtcatgttttctaccttattccaatactatattgttgataaaatttgtatatacattttcaataaagaatatgtataaactgtacagatctagatctacaacctatttctctactctttagtagagttcgagacacagaagtgcaataactgccctaattaagcaactatttgttaaaaagggcctctttttactttaatagtttagtgtaaagtacatcagaaataaagctgtatctgccattttaagcctgtagtccattattacttgggtctttacttctgggaatttgtatgtaacagcctagaaaattaaaaggaggtggatgcatccaaagcacgagtcacttaaaatatcgacggtaaactactattttgtagagaaactcaggaagatttaaatgttgatttgacagctcaataggctgttaccaaagggtgttcagtaaaaataacaaatacatgtaactgtagataaaaccatatactaaatctataagactaagggatttttgttattctagctcaacttactgaagaaaaccactaataacaacaagaatatcaggaaggaacttttcaagaaatgtaattataaatctacatcaaacagaattttaaggaaaaatgcagagggagaaataaggcacatgactgcttcttgcagtcaacaagaaataccaataacacacacagaacaaaaaccatcaaaatctcatatatgaaataaaatatattcttctaagcaaagaaacagtactattcatagaaaacattagttttcttctgttgtctgttatttccttcttgtatcctcttaactggccattatcttgtatgtgcacattttataaatgtacagaaacatcaccaacttaattttcttccatagcaaaactgagaaaataccttgtttcagtataacactaaaccaagagacaattgatgtttaatgggggcggttggggtgggggggggagtcaatatctcctattgattaacttagacatagattttgtaatgtataacttgatatttaatttatgattaaactgtgtgtaaattttgtaacataaactgtggtaattgcataatttcattggtgaggatttccactgaatattgagaaagtttcttttcatgtgcccagcaggttaagtagcgttttcagaatatacattattcccatccattgtaaagttccttaagtcatatttgactgggcgtgcagaataacttcttaacttttaactatcagagtttgattaataaaattaattaatgttttttctccttcgtgttgttaatgttccaagggatttggagcatactggttttccaggtgcatgtgaatcccgaaggactgatgatatttgaatgtttattaaattattatcatacaaatgtgttgatattgtggctattgttgatgttgaaaattttaaacttggggaagattaagaaaagaaccaatagtgacaaaaatcagtgcttccagtagattttagaacattctttgcctcaaaaaacctgcaaagatgatgtgagattttttcttgtgttttaattattttcacattttctctctgcaaaactttagttttctgatgatctacacacacacacacacacacacgtgcacacacacacacatttaaatgatataaaaagaagaggttgaaagattattaaataacttatcaggcatctcaatggttactatctatgttagtgaaaatcaaataggactcaaagttggatatttgggatttttcttctgacagtataatttattgagttactagggaggttcttaaatcctcatatctggaaacttgtgacgttttgacacctttcctatagatgatataggaatgaaccaatacgcttttattaccctttctaactctgattttataatcagacttagattgtgtttagaatattaaatgactgggcaccctcttcttggtttttaccagagaggctttgaatggaagcaggctgagagtagccaaagaggcaaggggtattagcccagttattctcccctatgccttccttctctttctaagcntccactaggtctggccttggaaacctgttacttctagggcttcagatctgatgatatctttttcatcacattacaagttatttctctgactgaatagacagtggtataggttgacacagcacacaagtggctattgtgatgtatgatgtatgtagtcctacaactgcaaaacgtcttactgaaccaacaatcaaaaaatggttctgttttaaaaaggattttgtttgatttgaaattaaaacttcaagctgaatgacttatatgagaataatacgttcaatcaaagtagttattctattttgtgtccatattccattagattgtgattattaattttctagctatggtattactatatcacacttgtgagtatgtattcaaatactaagtatcttatatgctacgtgcatacacattcttttcttaaactttacctgtgttttaactaatattgtgtcagtgtattaaaaattagcttttacatatgatatctacaatgtaataaatttagagagtaattttgtgtattcttatttacttaacattttacttttaattatgtaaatttggttagaaaataataataaatggttagtgctattgtgtaatggtagcagttacaaagagcctctgccttcccaaactaatatttatcacacatggtcattaaatgggaaaaaaatagactaaacaaatcacaaattgttcagttcttaaaatgtaattatgtcacacacacaaaaaatccttttcaatcctgagaaaattaaaggcgttttactcacatggctatttcaacattagttttttttgtttgtttctttttcatggtattactgaaggtgtgtatactccctaatacacatttatgaaaatctacttgtttaggcttttatttatactcttctgatttatattttttattataattattatttcttatctttcttcttttatattttttggaaaccaaatttatagttagtttaggtaaactttttattatgaccattagaaactattttgaatgcttccaactggctcaattggccgggaaaacatgggagcaagagaagctgaaatatatttctgcaagaacctttctatattatgtgccaattaccacaccagatcaattttatgcagaggccttaaaatattctttcacagtagctttcttacactaaccgtcatgtgcttttagtaaatatgatttttaaaagcagttcaagttgacaacagcagaaacagtaacaaaaaaatctgctcagaaaaatgtatgtgcacaaataaaaaaaattaatggcaattgtttagtgattgtaagtgatactttttaaagagtaaactgtgtgaaatttatactatccctgcttaaaatattaagatttttatgaaatatgtatttatgtttgtattgtgggaagattcctcctctgtgatatcatacagcatctgaaagtgaacagtatcccaaagcagttccaaccatgctttggaagtaagaaggttgactattgtatggccaaggatggcagtatgtaatccagaagcaaacttgtattaattgttctatttcaggttctgtattgcatgttttcttattaatatatattaataaaagttatgagaaataaaca

SEQ ID NO: 25529 - DNA, 4723 bp, Homo sapiens
cccctttctccccctcggttaagtccctccccctcgccattcaaaagggctggctcggcactggctccttgcagtcggcgaactgtcggggcgggaggagccgtgagcagtagctgcactcagctgcccgcgcggcaaagaggaaggcaagccaaacagagtgcgcagagtggcagtgccagcggcgacacaggcagcacaggcagcccgggctgcctgaatagcctcagaaacaacctcagcgactccggctgctctgcggactgcgagctgtggcggtagagcccgctacagcagtcgcagtctccgtggagcgggcggaagccttttttctccctttcgtttacctcttcattctactctaaaggcatcgttattaggaaaatcctgttgcgaataagaaggattccacagatcacataccggagaggttttgcctcagctgctctcaactttgtaatcttgtgaagaagctgacaagcttggctgattgcagagcactatgaggactgaacgacagtgggttttaattcagatatttcaagtgttgtgcgggttaatacaacaaactgtaacaagtgtacctggtatggacttgttgtccgggacgtacattttcgcggtcctgctagcatgcgtggtgttccactctggcgcccaggagaaaaactacaccatccgagaagaaatgccagaaaacgtcctgataggcgacttgttgaaagaccttaacttgtcgctgattccaaacaagtccttgacaactgctatgcagttcaagctagtgtacaagaccggagatgtgccactgattcgaattgaagaggatactggtgagatcttcactactggcgctcgcattgatcgtgagaaattatgtgctggtatcccaagggatgagcattgcttttatgaagtggaggttgccattttgccggatgaaatatttagactggttaagatacgttttctgatagaagatataaatgataatgcaccattgttcccagcaacagttatcaacatatcaattccagagaactcggctataaactctaaatatactctcccagcggctgttgatcctgacgtaggaataaacggagttcaaaactacgaactaattaagagtcaaaacatttttggcctcgatgtcattgaaacaccagaaggagacaagatgccacaactgattgttcaaaaggagttagatagggaagagaaggatacctacgtgatgaaagtaaaggttgaagatggtggctttcctcaaagatccagtactgctattttgcaagtgagtgttactgatacaaatgacaaccacccagtctttaaggagacagagattgaagtcagtataccagaaaatgctcctgtaggcacttcagtgacacagctccatgccacagatgctgacataggtgaaaatgccaagatccacttctctttcagcaatctagtctccaacattgccaggagattatttcacctcaatgccaccactggacttatcacaatcaaagaaccactggatagggaagaaacaccaaaccacaagttactggttttggcaagtgatggtggattgatgccagcaagagcaatggtgctggtaaatgttacagatgtcaatgataatgtcccatccattgacataagatacatcgtcaatcctgtcaatgacacagttgttctttcagaaaatattccactcaacaccaaaattgctctcataactgtgacggataaggatgcggaccataatggcagggtgacatgcttcacagatcatgaaatccctttcagattaaggccagtattcagtaatcagttcctcctggagactgcagcatatcttgactatgagtccacaaaagaatatgccattaaattactggctgcagatgctggcaaacctcctttgaatcagtcagcaatgctcttcatcaaagtgaaagatgaaaatgacaatgctccagttttcacccagtctttcgtaactgtttctattcctgagaataactctcctggcatccagttgacgaaagtaagtgcaatggatgcagacagtgggcctaatgctaagatcaattacctgctaggccctgatgctccacctgaattcagcctggattgtcgtacaggcatgctgactgtagtgaagaaactagatagagaaaaagaggataaatatttattcacaattctggcaaaagataacggggtaccacccttaaccagcaatgtcacagtctttgtaagcattattgatcagaatgacaatagcccagttttcactcacaatgaatacaacttctatgtcccagaaaaccttccaaggcatggtacagtaggactaatcactgtaactgatcctgattatggagacaattctgcagttacgctctccattttagatgagaatgatgacttcaccattgattcacaaactggtgtcatccgaccaaatatttcatttgatagagaaaaacaagaatcttacactttctatgtaaaggctgaggatggtggtagagtatcacgttcttcaagtgccaaagtaaccataaatgtggttgatgtcaatgacaacaaaccagttttcattgtccctccttccaactgttcttatgaattggttctaccgtccactaatccaggcacagtggtctttcaggtaattgctgttgacaatgacactggcatgaatgcagaggttcgttacagcattgtaggaggaaacacaagagatctgtttgcaatcgaccaagaaacaggcaacataacattgatggagaaatgtgatgttacagaccttggtttacacagagtgttggtcaaagctaatgacttaggacagcctgattctctcttcagtgttgtaattgtcaatctgttcgtgaatgagtcggtgaccaatgctacactgattaatgaactggtgcgcaaaagcactgaagcaccagtgaccccaaatactgagatagctgatgtatcctcaccaactagtgactatgtcaagatcctggttgcagctgttgctggcaccataactgtcgttgtagttattttcatcactgctgtagtaagatgtcgccaggcaccacaccttaaggctgctcagaaaaacaagcagaattctgaatgggctaccccaaacccagaaaacaggcagatgataatgatgaagaaaaagaaaaagaagaagaagcattcccctaagaacttgctgcttaattttgtcactattgaagaaactaaggcagatgatgttgacagtgatggaaacagagtcacactagaccttcctattgatctagaagagcaaacaatgggaaagtacaattgggtaactacacctactactttcaagcccgacagccctgatttggcccgacactacaaatctgcctctccacagcctgccttccaaattcagcctgaaactcccctgaattcgaagcaccacatcatccaagaactgcctctcgataacacctttgtggcctgtgactctatctccaagtgttcctcaagcagttcagatccctacagcgtttctgactgtggctatccagtgacgaccttcgaggtacctgtgtccgtacacaccagaccgactgattccaggacatcaactattgaaatctgcagtgagatataactttctaggaacaacaaaattccattccccttccaaaaaatttcaatgattgtgatttcaaaattaggctaagatcattaattttgtaatctagatttcccattataaaagcaagcaaaaatcatcttaaaaatgatgtcctagtgaaccttgtgctttctttagctgtaatctggcaatggaaatttaaaatttatggaagagacagtgcagcacaataacagagtactctcatgctgtttctctgtttgctctgaatcaacagccatgatgtaatataaggctgtcttggtgtatacacttatggttaatatatcagtcatgaaacatgcaattacttgccctgtctgattgttgaataattaaaacattatctccaggagtttggaagtgagctgaactagccaaactactctctgaaaggtatccagggcaagagacatttttaagaccccaaacaaacaaaaaacaaaaccaaaacactctggttcagtgttttgaaaatattcactaacataatattgctgagaaaatcatttttattacccaccactctgcttaaaagttgagtgggccgggcgcggtggctcacgcctgtaatcccagcactttgggaggccgaggcgggtggatcacgaggtcaggagattgagaccatcctggctaacacggtgaaaccccatctccactaaaaatacaaaaaattagcctggcgtggtggcgggcgcctgtagtcccagctactcgggaggctgaggcaggagaatagcgtgaacccgggaggcggagcttgcagtgagccgagatggcgccactgcactccagcctgggtgacagagcaagactctgtctcaaaaagaaaaaaatgttcaatgatagaaaataattttactaggtttttatgttgattgtactcatgctgttccactccttttaattattaaaaagttatttttggctgggtgtggtggctcacacctgtaatcccagcactttgggaggccgaggtgggtggatcacctgaggtcaggagttcaagaccagtctggccaacat

SEQ ID NO: 25530 - DNA, 8814 bp, Homo sapiens
  misc_feature (7174)..(7174): n is a, c, g, or t
cccctttctccccctcggttaagtccctccccctcgccattcaaaagggctggctcggcactggctccttgcagtcggcgaactgtcggggcgggaggagccgtgagcagtagctgcactcagctgcccgcgcggcaaagaggaaggcaagccaaacagagtgcgcagagtggcagtgccagcggcgacacaggcagcacaggcagcccgggctgcctgaatagcctcagaaacaacctcagcgactccggctgctctgcggactgcgagctgtggcggtagagcccgctacagcagtcgcagtctccgtggagcgggcggaagccttttttctccctttcgtttacctcttcattctactctaaaggcatcgttattaggaaaatcctgttgcgaataagaaggattccacagatcacataccggagaggttttgcctcagctgctctcaactttgtaatcttgtgaagaagctgacaagcttggctgattgcagagcactatgaggactgaacgacagtgggttttaattcagatatttcaagtgttgtgcgggttaatacaacaaactgtaacaagtgtacctggtatggacttgttgtccgggacgtacattttcgcggtcctgctagcatgcgtggtgttccactctggcgcccaggagaaaaactacaccatccgagaagaaatgccagaaaacgtcctgataggcgacttgttgaaagaccttaacttgtcgctgattccaaacaagtccttgacaactgctatgcagttcaagctagtgtacaagaccggagatgtgccactgattcgaattgaagaggatactggtgagatcttcactactggcgctcgcattgatcgtgagaaattatgtgctggtatcccaagggatgagcattgcttttatgaagtggaggttgccattttgccggatgaaatatttagactggttaagatacgttttctgatagaagatataaatgataatgcaccattgttcccagcaacagttatcaacatatcaattccagagaactcggctataaactctaaatatactctcccagcggctgttgatcctgacgtaggaataaacggagttcaaaactacgaactaattaagagtcaaaacatttttggcctcgatgtcattgaaacaccagaaggagacaagatgccacaactgattgttcaaaaggagttagatagggaagagaaggatacctacgtgatgaaagtaaaggttgaagatggtggctttcctcaaagatccagtactgctattttgcaagtgagtgttactgatacaaatgacaaccacccagtctttaaggagacagagattgaagtcagtataccagaaaatgctcctgtaggcacttcagtgacacagctccatgccacagatgctgacataggtgaaaatgccaagatccacttctctttcagcaatctagtctccaacattgccaggagattatttcacctcaatgccaccactggacttatcacaatcaaagaaccactggatagggaagaaacaccaaaccacaagttactggttttggcaagtgatggtggattgatgccagcaagagcaatggtgctggtaaatgttacagatgtcaatgataatgtcccatccattgacataagatacatcgtcaatcctgtcaatgacacagttgttctttcagaaaatattccactcaacaccaaaattgctctcataactgtgacggataaggatgcggaccataatggcagggtgacatgcttcacagatcatgaaatccctttcagattaaggccagtattcagtaatcagttcctcctggagactgcagcatatcttgactatgagtccacaaaagaatatgccattaaattactggctgcagatgctggcaaacctcctttgaatcagtcagcaatgctcttcatcaaagtgaaagatgaaaatgacaatgctccagttttcacccagtctttcgtaactgtttctattcctgagaataactctcctggcatccagttgacgaaagtaagtgcaatggatgcagacagtgggcctaatgctaagatcaattacctgctaggccctgatgctccacctgaattcagcctggattgtcgtacaggcatgctgactgtagtgaagaaactagatagagaaaaagaggataaatatttattcacaattctggcaaaagataacggggtaccacccttaaccagcaatgtcacagtctttgtaagcattattgatcagaatgacaatagcccagttttcactcacaatgaatacaacttctatgtcccagaaaaccttccaaggcatggtacagtaggactaatcactgtaactgatcctgattatggagacaattctgcagttacgctctccattttagatgagaatgatgacttcaccattgattcacaaactggtgtcatccgaccaaatatttcatttgatagagaaaaacaagaatcttacactttctatgtaaaggctgaggatggtggtagagtatcacgttcttcaagtgccaaagtaaccataaatgtggttgatgtcaatgacaacaaaccagttttcattgtccctccttccaactgttcttatgaattggttctaccgtccactaatccaggcacagtggtctttcaggtaattgctgttgacaatgacactggcatgaatgcagaggttcgttacagcattgtaggaggaaacacaagagatctgtttgcaatcgaccaagaaacaggcaacataacattgatggagaaatgtgatgttacagaccttggtttacacagagtgttggtcaaagctaatgacttaggacagcctgattctctcttcagtgttgtaattgtcaatctgttcgtgaatgagtcggtgaccaatgctacactgattaatgaactggtgcgcaaaagcactgaagcaccagtgaccccaaatactgagatagctgatgtatcctcaccaactagtgactatgtcaagatcctggttgcagctgttgctggcaccataactgtcgttgtagttattttcatcactgctgtagtaagatgtcgccaggcaccacaccttaaggctgctcagaaaaacaagcagaattctgaatgggctaccccaaacccagaaaacaggcagatgataatgatgaagaaaaagaaaaagaagaagaagcattcccctaagaacttgctgcttaattttgtcactattgaagaaactaaggcagatgatgttgacagtgatggaaacagagtcacactagaccttcctattgatctagaagagcaaacaatgggaaagtacaattgggtaactacacctactactttcaagcccgacagccctgatttggcccgacactacaaatctgcctctccacagcctgccttccaaattcagcctgaaactcccctgaattcgaagcaccacatcatccaagaactgcctctcgataacacctttgtggcctgtgactctatctccaagtgttcctcaagcagttcagatccctacagcgtttctgactgtggctatccagtgacgaccttcgaggtacctgtgtccgtacacaccagaccgtcccagcggcgtgtcacatttcacctgccagaaggctctcaggaaagcagcagtgatggtggactgggagaccatgatgcaggcagccttaccagcacatctcatggcctgccccttggctatcctcaggaggagtactttgatcgtgctacacccagcaatcgcactgaaggggatggcaactccgatcctgaatctactttcatacctggactaaagaaagctgcagaaataactgttcaaccaactgtggaagaggcctctgacaactgcactcaagaatgtctcatctatggccattctgatgcctgctggatgccggcatctctggatcattccagctcttcgcaagcacaggcctctgctctatgccacagcccaccactgtcacaggcctctactcagcaccacagcccacgagtgacacagaccattgctctctgccacagccctccagtgacacagaccatcgcattgtgccacagcccaccaccgatacaggtgtctgctctccaccacagtcctcctctagtgcaggctactgcacttcaccacagcccaccatcagcacaggcctcagccctctgctacagccctcctttagcacaggctgctgcaatcagccacagctctcctctgccacaggttattgccctccatcgtagtcaggcccaatcatcagtcagtttgcagcaaggttgggtgcaaggtgctgatgggctatgctctgttgatcagggagtgcaaggtagtgcaacatctcagttttacaccatgtctgaaagacttcatcccagtgatgattcaattaaagtcattcctttgacaaccttcactccacgccaacaggccagaccgtccagaggtgattcccccattatggaagaacatcccttgtaaagctaaaatagttacttcaaattttcagaaaagatgtatatagtcaaaatttaagatacaattccaatgagtattctgattatcagatttgtaaataactatgtaaatagaaacagataccagaataaatctacagctagacccttagtcaatagttaaccaaaaaattgcaatttgtttaattcagaatgtgtatttaaaaagaaaaggaatttaacaatttgcatccccttgtacagtaaggcttatcatgacagagcgcactatttctgatgtacagtattttttgttgtttttatcatcatgtgcaatattactgatttgtttccatgctgattgtgtggaaccagtatgtagcaaatggaaagcctagaaatatcttattttctaagtttacctttagtttacctaaacttttgttcagataacgttaaaaggtatacgtactctagcctttttttgggctttctttttgatttttgtttgttgttttcagtttttttgttgttgttagtgagtctcccttcaaaatacgcagtaggtagtgtaaatactgcttgtttgtgtctctctgctgtcatgttttctaccttattccaatactatattgttgataaaatttgtatatacattttcaataaagaatatgtataaactgtacagatctagatctacaacctatttctctactctttagtagagttcgagacacagaagtgcaataactgccctaattaagcaactatttgttaaaaagggcctctttttactttaatagtttagtgtaaagtacatcagaaataaagctgtatctgccattttaagcctgtagtccattattacttgggtctttacttctgggaatttgtatgtaacagcctagaaaattaaaaggaggtggatgcatccaaagcacgagtcacttaaaatatcgacggtaaactactattttgtagagaaactcaggaagatttaaatgttgatttgacagctcaataggctgttaccaaagggtgttcagtaaaaataacaaatacatgtaactgtagataaaaccatatactaaatctataagactaagggatttttgttattctagctcaacttactgaagaaaaccactaataacaacaagaatatcaggaaggaacttttcaagaaatgtaattataaatctacatcaaacagaattttaaggaaaaatgcagagggagaaataaggcacatgactgcttcttgcagtcaacaagaaataccaataacacacacagaacaaaaaccatcaaaatctcatatatgaaataaaatatattcttctaagcaaagaaacagtactattcatagaaaacattagttttcttctgttgtctgttatttccttcttgtatcctcttaactggccattatcttgtatgtgcacattttataaatgtacagaaacatcaccaacttaattttcttccatagcaaaactgagaaaataccttgtttcagtataacactaaaccaagagacaattgatgtttaatgggggcggttggggtgggggggggagtcaatatctcctattgattaacttagacatagattttgtaatgtataacttgatatttaatttatgattaaactgtgtgtaaattttgtaacataaactgtggtaattgcataatttcattggtgaggatttccactgaatattgagaaagtttcttttcatgtgcccagcaggttaagtagcgttttcagaatatacattattcccatccattgtaaagttccttaagtcatatttgactgggcgtgcagaataacttcttaacttttaactatcagagtttgattaataaaattaattaatgttttttctccttcgtgttgttaatgttccaagggatttggagcatactggttttccaggtgcatgtgaatcccgaaggactgatgatatttgaatgtttattaaattattatcatacaaatgtgttgatattgtggctattgttgatgttgaaaattttaaacttggggaagattaagaaaagaaccaatagtgacaaaaatcagtgcttccagtagattttagaacattctttgcctcaaaaaacctgcaaagatgatgtgagattttttcttgtgttttaattattttcacattttctctctgcaaaactttagttttctgatgatctacacacacacacacacacacacgtgcacacacacacacatttaaatgatataaaaagaagaggttgaaagattattaaataacttatcaggcatctcaatggttactatctatgttagtgaaaatcaaataggactcaaagttggatatttgggatttttcttctgacagtataatttattgagttactagggaggttcttaaatcctcatatctggaaacttgtgacgttttgacacctttcctatagatgatataggaatgaaccaatacgcttttattaccctttctaactctgattttataatcagacttagattgtgtttagaatattaaatgactgggcaccctcttcttggtttttaccagagaggctttgaatggaagcaggctgagagtagccaaagaggcaaggggtattagcccagttattctcccctatgccttccttctctttctaagcntccactaggtctggccttggaaacctgttacttctagggcttcagatctgatgatatctttttcatcacattacaagttatttctctgactgaatagacagtggtataggttgacacagcacacaagtggctattgtgatgtatgatgtatgtagtcctacaactgcaaaacgtcttactgaaccaacaatcaaaaaatggttctgttttaaaaaggattttgtttgatttgaaattaaaacttcaagctgaatgacttatatgagaataatacgttcaatcaaagtagttattctattttgtgtccatattccattagattgtgattattaattttctagctatggtattactatatcacacttgtgagtatgtattcaaatactaagtatcttatatgctacgtgcatacacattcttttcttaaactttacctgtgttttaactaatattgtgtcagtgtattaaaaattagcttttacatatgatatctacaatgtaataaatttagagagtaattttgtgtattcttatttacttaacattttacttttaattatgtaaatttggttagaaaataataataaatggttagtgctattgtgtaatggtagcagttacaaagagcctctgccttcccaaactaatatttatcacacatggtcattaaatgggaaaaaaatagactaaacaaatcacaaattgttcagttcttaaaatgtaattatgtcacacacacaaaaaatccttttcaatcctgagaaaattaaaggcgttttactcacatggctatttcaacattagttttttttgtttgtttctttttcatggtattactgaaggtgtgtatactccctaatacacatttatgaaaatctacttgtttaggcttttatttatactcttctgatttatattttttattataattattatttcttatctttcttcttttatattttttggaaaccaaatttatagttagtttaggtaaactttttattatgaccattagaaactattttgaatgcttccaactggctcaattggccgggaaaacatgggagcaagagaagctgaaatatatttctgcaagaacctttctatattatgtgccaattaccacaccagatcaattttatgcagaggccttaaaatattctttcacagtagctttcttacactaaccgtcatgtgcttttagtaaatatgatttttaaaagcagttcaagttgacaacagcagaaacagtaacaaaaaaatctgctcagaaaaatgtatgtgcacaaataaaaaaaattaatggcaattgtttagtgattgtaagtgatactttttaaagagtaaactgtgtgaaatttatactatccctgcttaaaatattaagatttttatgaaatatgtatttatgtttgtattgtgggaagattcctcctctgtgatatcatacagcatctgaaagtgaacagtatcccaaagcagttccaaccatgctttggaagtaagaaggttgactattgtatggccaaggatggcagtatgtaatccagaagcaaacttgtattaattgttctatttcaggttctgtattgcatgttttcttattaatatatattaataaaagttatgagaaataaaca

SEQ ID NO: 25531 - DNA, 9151 bp, Homo sapiens
  misc_feature (7511)..(7511): n is a, c, g, or t
ctggtggtccagtacctccaaagatatggaatacactcctgaaatatcctgaaaacttttttttttcagaatcctttaataagcagttatgtcaatctgaaagttgcttacttgtactttatattaatagctattcttgtttttcttatccaaagaaaaatcctctaatccccttttcacatgatagttgttaccatgtttaggcattagtcacatcaacccctctcctctcccaaacttctcttcttcaaatcaaactttattagtccctcctttataatgattccttgcctcgttttatccagatcaattttttttcactttgatgcccagagctgaagaaatggactactgtataaattattcattgccaagagaataattgcattttaaacccatattataacaaagaataatgattatattttgtgatttgtaacaaataccctttattttcccttaactattgaattaaatattttaattatttgtattctctttaactatcttggtatattaaagtattatcttttatatatttatcaatggtggacacttttataggtactctgtgtcatttttgatactgtaggtatcttatttcatttatctttattcttaatgtacgaattcataatatttgattcagaacaaatttatcactaattaacagagtgtcaattatgctaacatctcatttactgattttaatttaaaacagtttttgttaacatgcatgtttagggttggcttcttaataatttcttcttcctcttctctctctcctcttcttttggtcagtgttgtgcgggttaatacaacaaactgtaacaagtgtacctggtatggacttgttgtccgggacgtacattttcgcggtcctgctagcatgcgtggtgttccactctggcgcccaggagaaaaactacaccatccgagaagaaatgccagaaaacgtcctgataggcgacttgttgaaagaccttaacttgtcgctgattccaaacaagtccttgacaactgctatgcagttcaagctagtgtacaagaccggagatgtgccactgattcgaattgaagaggatactggtgagatcttcactactggcgctcgcattgatcgtgagaaattatgtgctggtatcccaagggatgagcattgcttttatgaagtggaggttgccattttgccggatgaaatatttagactggttaagatacgttttctgatagaagatataaatgataatgcaccattgttcccagcaacagttatcaacatatcaattccagagaactcggctataaactctaaatatactctcccagcggctgttgatcctgacgtaggaataaacggagttcaaaactacgaactaattaagagtcaaaacatttttggcctcgatgtcattgaaacaccagaaggagacaagatgccacaactgattgttcaaaaggagttagatagggaagagaaggatacctacgtgatgaaagtaaaggttgaagatggtggctttcctcaaagatccagtactgctattttgcaagtgagtgttactgatacaaatgacaaccacccagtctttaaggagacagagattgaagtcagtataccagaaaatgctcctgtaggcacttcagtgacacagctccatgccacagatgctgacataggtgaaaatgccaagatccacttctctttcagcaatctagtctccaacattgccaggagattatttcacctcaatgccaccactggacttatcacaatcaaagaaccactggatagggaagaaacaccaaaccacaagttactggttttggcaagtgatggtggattgatgccagcaagagcaatggtgctggtaaatgttacagatgtcaatgataatgtcccatccattgacataagatacatcgtcaatcctgtcaatgacacagttgttctttcagaaaatattccactcaacaccaaaattgctctcataactgtgacggataaggatgcggaccataatggcagggtgacatgcttcacagatcatgaaatccctttcagattaaggccagtattcagtaatcagttcctcctggagactgcagcatatcttgactatgagtccacaaaagaatatgccattaaattactggctgcagatgctggcaaacctcctttgaatcagtcagcaatgctcttcatcaaagtgaaagatgaaaatgacaatgctccagttttcacccagtctttcgtaactgtttctattcctgagaataactctcctggcatccagttgacgaaagtaagtgcaatggatgcagacagtgggcctaatgctaagatcaattacctgctaggccctgatgctccacctgaattcagcctggattgtcgtacaggcatgctgactgtagtgaagaaactagatagagaaaaagaggataaatatttattcacaattctggcaaaagataacggggtaccacccttaaccagcaatgtcacagtctttgtaagcattattgatcagaatgacaatagcccagttttcactcacaatgaatacaacttctatgtcccagaaaaccttccaaggcatggtacagtaggactaatcactgtaactgatcctgattatggagacaattctgcagttacgctctccattttagatgagaatgatgacttcaccattgattcacaaactggtgtcatccgaccaaatatttcatttgatagagaaaaacaagaatcttacactttctatgtaaaggctgaggatggtggtagagtatcacgttcttcaagtgccaaagtaaccataaatgtggttgatgtcaatgacaacaaaccagttttcattgtccctccttccaactgttcttatgaattggttctaccgtccactaatccaggcacagtggtctttcaggtaattgctgttgacaatgacactggcatgaatgcagaggttcgttacagcattgtaggaggaaacacaagagatctgtttgcaatcgaccaagaaacaggcaacataacattgatggagaaatgtgatgttacagaccttggtttacacagagtgttggtcaaagctaatgacttaggacagcctgattctctcttcagtgttgtaattgtcaatctgttcgtgaatgagtcggtgaccaatgctacactgattaatgaactggtgcgcaaaagcactgaagcaccagtgaccccaaatactgagatagctgatgtatcctcaccaactagtgactatgtcaagatcctggttgcagctgttgctggcaccataactgtcgttgtagttattttcatcactgctgtagtaagatgtcgccaggcaccacaccttaaggctgctcagaaaaacaagcagaattctgaatgggctaccccaaacccagaaaacaggcagatgataatgatgaagaaaaagaaaaagaagaagaagcattcccctaagaacttgctgcttaattttgtcactattgaagaaactaaggcagatgatgttgacagtgatggaaacagagtcacactagaccttcctattgatctagaagagcaaacaatgggaaagtacaattgggtaactacacctactactttcaagcccgacagccctgatttggcccgacactacaaatctgcctctccacagcctgccttccaaattcagcctgaaactcccctgaattcgaagcaccacatcatccaagaactgcctctcgataacacctttgtggcctgtgactctatctccaagtgttcctcaagcagttcagatccctacagcgtttctgactgtggctatccagtgacgaccttcgaggtacctgtgtccgtacacaccagaccgccaatgaaggaggttgtgcgatcttgcacccccatgaaagagtctacaactatggagatctggattcatccccaaccacagtcccagcggcgtgtcacatttcacctgccagaaggctctcaggaaagcagcagtgatggtggactgggagaccatgatgcaggcagccttaccagcacatctcatggcctgccccttggctatcctcaggaggagtactttgatcgtgctacacccagcaatcgcactgaaggggatggcaactccgatcctgaatctactttcatacctggactaaagaaagctgcagaaataactgttcaaccaactgtggaagaggcctctgacaactgcactcaagaatgtctcatctatggccattctgatgcctgctggatgccggcatctctggatcattccagctcttcgcaagcacaggcctctgctctatgccacagcccaccactgtcacaggcctctactcagcaccacagcccacgagtgacacagaccattgctctctgccacagccctccagtgacacagaccatcgcattgtgccacagcccaccaccgatacaggtgtctgctctccaccacagtcctcctctagtgcaggctactgcacttcaccacagcccaccatcagcacaggcctcagccctctgctacagccctcctttagcacaggctgctgcaatcagccacagctctcctctgccacaggttattgccctccatcgtagtcaggcccaatcatcagtcagtttgcagcaaggttgggtgcaaggtgctgatgggctatgctctgttgatcagggagtgcaaggtagtgcaacatctcagttttacaccatgtctgaaagacttcatcccagtgatgattcaattaaagtcattcctttgacaaccttcactccacgccaacaggccagaccgtccagaggtgattcccccattatggaagaacatcccttgtaaagctaaaatagttacttcaaattttcagaaaagatgtatatagtcaaaatttaagatacaattccaatgagtattctgattatcagatttgtaaataactatgtaaatagaaacagataccagaataaatctacagctagacccttagtcaatagttaaccaaaaaattgcaatttgtttaattcagaatgtgtatttaaaaagaaaaggaatttaacaatttgcatccccttgtacagtaaggcttatcatgacagagcgcactatttctgatgtacagtattttttgttgtttttatcatcatgtgcaatattactgatttgtttccatgctgattgtgtggaaccagtatgtagcaaatggaaagcctagaaatatcttattttctaagtttacctttagtttacctaaacttttgttcagataacgttaaaaggtatacgtactctagcctttttttgggctttctttttgatttttgtttgttgttttcagtttttttgttgttgttagtgagtctcccttcaaaatacgcagtaggtagtgtaaatactgcttgtttgtgtctctctgctgtcatgttttctaccttattccaatactatattgttgataaaatttgtatatacattttcaataaagaatatgtataaactgtacagatctagatctacaacctatttctctactctttagtagagttcgagacacagaagtgcaataactgccctaattaagcaactatttgttaaaaagggcctctttttactttaatagtttagtgtaaagtacatcagaaataaagctgtatctgccattttaagcctgtagtccattattacttgggtctttacttctgggaatttgtatgtaacagcctagaaaattaaaaggaggtggatgcatccaaagcacgagtcacttaaaatatcgacggtaaactactattttgtagagaaactcaggaagatttaaatgttgatttgacagctcaataggctgttaccaaagggtgttcagtaaaaataacaaatacatgtaactgtagataaaaccatatactaaatctataagactaagggatttttgttattctagctcaacttactgaagaaaaccactaataacaacaagaatatcaggaaggaacttttcaagaaatgtaattataaatctacatcaaacagaattttaaggaaaaatgcagagggagaaataaggcacatgactgcttcttgcagtcaacaagaaataccaataacacacacagaacaaaaaccatcaaaatctcatatatgaaataaaatatattcttctaagcaaagaaacagtactattcatagaaaacattagttttcttctgttgtctgttatttccttcttgtatcctcttaactggccattatcttgtatgtgcacattttataaatgtacagaaacatcaccaacttaattttcttccatagcaaaactgagaaaataccttgtttcagtataacactaaaccaagagacaattgatgtttaatgggggcggttggggtgggggggggagtcaatatctcctattgattaacttagacatagattttgtaatgtataacttgatatttaatttatgattaaactgtgtgtaaattttgtaacataaactgtggtaattgcataatttcattggtgaggatttccactgaatattgagaaagtttcttttcatgtgcccagcaggttaagtagcgttttcagaatatacattattcccatccattgtaaagttccttaagtcatatttgactgggcgtgcagaataacttcttaacttttaactatcagagtttgattaataaaattaattaatgttttttctccttcgtgttgttaatgttccaagggatttggagcatactggttttccaggtgcatgtgaatcccgaaggactgatgatatttgaatgtttattaaattattatcatacaaatgtgttgatattgtggctattgttgatgttgaaaattttaaacttggggaagattaagaaaagaaccaatagtgacaaaaatcagtgcttccagtagattttagaacattctttgcctcaaaaaacctgcaaagatgatgtgagattttttcttgtgttttaattattttcacattttctctctgcaaaactttagttttctgatgatctacacacacacacacacacacacgtgcacacacacacacatttaaatgatataaaaagaagaggttgaaagattattaaataacttatcaggcatctcaatggttactatctatgttagtgaaaatcaaataggactcaaagttggatatttgggatttttcttctgacagtataatttattgagttactagggaggttcttaaatcctcatatctggaaacttgtgacgttttgacacctttcctatagatgatataggaatgaaccaatacgcttttattaccctttctaactctgattttataatcagacttagattgtgtttagaatattaaatgactgggcaccctcttcttggtttttaccagagaggctttgaatggaagcaggctgagagtagccaaagaggcaaggggtattagcccagttattctcccctatgccttccttctctttctaagcntccactaggtctggccttggaaacctgttacttctagggcttcagatctgatgatatctttttcatcacattacaagttatttctctgactgaatagacagtggtataggttgacacagcacacaagtggctattgtgatgtatgatgtatgtagtcctacaactgcaaaacgtcttactgaaccaacaatcaaaaaatggttctgttttaaaaaggattttgtttgatttgaaattaaaacttcaagctgaatgacttatatgagaataatacgttcaatcaaagtagttattctattttgtgtccatattccattagattgtgattattaattttctagctatggtattactatatcacacttgtgagtatgtattcaaatactaagtatcttatatgctacgtgcatacacattcttttcttaaactttacctgtgttttaactaatattgtgtcagtgtattaaaaattagcttttacatatgatatctacaatgtaataaatttagagagtaattttgtgtattcttatttacttaacattttacttttaattatgtaaatttggttagaaaataataataaatggttagtgctattgtgtaatggtagcagttacaaagagcctctgccttcccaaactaatatttatcacacatggtcattaaatgggaaaaaaatagactaaacaaatcacaaattgttcagttcttaaaatgtaattatgtcacacacacaaaaaatccttttcaatcctgagaaaattaaaggcgttttactcacatggctatttcaacattagttttttttgtttgtttctttttcatggtattactgaaggtgtgtatactccctaatacacatttatgaaaatctacttgtttaggcttttatttatactcttctgatttatattttttattataattattatttcttatctttcttcttttatattttttggaaaccaaatttatagttagtttaggtaaactttttattatgaccattagaaactattttgaatgcttccaactggctcaattggccgggaaaacatgggagcaagagaagctgaaatatatttctgcaagaacctttctatattatgtgccaattaccacaccagatcaattttatgcagaggccttaaaatattctttcacagtagctttcttacactaaccgtcatgtgcttttagtaaatatgatttttaaaagcagttcaagttgacaacagcagaaacagtaacaaaaaaatctgctcagaaaaatgtatgtgcacaaataaaaaaaattaatggcaattgtttagtgattgtaagtgatactttttaaagagtaaactgtgtgaaatttatactatccctgcttaaaatattaagatttttatgaaatatgtatttatgtttgtattgtgggaagattcctcctctgtgatatcatacagcatctgaaagtgaacagtatcccaaagcagttccaaccatgctttggaagtaagaaggttgactattgtatggccaaggatggcagtatgtaatccagaagcaaacttgtattaattgttctatttcaggttctgtattgcatgttttcttattaatatatattaataaaagttatgagaaataaaca

SEQ ID NO: 25532 - DNA, 4603 bp, Homo sapiens
ctggtggtccagtacctccaaagatatggaatacactcctgaaatatcctgaaaacttttttttttcagaatcctttaataagcagttatgtcaatctgaaagttgcttacttgtactttatattaatagctattcttgtttttcttatccaaagaaaaatcctctaatccccttttcacatgatagttgttaccatgtttaggcattagtcacatcaacccctctcctctcccaaacttctcttcttcaaatcaaactttattagtccctcctttataatgattccttgcctcgttttatccagatcaattttttttcactttgatgcccagagctgaagaaatggactactgtataaattattcattgccaagagaataattgcattttaaacccatattataacaaagaataatgattatattttgtgatttgtaacaaataccctttattttcccttaactattgaattaaatattttaattatttgtattctctttaactatcttggtatattaaagtattatcttttatatatttatcaatggtggacacttttataggtactctgtgtcatttttgatactgtaggtatcttatttcatttatctttattcttaatgtacgaattcataatatttgattcagaacaaatttatcactaattaacagagtgtcaattatgctaacatctcatttactgattttaatttaaaacagtttttgttaacatgcatgtttagggttggcttcttaataatttcttcttcctcttctctctctcctcttcttttggtcagtgttgtgcgggttaatacaacaaactgtaacaagtgtacctggtatggacttgttgtccgggacgtacattttcgcggtcctgctagcatgcgtggtgttccactctggcgcccaggagaaaaactacaccatccgagaagaaatgccagaaaacgtcctgataggcgacttgttgaaagaccttaacttgtcgctgattccaaacaagtccttgacaactgctatgcagttcaagctagtgtacaagaccggagatgtgccactgattcgaattgaagaggatactggtgagatcttcactactggcgctcgcattgatcgtgagaaattatgtgctggtatcccaagggatgagcattgcttttatgaagtggaggttgccattttgccggatgaaatatttagactggttaagatacgttttctgatagaagatataaatgataatgcaccattgttcccagcaacagttatcaacatatcaattccagagaactcggctataaactctaaatatactctcccagcggctgttgatcctgacgtaggaataaacggagttcaaaactacgaactaattaagagtcaaaacatttttggcctcgatgtcattgaaacaccagaaggagacaagatgccacaactgattgttcaaaaggagttagatagggaagagaaggatacctacgtgatgaaagtaaaggttgaagatggtggctttcctcaaagatccagtactgctattttgcaagtgagtgttactgatacaaatgacaaccacccagtctttaaggagacagagattgaagtcagtataccagaaaatgctcctgtaggcacttcagtgacacagctccatgccacagatgctgacataggtgaaaatgccaagatccacttctctttcagcaatctagtctccaacattgccaggagattatttcacctcaatgccaccactggacttatcacaatcaaagaaccactggatagggaagaaacaccaaaccacaagttactggttttggcaagtgatggtggattgatgccagcaagagcaatggtgctggtaaatgttacagatgtcaatgataatgtcccatccattgacataagatacatcgtcaatcctgtcaatgacacagttgttctttcagaaaatattccactcaacaccaaaattgctctcataactgtgacggataaggatgcggaccataatggcagggtgacatgcttcacagatcatgaaatccctttcagattaaggccagtattcagtaatcagttcctcctggagactgcagcatatcttgactatgagtccacaaaagaatatgccattaaattactggctgcagatgctggcaaacctcctttgaatcagtcagcaatgctcttcatcaaagtgaaagatgaaaatgacaatgctccagttttcacccagtctttcgtaactgtttctattcctgagaataactctcctggcatccagttgacgaaagtaagtgcaatggatgcagacagtgggcctaatgctaagatcaattacctgctaggccctgatgctccacctgaattcagcctggattgtcgtacaggcatgctgactgtagtgaagaaactagatagagaaaaagaggataaatatttattcacaattctggcaaaagataacggggtaccacccttaaccagcaatgtcacagtctttgtaagcattattgatcagaatgacaatagcccagttttcactcacaatgaatacaacttctatgtcccagaaaaccttccaaggcatggtacagtaggactaatcactgtaactgatcctgattatggagacaattctgcagttacgctctccattttagatgagaatgatgacttcaccattgattcacaaactggtgtcatccgaccaaatatttcatttgatagagaaaaacaagaatcttacactttctatgtaaaggctgaggatggtggtagagtatcacgttcttcaagtgccaaagtaaccataaatgtggttgatgtcaatgacaacaaaccagttttcattgtccctccttccaactgttcttatgaattggttctaccgtccactaatccaggcacagtggtctttcaggtaattgctgttgacaatgacactggcatgaatgcagaggttcgttacagcattgtaggaggaaacacaagagatctgtttgcaatcgaccaagaaacaggcaacataacattgatggagaaatgtgatgttacagaccttggtttacacagagtgttggtcaaagctaatgacttaggacagcctgattctctcttcagtgttgtaattgtcaatctgttcgtgaatgagtcggtgaccaatgctacactgattaatgaactggtgcgcaaaagcactgaagcaccagtgaccccaaatactgagatagctgatgtatcctcaccaactagtgactatgtcaagatcctggttgcagctgttgctggcaccataactgtcgttgtagttattttcatcactgctgtagtaagatgtcgccaggcaccacaccttaaggctgctcagaaaaacaagcagaattctgaatgggctaccccaaacccagaaaacaggcagatgataatgatgaagaaaaagaaaaagaagaagaagcattcccctaagaacttgctgcttaattttgtcactattgaagaaactaaggcagatgatgttgacagtgatggaaacagagtcacactagaccttcctattgatctagaagagcaaacaatgggaaagtacaattgggtaactacacctactactttcaagcccgacagccctgatttggcccgacactacaaatctgcctctccacagcctgccttccaaattcagcctgaaactcccctgaattcgaagcaccacatcatccaagaactgcctctcgataacacctttgtggcctgtgactctatctccaagtgttcctcaagcagttcagatccctacagcgtttctgactgtggctatccagtgacgaccttcgaggtacctgtgtccgtacacaccagaccggtaggtatccaagtttctaacacaactttctaactatttttttattattattttcagttgatgtagaactttacaaaatctattgacttcaaagagggatcaaaacaatcatattctacagatgtacccaatagatatatggattcaattaagtttggtagaagatgagaacaaaataactactgatttaggaaaattggatgcagaataataattatagtaggggcaattttgtctgtagatggcagtatgacaattcttgctagagaatatattgaaaaaaacttcaacacaaagggttgtagcactgtcctcagtaccattgtgtgcatgaggatcagaatagtctgggctagatacatcacattaaagcttttcagaatctgataaatagctctaaatactaatgatattgagaagcctagcttcacttgggaaaatctgtggctgttcacagaaattcagcaccaagttattccccccatactctaccaggccttcaggtcctcataaagaaaagtgtcgttttcagattaggaactcaaaattattttggtgcatcaaatctacagtcacacaatataacaagaatgggattagaaaaatgaaagcctactcattctcatctttaagccagagaatgaaatatatatgaggtctctggatagctatttaaatatttgcatatttatgcaaggtattttgagcccttcagaagacattct

SEQ ID NO: 25533 - DNA, 527 bp, Homo sapiens
caaaattgaaaaacttgtttgttgctccccgaaacgagtatccacccatcttgttgaaacctgtactcctcacgtttatggcatatcactgaattggaaacaattttccttctggtatatatcattcagcttaactctgtatcaatcctttgacgtgttaataaactatccagagccacctaatttatgaagaatattgaagatccacataatcatgttaaaccttgttatgagcagtactgtagtgggaagttgggcttgcagtcagagcgaatacacctgaatttagttccagcaataaatcttaacctctttgagcttcgggtttttttttttcagctgtaaaatagggttaaaggatggttttatattatgtatgggaaagatgtcagagcagaagggtattattaaagagatcccagtaaataatacatggaaatttaattctccaaatagttcttgaggtgaaatatttaacatttggttactatttgctttttctcttaaaatgccattttaattctcta

SEQ ID NO: 25534 - DNA, 747 bp, Homo sapiens
  misc_feature (747)..(747): n is a, c, g, or t
tacactgttcttttgtgcttgcaagatactacctaaactagccatttaattatatttaatcacaagaattattagctgctggattttacagctattttaatgctcttaattctgatctcttttttttttcattctacccttttttctttatttgggaactcacaaaaaaaacaggtctaaaagaatgacttaagaatataaggttggtttttaaaattctcttttaaggttattaaaaatttcgtctaaggctactgagaactattgagttccttggagataggtgccaaatctaaatccagttaatatattcattgatttcttaatgactgtagcaagtaggatgtcagtcaaaactgaaaggtattagaaaattatttgaaaggttatggttaattttaatttgagaggggtaaggggggaaaggagctgtcatatcaaaaaaaaaaaaaaaagcaaaaaaaaaaattgtggggggctggcccaaaaattttaaaaccaattccggtgtgggcgcgcgggggccccaagtatcggtacctgtgaacggtcgccatgagggggtgcccaaagaaaaccggggccaaggacacacgcgctgggggttcctccaccaaataaaaaacggccgggggggaacccggcgcggtctgtgcacaaaactacagaagggagctcgagggcacacggggactcttatcaagagggagccaaaggacacgagaataaattaccccgggcagtgan

SEQ ID NO: 25535 - DNA, 497 bp, Homo sapiens
tgctataataaaataccctacaggttctgtaaggcatttctaaactgtaaatgcttgaaacgcaagttggacattttctatactatgtgtaaaatgccaggttatacctctattttctttcttcctaatggtcattgaaatgagcttgtttctctacattgagcaagctacattttattttaaatgagtcaggtgcatgttcagatgtctgtattcccaatacattgcatgcagcctgagcacaagtatgccttcaccctctggctcttttcctgacaccaaacagagaagtccacagctacaagcacaaggggcttgacaggtaggccttgttttattatgaacaaattcaccagaaaaccattcttgaggaaccagccactcccatagcatttttagtcttagggaagaaaattggcagggaagaaaaattggcagacaatgggaaagaggtttggtcaacctgcataagtggaataaagtcattgaagtacttg

SEQ ID NO: 25536 - DNA, 477 bp, Homo sapiens
tgaagacagggtcttgctctgttgcctggtctggagtgcagtgacacaatcagggtttgctgcagcctcagcctcccaggctcaagcatccttctgcctcaggctcccaagtagctgggactacaggcacatgacaccatgcccagctaatatttttactttttgtagagatggggtcttactatgttgtccaagctagcttcaaactcccaggctcaagcaatcctcctcccttggcctcccaaagcactgggattatagatatgtgccaccatgccaggcctaagaatgtattcttaaaataggtatggtctcatttgtacaactaaaacttattaaaacatatgcagtagtataattttatcataggaagtataatgtagagtataacaacacaggtttcttgcactggaatcccagttcaatatttatgattgctgtgacaagttacctaaactcacaagttacctaaactct

SEQ ID NO: 25537 - DNA, 484 bp, Homo sapiens
gtgacagagcaagactccatctcaaaaaaaaaaaaaaaaaaaaaaaaactgtgatcttgtaggtctaaggttgagtctgaggagctgtatttattataataagccccacctgttgaggatggatgctgctggtctgaagaccatactttgagtagcaaggggccagtatagacaataacagccatcggagttcaaaggagagaaatgaatatggtctggccttgagacctctctcaaacctaaccatgtcttctagtaatacgaatcctgtcttaatctgcttaggatacaccttaaacaaattaagtcatgatttcatacacaggtatatatcggatggagggtttggtttcagaccactgcaataaagcgagtcacacaaatattttggtttcctagtgcatataaagtcatgtttatattgtagtctactaagtgtgcaatagcattatgcctaacaacatgtagaaaacttctttattgt

SEQ ID NO: 25538 - DNA, 282 bp, Homo sapiens
gaacagctcgtctgcaggaggtggcaggaaggccagcctggcttggactgagatccggagagagcactcaagatgaccaaaggaacttaagaattaggagaatgtgagttctttgagggcagcagggattgttcgctgctgcgtcaccagctttccatctgtctgtgaagtgaagctcttctagaagttttctagagattgattccaggcagtctgtgatttctaaatctagcctctctctaccaccacatcggggcctttgccctcaacagccctttttgg

SEQ ID NO: 25539 - DNA, 211 bp, Homo sapiens
gttcttcatttctcatttactactttttgtgtttaattgcttttttgtgtagacatgctttgactcccttcttttatttacttcttttgtttgtttgtttatgatggagtctcactctgtcgccaaggctacagttcagtggtacgatcttggctcaccgcagccagctccgcctctcgggttcaaatgtttcttgtgccccagtggctca

SEQ ID NO: 25540 - DNA, 755 bp, Homo sapiens
agacctaaccccacactcattttatattgtgtttggttgtgagttacatgattgctgcaggcaccatatttatttctgtgctccaggtctctaaaggtcctaatccagtcctgaccaaacagactagtgatggaccatcgtgagcttctctcaggagaaatatcaagagggaggccaacctgtaatcataagaacttctgctattttaatgccattcatcagactacagtcaatcaccatgcttctggctttttgtctatctctgctgtcttgtacatcctgagatagtccattctgagaactgtaccctagatcttgtattgcctgatgcctgtcaaagatgtaatccatgctgcttaagtgaggttgtgcacacaaatcaccatatctcctgcaagtttggattttgattcagtagttcgatggtggggtttgagattctgcatttctaataagctcccagatgtggctggtgctgctggtccatgaaacacactttgagtagcaagaggtgatctgtagctcagtattggtcctttaagttccctcaaacatatatagagaaaaggtcctaaatattgcaaattctctcaaagtttgtcaagctatattggaattctctcaaagtctgtcaagctctattgtagaaaatcaaatttttattgggaaaaagcctaccccatatttacttacagataaagtacttttaggatcattcaaggcacacacccataacactgagtatgtaagacaga

SEQ ID NO: 25541 - DNA, 468 bp, Homo sapiens
cataaaagaatatgttaactatattaactcatcaaaaataattggtattgtaagaattaaagaaagaggaaacatgaaagtttctttcgaaagggggtgaagattggcagttaacaaagagactttccccccacctccctctgtgccttagctgtcttatctgtgttttactgtctgctctttctggctgcttgtagttagaagagaagtgatttccttgaaatgcatgaggctagaatgggagctggaactgaaagtggcagtgtttgtctgagatgatggtgctcctgctctgtcattctaggccctatagttataaaaggatgaggggcgatgtgttctttctggttacttcctgctgatgggggtgtggagagtttcttggtctcagattgcctgcaggagcaacactgtgtgtagatgttttgaggcagttgtctgcgaaatggccatgattctgtcagttaa

SEQ ID NO: 25542 - DNA, 766 bp, Homo sapiens
  misc_feature (52)..(52): n is a, c, g, or t
ggaggggagggaggggaggggagaggtgggaatggaggatggaaggccgtanggaagtgacgcgccccattgtgttggcacccgcgaattcggccattatggccgggcaggcatactttggagatagttttggttttagaccaccaccataaagcaaatattgccataaagcaagtcacacaaattttgtggttactgagtgcatataaaagctttgttggctgggcgtggtggctcacgctatatcccagcactttgggaggccaaggcaggcagatcaccagaggttgggagttcgagatcagcctggctaacatggtgaaaccccatctctactaaatatacaaaattagctgggtgtggtggctcccacctgtaatcccagctactcgggtggctgaggcaggagaatcgcttgaagccaggaggtggaggttgcagtgagctgggattgcatcactgcactccagtctgggcgacagagtgagatttggtctccaaaaaaaaaaaaggtaggggtaaagcatgggggcgtgatttgaggctcacttgggaaattggccctagagggagagtcggatgacaaattaagtggcgcgtaggttggcaacgtggtggactgagagaaccctaggtgttaccgatgttaataggggaggagaggagaggcccgcttttggccagaggggctatataaagcaaagaggcccctgacagaataggccgttgcgaaagagtgggggaggccgagatgggtggaatggaa

SEQ ID NO: 25543 - DNA, 820 bp, Homo sapiens
gaagggcgaagcgatgtcagaaataatagaaaaggctttttcctttgaaatatctaaacgttcaaagatgggaacagccgcaggggggagaatactgtgctatgcaagttgatctgattttgtggaccatccatttccaattgggaagctcacttactttcaacttgaagcatcagaaaaccagacttacagcagcttcagcctataggggtttatttttctcatgtaacaagaagaacagaagtggacagaggccgagttctcaaggactcagtttctttctgtcccaccaaccttaccatgttggattgtcatctttgtgcttgttgcctcatgatggcaagatggctgcagcacctctgggactcacgactgatttttaagactacagagcctaagtcaaagcttgttcttggacccaggaaatatgtcaaatccttccagtgaatggtgcctttcaggattggagactactcccccagttgctgatggtgtggtcagccctcagttttcagtcctctttgggaattgccttggatgaagaaagtcacctcacccaagatcactccaactcctgggacccacatccaatgattggccaatatggggactcaaaggcctggtcccccttccccaacttgagactactctgaaggatcacccagcttcagagcttcccatggttgagacttttagacttcactgtggtccaaccaatctcttcctatacacggtcctgactccttcacttccctcccagcacttcttctgtgttaatatcaaacttctgtgctaataacaaacttcttccgtgctaata

SEQ ID NO: 25544 - DNA, 477 bp, Homo sapiens
atctaaatcagctcatactttattttctctcacatttacagactacagagcctaagtcaaagcttgttcttggacccaggaaatatgtcaaatccttccagtgaatggtgcctttcaggattggagactactcccccagttgctgatggtgtggtcagccctcagttttcagtcctctttgggaattgccttggatgaagaaagtcacctcacccaagatcactccaactcctgggacccacatccaatgattggccaatatggggactcaaaggcctggtcccccttccccaacttgagactactctgaaggatcacccagcttcagagcttcccatggttgagacttttagacttcactgtggtccaaccaatctcttcctatacacggtcctgactccttcacttccctcccagcacttcttctgtgttaatatcaaacttctgtgctaataacaaacttcttccgtgctaata

SEQ ID NO: 25545 - DNA, 769 bp, Homo sapiens
gaagggcgaagcgatgtcagaaataatagaaaaggctttttcctttgaaatatctaaacgttcaaagatgggaacagccgcaggggggagaatactgtgctatgcaagttgatctgattttgtggaccatccatttccaattgggaagctcacttactttcaacttgaagcatcagaaaaccagacttacagcagcttcagcctataggggtttatttttctcatgtaacaagaagaacagaagtggacagaggccgagttctcaaggactcagtttctttctgtcccaccaaccttaccatgttggattgtcatctttgtgcttgttgcctcatgatggcaagatggctgcagcacctctgggactcacgactgatttttaagactacagagcctaagtcaaagcttgttcttggacccaggaaatatgtcaaatccttccagtgaatggtatgtcttcctaaatgacgcacttgtgagaacagctggacctaactgtctaaaggacagctagcttccagcccgattttcagagctgatatatcaaaatctaattccttttacagaatagccaaataaatattttcactgtcaattccaaaaaaaaaaaaaaaaaaaaaaatttttggggcgcctgggccgagaagtttttaaaccctttgttggggcggccctgtaggcactggccgttccagaaaccggccggccggtggtttcccataaagcgggggcgggtttgacatccagggtcgggctgggtcacggcccg

SEQ ID NO: 25546 - DNA, 754 bp, Homo sapiens
gaagggcgaagcgatgtcagaaataatagaaaaggctttttcctttgaaatatctaaacgttcaaagatgggaacagccgcaggggggagaatactgtgctatgcaagttgatctgattttgtggaccatccatttccaattgggaagctcacttactttcaacttgaagcatcagaaaaccagacttacagcagcttcagcctataggggtttatttttctcatgtaacaagaagaacagaagtggacagaggccgagttctcaaggactcagtttctttctgtcccaccaaccttaccatgttggattgtcatctttgtgcttgttgcctcatgatggcaagatggctgcagcacctctgggactcacgactgatttttaaggtgcctttcaggattggagactactcccccagttgctgatggtgtggtcagccctcagttttcagtcctctttgggaattgccttggatgaagaaagtcacctcacccaagatcactccaactcctgggacccacatccaatgattggccaatatggggactcaaaggcctggtcccccttccccaacttgagactactctgaaggatcacccagcttcagagcttcccatggttgagacttttagacttcactgtggtccaaccaatctcttcctatacacggtcctgactccttcacttccctcccagcacttcttctgtgttaatatcaaacttctgtgctaataacaaacttcttccgtgctaata

SEQ ID NO: 25547 - DNA, 533 bp, Homo sapiens
gaagggcgaagcgatgtcagaaataatagaaaaggctttttcctttgaaatatctaaacgttcaaagatgggaacagccgcaggggggagaatactgtgctatgcaagttgatctgattttgtggaccatccatttccaattgggaagctcacttactttcaacttgaagcatcagaaaaccagacttacagcagcttcagcctataggggtttatttttctcatgtaacaagaagaacagaagtggacagaggccgagttctcaaggactcagtttctttctgtcccaccaaccttaccatgttggattgtcatctttgtgcttgttgcctcatgatggcaagatggctgcagcacctctgggactcacgactgatttttaaggtaggaagaaggggacaggactgtactagccagatggcttcctttcatctggaaagcaaaaggtttccctgaatcctcagcagatttctgctgtcttcccattggccagaactgtgtcacatggtcacttttaataggtttaaaaatga

SEQ ID NO: 25548 - DNA, 354 bp, Homo sapiens
catgccaatgtgcaataaatactaattttgtttactaatgttttctctgttttccaagtctcattttagccattggttttaatattttgcatgagcaaatctttaattagaaatttcagttgcatcatttgattctttttattgtttcgcttttgtaatggtagtaatgggatggacaagtgataatttccagacaaaaggaagatgattgagagtttttaaaatttcacttgaggggctgggcatcctggctcacgcgtataatctcagcactttgggaggctgaggcagaaggattgcttgaggccaggagtttggaccaacctgggtagcatggcaagatcctatatttac

SEQ ID NO: 25549 - DNA, 446 bp, Homo sapiens
aatgtctacaatattttactaaaattaaatttaacattaatagcacattaatataaaggtaaaatttaacttatttagtataaaattatacaaaaaatagtcaaatataaaatggtgtttatttttttttaagtcccgagggtggccaggtaagtcacaatgcccctcatccccaaggccatagcacgcgggggtggtgaaggccacaagaaggccaagacttcaagaggggccagggccacagcatcccttgggcggcgctgagcaggaatggagcgggaggcgtcaccatggggcttcaagccccaggatatgcaacaaaaattatatgcttattttccactttcttttccctcagaactaaaagtcttttagcacaggtaccacccctagaatttccagtacaccagcaccagcctgaaaaccatgttcttattaaaagatga

SEQ ID NO: 25550 - DNA, 469 bp, Homo sapiens
attaagaatgtaacttggctccaagttctggatattccccacattatgtgagaactagagtagtcaagagggcaaatcatgccttgcaatcataattctcaattagagtcttgattctacaacttgctaacttagggagactaacttggggaaatttctctgagtcatattggaaaaatgagtgttaaaagcactcttgaccctatctacatcacaagatttttgtgaagattcacggaggtgatgtagacaaagcccttataaaacactggttgcatatttggaagctaataggcctccaagtgactgaagttgatgtgatgttagtacttgaggaatggtaggcagttggcaatcttgaggtcacatgcctgtcagcttcagcagatcattgccatgtgcaaagtggtcagacgtagagtgccagaaccttggtttttaaagaaaacctgggtatctaaaattttat

SEQ ID NO: 25551 - DNA, 3355 bp, Homo sapiens
ccccaggcaggctgaggagcctaggggcggggtgggaaggaggaccggccgaaccttgggtgtgggacagagtgcgtgcgtgtggtgtgtccccaagggcaggaaggtggcgaagggaggcgaatccgagtgggtggagggaggggaagggcgggaggagaaaaaggtgggaggaggaccaggtgggagggtggcggctcactcaggacccagcgggggcagcgcgatgaggcgggtgaccctgttcctgaacggcagccccaagaacggaaaggtggttgctgtatatggaactttatctgatttgctttctgtggccagcagtaaactcggcataaaagccaccagtgtgtataatgggaaaggtggactgattgatgatattgctttgatcagggatgatgatgttttgtttgtttgtgaaggagagccatttattgatcctcagacagattctaagcctcctgagggattgttaggattccacacagactggctgacattaaatgttggagggcggtactttacaactacacgcgttactcctaccaggttgtagcatgcatctttttgagagagcagctgggatcgagtatactcttgacttaaatatgtttgtttataaagacaaatggagaaatcaatttttttccctgaattcttaggagcactttagtgaataaagaacctgacagtatgctggcccacatgtttaaggacaaaggtgtctggggaaataagcaagatcatagaggagctttcttaattgaccgaagtcctgagtacttcgaacccattttgaactacttgcgtcatggacagctcattgtaaatgatggcattaatttattgggtgtgttagaagaagcaagattttttggtattgactcattgattgaacacctagaagtggcaataaagaattctcaaccaccggaggatcattcaccaatatcccgaaaggaatttgtccgatttttgctagcaactccaaccaagtcagaactgcgatgccagggtttgaacttcagtggtgctgatctttctcgtttggaccttcgatacattaacttcaaaatggccaatttaagccgctgtaatcttgcacatgcaaatctttgctgtgcaaatcttgaacgagctgatctctctggatcagtgcttgactgtgcgaatctccagggagtcaagatgctctgttctaatgcagaaggagcatccctgaaactgtgtaattttgaggatccttctggtcttaaagccaatttagaaggtgctaatctgaaaggtgtggatatggaaggaagtcagatgacaggaattaacctgagagtggctaccttaaaaaatgcaaagttgaagaactgtaacctcagaggagcaactctggcaggaactgatttagagaattgtgatctgtctgggtgtgatcttcaagaagccaacctgagagggtccaacgtgaagggagctatatttgaagagatgctgacaccactacacatgtcacaaagtgtcagatgagaattttaggggctggaggaagatgtaaaagatgaaaatgttttccttatcacttttctttctccacccactcagttgtctagaagaaataacactgtaaggaaatttaaaaaaaaaacatttagaggattatgcttgttttgagtggtgcataagggaaaaaactgactttttttccatattctgatttttaacagaaaagcactcatttaatagatgtagggaaactagatattgctgccttttgaatggggtaggggggtttacctggttttatgaccaggcatagtatctattatatttgcttttaaataggcatgatgtggaaataccatcttggtttgagatgcatttgaggattttaatttatggaaagcacaacatatgcaattatatttattgaattcctagatgcagtatggatatttaaattgttaaaactttatgaaaacttggaaaaggttgttcaggtttataaatagctttagtgatgcctcccctctttaaatacctgtcacaccgtatgaatatggtgagatcagactccctaagactcttttcaggttcatttttataatgtttactttttaggacagaacagtagctaaattaaagtaatatccagttcttactgattgagacagagtggaaagaaagacatcattgtacatcactgtcattccaaaggtacagtgtaactctggatggaggaataacttacctatcactacaacacttacaaatgagaatttctcagaatttcattctaggcaagttccactcaacaccagatcaagcaattctatctatttacactattagcctagttttctcatacagtcatcacaagcataggaagatacttcaaaaccaaaaaaaccaaggtgcatcattaatattcatttaattcaaataccaaatagtttacatagggccagcttagaaatagatactaaatccagagctactgcaatcaaagcttatatgagtgaatatggtagagttgcctgctaaaaggcaatgtaatataattgcagctagaaccctacagtggggaatgaggaattttaaacacacatttgattacagccaccaaaaaaatagacgtaaaaataaaggcatttggctggtccaagatgtaattatcaatcagtcagcacctgtgattcttttacttatttttttgtggttttttttttttaaacaaattttagcccaattttcttgagtcattctctctctgcagcagcagaggaagggcctgtacctccctaccaatgacttggtgtccttattttctaccccaagagcagggatattagctgtgtccaaatgggttctgaattctacagactcatcaacatgaggcaaggaatcattgaaaaccacctgtgtctcctttgggagaatgacatatctttagtatttacgtagcttattcttctatatctacatatgcaaagctttccttaacagtaaagggtacatatgcatagtgggaggagatcagacctttacaagtgaaggaaagcaacttcagaaatgaattattttctttgctttattatttttaccaagacagagaagtattgtattgagagataatctattttcataatcaatatgtgcctaaattatatttaaatcatttcactctgtactatattttcaggaattacagaatgtggtattcattcacttaaaggtacctctgtagaaataacctaaaactgcagaaggatctgaaagatctaaacatggtgtgcttagaaactgcagattttagatctaatgtatactgcattaataaatgatataaagtgtttgttga

SEQ ID NO: 25552 - DNA, 3313 bp, Homo sapiens
gaactcctgacctcaggtgatccacccaccttggcctcccaaaaagtgccggcattacaggcttgagccaccatgcccagactgctttagaattgcatttatactgtgtatttttttaccctaatgacagtgtaagagacttaaatgaatatgactgtcacacaaaaaaggtgtgtcctacttcaacactcaacattcaagaaatatttgtcaaagacctgctgtaagccaggtggttgctgtatatggaactttatctgatttgctttctgtggccagcagtaaactcggcataaaagccaccagtgtgtataatgggaaaggtggactgattgatgatattgctttgatcagggatgatgatgttttgtttgtttgtgaaggagagccatttattgatcctcagacagattctaagcctcctgagggattgttaggattccacacagactggctgacattaaatgttggagggcggtactttacaactacacgcgttactcctaccaggttgtagcatgcatctttttgagagagcagctgggatcgagtatactcttgacttaaatatgtttgtttataaagacaaatggagaaatcaatttttttccctgaattcttaggagcactttagtgaataaagaacctgacagtatgctggcccacatgtttaaggacaaaggtgtctggggaaataagcaagatcatagaggagctttcttaattgaccgaagtcctgagtacttcgaacccattttgaactacttgcgtcatggacagctcattgtaaatgatggcattaatttattgggtgtgttagaagaagcaagattttttggtattgactcattgattgaacacctagaagtggcaataaagaattctcaaccaccggaggatcattcaccaatatcccgaaaggaatttgtccgatttttgctagcaactccaaccaagtcagaactgcgatgccagggtttgaacttcagtggtgctgatctttctcgtttggaccttcgatacattaacttcaaaatggccaatttaagccgctgtaatcttgcacatgcaaatctttgctgtgcaaatcttgaacgagctgatctctctggatcagtgcttgactgtgcgaatctccagggagtcaagatgctctgttctaatgcagaaggagcatccctgaaactgtgtaattttgaggatccttctggtcttaaagccaatttagaaggtgctaatctgaaaggtgtggatatggaaggaagtcagatgacaggaattaacctgagagtggctaccttaaaaaatgcaaagttgaagaactgtaacctcagaggagcaactctggcaggaactgatttagagaattgtgatctgtctgggtgtgatcttcaagaagccaacctgagagggtccaacgtgaagggagctatatttgaagagatgctgacaccactacacatgtcacaaagtgtcagatgagaattttaggggctggaggaagatgtaaaagatgaaaatgttttccttatcacttttctttctccacccactcagttgtctagaagaaataacactgtaaggaaatttaaaaaaaaaacatttagaggattatgcttgttttgagtggtgcataagggaaaaaactgactttttttccatattctgatttttaacagaaaagcactcatttaatagatgtagggaaactagatattgctgccttttgaatggggtaggggggtttacctggttttatgaccaggcatagtatctattatatttgcttttaaataggcatgatgtggaaataccatcttggtttgagatgcatttgaggattttaatttatggaaagcacaacatatgcaattatatttattgaattcctagatgcagtatggatatttaaattgttaaaactttatgaaaacttggaaaaggttgttcaggtttataaatagctttagtgatgcctcccctctttaaatacctgtcacaccgtatgaatatggtgagatcagactccctaagactcttttcaggttcatttttataatgtttactttttaggacagaacagtagctaaattaaagtaatatccagttcttactgattgagacagagtggaaagaaagacatcattgtacatcactgtcattccaaaggtacagtgtaactctggatggaggaataacttacctatcactacaacacttacaaatgagaatttctcagaatttcattctaggcaagttccactcaacaccagatcaagcaattctatctatttacactattagcctagttttctcatacagtcatcacaagcataggaagatacttcaaaaccaaaaaaaccaaggtgcatcattaatattcatttaattcaaataccaaatagtttacatagggccagcttagaaatagatactaaatccagagctactgcaatcaaagcttatatgagtgaatatggtagagttgcctgctaaaaggcaatgtaatataattgcagctagaaccctacagtggggaatgaggaattttaaacacacatttgattacagccaccaaaaaaatagacgtaaaaataaaggcatttggctggtccaagatgtaattatcaatcagtcagcacctgtgattcttttacttatttttttgtggttttttttttttaaacaaattttagcccaattttcttgagtcattctctctctgcagcagcagaggaagggcctgtacctccctaccaatgacttggtgtccttattttctaccccaagagcagggatattagctgtgtccaaatgggttctgaattctacagactcatcaacatgaggcaaggaatcattgaaaaccacctgtgtctcctttgggagaatgacatatctttagtatttacgtagcttattcttctatatctacatatgcaaagctttccttaacagtaaagggtacatatgcatagtgggaggagatcagacctttacaagtgaaggaaagcaacttcagaaatgaattattttctttgctttattatttttaccaagacagagaagtattgtattgagagataatctattttcataatcaatatgtgcctaaattatatttaaatcatttcactctgtactatattttcaggaattacagaatgtggtattcattcacttaaaggtacctctgtagaaataacctaaaactgcagaaggatctgaaagatctaaacatggtgtgcttagaaactgcagattttagatctaatgtatactgcattaataaatgatataaagtgtttgttga

SEQ ID NO: 25553 - DNA, 3675 bp, Homo sapiens
ccccaggcaggctgaggagcctaggggcggggtgggaaggaggaccggccgaaccttgggtgtgggacagagtgcgtgcgtgtggtgtgtccccaagggcaggaaggtggcgaagggaggcgaatccgagtgggtggagggaggggaagggcgggaggagaaaaaggtgggaggaggaccaggtgggagggtggcggctcactcaggacccagcgggggcagcgcgatgaggcgggtgaccctgttcctgaacggcagccccaagaacggaaaggtggttgctgtatatggaactttatctgatttgctttctgtggccagcagtaaactcggcataaaagccaccagtgtgtataatgggaaaggtggactgattgatgatattgctttgatcagggatgatgatgttttgtttgtttgtgaaggagagccatttattgatcctcagacagattctaagcctcctgagggattgttaggattccacacagactggctgacattaaatgttggagggcggtactttacaactacacggagcactttagtgaataaagaacctgacagtatgctggcccacatgtttaaggacaaaggtgtctggggaaataagcaagatcatagaggagctttcttaattgaccgaagtcctgagtacttcgaacccattttgaactacttgcgtcatggacagctcattgtaaatgatggcattaatttattgggtgtgttagaagaagcaagattttttggtattgactcattgattgaacacctagaagtggcaataaagaattctcaaccaccggaggatcattcaccaatatcccgaaaggaatttgtccgatttttgctagcaactccaaccaagtcagaactgcgatgccagggtttgaacttcagtggtgctgatctttctcgtttggaccttcgatacattaacttcaaaatggccaatttaagccgctgtaatcttgcacatgcaaatctttgctgtgcaaatcttgaacgagctgatctctctggatcagtgcttgactgtgcgaatctccagggagtcaagatgctctgttctaatgcagaaggagcatccctgaaactgtgtaattttgaggatccttctggtcttaaagccaatttagaaggtgctaatctgaaaggtgtggatatggaaggaagtcagatgacaggaattaacctgagagtggctaccttaaaaaatgcaaagttgaagaactgtaacctcagaggagcaactctggcaggaactgatttagagaattgtgatctgtctgggtgtgatcttcaagaagccaacctgagagggtccaacgtgaagggagctatatttgaagagatgctgacaccactacacatgtcacaaagtgtcagatgagaattttaggggctggaggaagatgtaaaagatgaaaatgttttccttatcacttttctttctccacccactcagttgtctagaagaaataacactgtaaggaaatttaaaaaaaaaacatttagaggattatgcttgttttgagtggtgcataagggaaaaaactgactttttttccatattctgatttttaacagaaaagcactcatttaatagatgtagggaaactagatattgctgccttttgaatggggtaggggggtttacctggttttatgaccaggcatagtatctattatatttgcttttaaataggcatgatgtggaaataccatcttggtttgagatgcatttgaggattttaatttatggaaagcacaacatatgcaattatatttattgaattcctagatgcagtatggatatttaaattgttaaaactttatgaaaacttggaaaaggttgttcaggtttataaatagctttagtgatgcctcccctctttaaatacctgtcacaccgtatgaatatggtgagatcagactccctaagactcttttcaggttcatttttataatgtttactttttaggacagaacagtagctaaattaaagtaatatccagttcttactgattgagacagagtggaaagaaagacatcattgtacatcactgtcattccaaaggtacagtgtaactctggatggaggaataacttacctatcactacaacacttacaaatgagaatttctcagaatttcattctaggcaagttccactcaacaccagatcaagcaattctatctatttacactattagcctagttttctcatacagtcatcacaagcataggaagatacttcaaaaccaaaaaaaccaaggtgcatcattaatattcatttaattcaaataccaaatagtttacatagggccagcttagaaatagatactaaatccagagctactgcaatcaaagcttatatgagtgaatatggtagagttgcctgctaaaaggcaatgtaatataattgcagctagaaccctacagtggggaatgaggaattttaaacacacatttgattacagccaccaaaaaaatagacgtaaaaataaaggcatttggctggtccaagatgtaattatcaatcagtcagcacctgtgattcttttacttatttttttgtggttttttttttttaaacaaattttagcccaattttcttgagtcattctctctctgcagcagcagaggaagggcctgtacctccctaccaatgacttggtgtccttattttctaccccaagagcagggatattagctgtgtccaaatgggttctgaattctacagactcatcaacatgaggcaaggaatcattgaaaaccacctgtgtctcctttgggagaatgacatatctttagtatttacgtagcttattcttctatatctacatatgcaaagctttccttaacagtaaagggtacatatgcatagtgggaggagatcagacctttacaagtgaaggaaagcaacttcagaaatgaattattttctttgctttattatttttaccaagacagagaagtattgtattgagagataatctattttcataatcaatatgtgcctaaattatatttaaatcatttcactctgtactatattttcaggaattacagaatgtggtattcattcacttaaaggtacctctgtagaaataacctaaaactgcagaaggatctgaaagatctaaacatggtgtgcttagaaactgcagattttagatctaatgtatactgcattaataaatgatataaagtgtttgttgaaaaggagtttcttctcttccttttgaaaatcatcactttctgtattttgcttacatttcttcaatatgtgttgacaaccagccctgtggttctgggtagcaaaggaaatacagtataacttaatttgttatggattagtctttttgaaagtaccattaaagtaaatttatttctttaaacatgattatttttatcattcttttaaaaatacaccatgctaacaacacaaaccttatgaattctgaacaaaagaaaagactgcctccccaataattcgtttaatttgtttgtgttaaattcatcactctttaggtgatgaatattaccagttagctttattagactggataaatagcatgccccaaaacattttttgcctgataactaggatagagaattttaaggagggaagaaaccgttaaaatagtaaaacttccattaaccctag

SEQ ID NO: 25554 - DNA, 3134 bp, Homo sapiens
ccccaggcaggctgaggagcctaggggcggggtgggaaggaggaccggccgaaccttgggtgtgggacagagtgcgtgcgtgtggtgtgtccccaagggcaggaaggtggcgaagggaggcgaatccgagtgggtggagggaggggaagggcgggaggagaaaaaggtgggaggaggaccaggtgggagggtggcggctcactcaggacccagcgggggcagcgcgatgaggcgggtgaccctgttcctgaacggcagccccaagaacggaaaggtggttgctgtatatggaactttatctgatttgctttctgtggccagcagtaaactcggcataaaagccaccagtgtgtataatgggaaaggtggactgattgatgatattgctttgatcagggatgatgatgttttgtttgtttgtgaaggagagccatttattgatcctcagacagattctaagcctcctgagggattgttaggattccacacagactggctgacattaaatgttggagggcggtactttacaactacacggagcactttagtgaataaagaacctgacagtatgctggcccacatgtttaaggacaaaggtgtctggggaaataagcaagatcatagaggagctttcttaattgaccgaagtcctgagtacttcgaacccattttgaactacttgcgtcatggacagctcattgtaaatgatggcattaatttattgggtgtgttagaagaagcaagattttttggtattgactcattgattgaacacctagaagtggcaataaagaattctcaaccaccggaggatcattcaccaatatcccgaaaggaatttgtccgatttttgctagcaactccaaccaagtcagaactgcgatgccagggtttgaacttcagtggtgctgatctttctcgtttggaccttcgatacattaacttcaaaatggccaatttaagccgctgtaatcttgcacatgcaaatctttgctgtgcaaatcttgaacgagctgatctctctggatcagtgcttgactgtgcgaatctccagggagtcaagatgctctgttctaatgcagaaggagcatccctgaaactgtgtaattttgaggatccttctggtcttaaagccaatttagaaggtgctaatctgaaaggtgtggatatggaaggaagtcagatgacaggaattaacctgagagtggctaccttaaaaaatgcaaagttgaagaactgtaacctcagaggagcaactctggcaggaactgatttagagaattgtgatctgtctgggtgtgatcttcaagaagccaacctgagagggtccaacgtgaagggagctatatttgaagagatgctgacaccactacacatgtcacaaagtgtcagatgagaattttaggggctggaggaagatgtaaaagatgaaaatgttttccttatcacttttctttctccacccactcagttgtctagaagaaataacactgtaaggaaatttaaaaaaaaaacatttagaggattatgcttgttttgagtggtgcataagggaaaaaactgactttttttccatattctgatttttaacagaaaagcactcatttaatagatgtagggaaactagatattgctgccttttgaatggggtaggggggtttacctggttttatgaccaggcatagtatctattatatttgcttttaaataggcatgatgtggaaataccatcttggtttgagatgcatttgaggattttaatttatggaaagcacaacatatgcaattatatttattgaattcctagatgcagtatggatatttaaattgttaaaactttatgaaaacttggaaaaggttgttcaggtttataaatagctttagtgatgcctcccctctttaaatacctgtcacaccgtatgaatatggtgagatcagactccctaagactcttttcaggttcatttttataatgtttactttttaggacagaacagtagctaaattaaagtaatatccagttcttactgattgagacagagtggaaagaaagacatcattgtacatcactgtcattccaaaggtacagtgtaactctggatggaggaataacttacctatcactacaacacttacaaatgagaatttctcagaatttcattctaggcaagttccactcaacaccagatcaagcaattctatctatttacactattagcctagttttctcatacagtcatcacaagcataggaagatacttcaaaaccaaaaaaaccaaggtgcatcattaatattcatttaattcaaataccaaatagtttacatagggccagcttagaaatagatactaaatccagagctactgcaatcaaagcttatatgagtgaatatggtagagttgcctgctaaaaggcaatgtaatataattgcagctagaaccctacagtggggaatgaggaattttaaacacacatttgattacagccaccaaaaaaatagacgtaaaaataaaggcatttggctggtccaagatgtaattatcaatcagtcagcacctgtgattcttttacttatttttttgtggttttttttttttaaacaaattttagcccaattttcttgagtcattctctctctgcagcagcagaggaagggcctgtacctccctaccaatgacttggtgtccttattttctaccccaagagcagggatattagctgtgtccaaatgggttctgaattctacagactcatcaacatgaggcaaggaatcattgaaaaccacctgtgtctcctttgggagaatgacatatctttagtatttacgtagcttattcttctatatctacatatgcaaagctttccttaacagtaaagggtacatatgcatagtgggaggagatcagacctttacaagtgaaggaaagcaacttcagaaatgaattattttctttgctttattatttttaccaagacagagaagtattgtattgagaaaatcattaaaacaacagtgttagctaaagatcaagcaagtgctggagacttgacgcatgtgccacaaaggagatgctcaataaatgttggcttctcataagcccaacgatggaaagcttactaatcattaagcaaat

SEQ ID NO: 25555 - DNA, 446 bp, Homo sapiens
gatgatttaggggtaaaaaatgtaaagaaaaaaagaatagttggctgtgactttaatctatcctttcagcataattattcattctcaattgataagaaagctgaactcaacatcgtttgtgtaaggagatttttttccccacatttcaaaagtactttcatgtgcaagatcttatttttgaatttaaattcaaagacagttaagttcaaggggttaaacaaagcattggaaacttagcttctttgcagtctagattgatagcaaaacctattgtctatataattgtaaggaatagttcctataagcaacagataattaatgtgatttttagattttgatggtagctttttaaattttgatttccccagggatgatgatgttttgtttgtttgtgaaggagagccatttattggtaagtgactttaaaagccaattttatctgccaa

SEQ ID NO: 25556 - DNA, 831 bp, Homo sapiens
aaatcaatttttttccctgaattcttaggagcactttagtgaataaagaacctgacagtatgctggcccacatgtttaaggacaaaggtgagtgtaacacgttgttttcacatttcatcttacctgttttatatctgtgctgactttataactcctgaccttctgtacttactaattatgtcagtttttaagagtaaaaacttatatttagcaattttttcctcatacatttctgactttattttttgtttatgggggactttctttattataatggtgacacaggtgtctggggaaataagcaagatcatagaggagctttcttaattgaccgaagtcctgagtacttcgaacccattttgaactacttgcgtcatggacagctcattgtaaatgatggcattaatttattgggtgagtttatttagactttcaatataattatgtaactactcacatttttgtaagtttaagattttaactttgtttcactcagtaacagtatatttccataaagtaaaagtatatattttttctattttttaaactagatgttttcacatgtatatgagtgatataggtgtagaaatagatttaggcacgggcaggtggtccttcaggtagatagtctttgtacatatagctaaatatgtaagccatacgcatcaactttatattctaaattgatttacgttctatcacaagtgactttaaaggattttgttgtttccttttttaaaaattgaattaagaatgtaacttggctccaagttctggatattccccacattatgtgagaactagagtagtcaagagggcaaatcatgcctt

SEQ ID NO: 25557 - DNA, 3227 bp, Homo sapiens
ccccaggcaggctgaggagcctaggggcggggtgggaaggaggaccggccgaaccttgggtgtgggacagagtgcgtgcgtgtggtgtgtccccaagggcaggaaggtggcgaagggaggcgaatccgagtgggtggagggaggggaagggcgggaggagaaaaaggtgggaggaggaccaggtgggagggtggcggctcactcaggacccagcgggggcagcgcgatgaggcgggtgaccctgttcctgaacggcagccccaagaacggaaaggtggttgctgtatatggaactttatctgatttgctttctgtggccagcagtaaactcggcataaaagccaccagtgtgtataatgggaaaggtggactgattgatgatattgctttgatcagggatgatgatgttttgtttgtttgtgaaggagagccatttattgatcctcagacagattctaagcctcctgagggattgttaggattccacacagactggctgacattaaatgttggagggcggtactttacaactacacggagcactttagtgaataaagaacctgacagtatgctggcccacatgtttaaggacaaaggtgtctggggaaataagcaagatcatagaggagctttcttaattgaccgaagtcctgagtacttcgaacccattttgaactacttgcgtcatggacagctcattgtaaatgatggcattaatttattgggtgtgttagaagaagcaagattttttggtattgactcattgattgaacacctagaagtggcaataaagaattctcaaccaccggaggatcattcaccaatatcccgaaaggaatttgtccgatttttgctagcaactccaaccaagtcagaactgcgatgccagggtttgaacttcagtggtgctgatctttctcgtttggaccttcgatacattaacttcaaaatggccaatttaagccgctgtaatcttgcacatgcaaatctttgctgtgcaaatcttgaacgagctgatctctctggatcagtgcttgactgtgcgaatctccagggagtcaagatgctctgttctaatgcagaaggagcatccctgaaactgtgtaattttgaggatccttctggtcttaaagccaatttagaaggtgctaatctgaaaggtgtggatatggaaggaagtcagatgacaggaattaacctgagagtggctaccttaaaaaatgcaaagttgaagaactgtaacctcagaggagcaactctggcaggaactgatttagagaattgtgatctgtctgggtgtgatcttcaagaagccaacctgagagggtccaacgtgaagggagctatatttgaagagatgctgacaccactacacatgtcacaaagtgtcagatgagaattttaggggctggaggaagatgtaaaagatgaaaatgttttccttatcacttttctttctccacccactcagttgtctagaagaaataacactgtaaggaaatttaaaaaaaaaacatttagaggattatgcttgttttgagtggtgcataagggaaaaaactgactttttttccatattctgatttttaacagaaaagcactcatttaatagatgtagggaaactagatattgctgccttttgaatggggtaggggggtttacctggttttatgaccaggcatagtatctattatatttgcttttaaataggcatgatgtggaaataccatcttggtttgagatgcatttgaggattttaatttatggaaagcacaacatatgcaattatatttattgaattcctagatgcagtatggatatttaaattgttaaaactttatgaaaacttggaaaaggttgttcaggtttataaatagctttagtgatgcctcccctctttaaatacctgtcacaccgtatgaatatggtgagatcagactccctaagactcttttcaggttcatttttataatgtttactttttaggacagaacagtagctaaattaaagtaatatccagttcttactgattgagacagagtggaaagaaagacatcattgtacatcactgtcattccaaaggtacagtgtaactctggatggaggaataacttacctatcactacaacacttacaaatgagaatttctcagaatttcattctaggcaagttccactcaacaccagatcaagcaattctatctatttacactattagcctagttttctcatacagtcatcacaagcataggaagatacttcaaaaccaaaaaaaccaaggtgcatcattaatattcatttaattcaaataccaaatagtttacatagggccagcttagaaatagatactaaatccagagctactgcaatcaaagcttatatgagtgaatatggtagagttgcctgctaaaaggcaatgtaatataattgcagctagaaccctacagtggggaatgaggaattttaaacacacatttgattacagccaccaaaaaaatagacgtaaaaataaaggcatttggctggtccaagatgtaattatcaatcagtcagcacctgtgattcttttacttatttttttgtggttttttttttttaaacaaattttagcccaattttcttgagtcattctctctctgcagcagcagaggaagggcctgtacctccctaccaatgacttggtgtccttattttctaccccaagagcagggatattagctgtgtccaaatgggttctgaattctacagactcatcaacatgaggcaaggaatcattgaaaaccacctgtgtctcctttgggagaatgacatatctttagtatttacgtagcttattcttctatatctacatatgcaaagctttccttaacagtaaagggtacatatgcatagtgggaggagatcagacctttacaagtgaaggaaagcaacttcagaaatgaattattttctttgctttattatttttaccaagacagagaagtattgtattgagagataatctattttcataatcaatatgtgcctaaattatatttaaatcatttcactctgtactatattttcaggaattacagaatgtggtattcattcacttaaaggtacctctgtagaaataacctaaaactgcagaaggatctgaaagatctaaacatggtgtgcttagaaactgcagattttagatctaatgtatactgcattaataaatgatataaagtgtttgttga

SEQ ID NO: 25558 - DNA, 3497 bp, Homo sapiens
ggaagaggatgtgcactgattgtccagaactgtgggttatgtgcagccatttacatttgggtgtatggtggatgtgtagtgggtaaacactgacagtagagttacttccagctatatttttcctagatttaatatgacagtttatttcatctccaaagcacacaacagctgatgatttaggggtaaaaaatgtaaagaaaaaaagaatagttggctgtgactttaatctatcctttcagcataattattcattctcaattgataagaaagctgaactcaacatcgtttgtgtaaggagatttttttccccacatttcaaaagtactttcatgtgcaagatcttatttttgaatttaaattcaaagacagttaagttcaaggggttaaacaaagcattggaaacttagcttctttgcagtctagattgatagcaaaacctattgtctatataattgtaaggaatagttcctataagcaacagataattaatgtgatttttagattttgatggtagctttttaaattttgatttccccagggatgatgatgttttgtttgtttgtgaaggagagccatttattgatcctcagacagattctaagcctcctgagggattgttaggattccacacagactggctgacattaaatgttggagggcggtactttacaactacacgcgttactcctaccaggttgtagcatgcatctttttgagagagcagctgggatcgagtatactcttgacttaaatatgtttgtttataaagacaaatggagaaatcaatttttttccctgaattcttaggagcactttagtgaataaagaacctgacagtatgctggcccacatgtttaaggacaaaggtgtctggggaaataagcaagatcatagaggagctttcttaattgaccgaagtcctgagtacttcgaacccattttgaactacttgcgtcatggacagctcattgtaaatgatggcattaatttattgggtgtgttagaagaagcaagattttttggtattgactcattgattgaacacctagaagtggcaataaagaattctcaaccaccggaggatcattcaccaatatcccgaaaggaatttgtccgatttttgctagcaactccaaccaagtcagaactgcgatgccagggtttgaacttcagtggtgctgatctttctcgtttggaccttcgatacattaacttcaaaatggccaatttaagccgctgtaatcttgcacatgcaaatctttgctgtgcaaatcttgaacgagctgatctctctggatcagtgcttgactgtgcgaatctccagggagtcaagatgctctgttctaatgcagaaggagcatccctgaaactgtgtaattttgaggatccttctggtcttaaagccaatttagaaggtgctaatctgaaaggtgtggatatggaaggaagtcagatgacaggaattaacctgagagtggctaccttaaaaaatgcaaagttgaagaactgtaacctcagaggagcaactctggcaggaactgatttagagaattgtgatctgtctgggtgtgatcttcaagaagccaacctgagagggtccaacgtgaagggagctatatttgaagagatgctgacaccactacacatgtcacaaagtgtcagatgagaattttaggggctggaggaagatgtaaaagatgaaaatgttttccttatcacttttctttctccacccactcagttgtctagaagaaataacactgtaaggaaatttaaaaaaaaaacatttagaggattatgcttgttttgagtggtgcataagggaaaaaactgactttttttccatattctgatttttaacagaaaagcactcatttaatagatgtagggaaactagatattgctgccttttgaatggggtaggggggtttacctggttttatgaccaggcatagtatctattatatttgcttttaaataggcatgatgtggaaataccatcttggtttgagatgcatttgaggattttaatttatggaaagcacaacatatgcaattatatttattgaattcctagatgcagtatggatatttaaattgttaaaactttatgaaaacttggaaaaggttgttcaggtttataaatagctttagtgatgcctcccctctttaaatacctgtcacaccgtatgaatatggtgagatcagactccctaagactcttttcaggttcatttttataatgtttactttttaggacagaacagtagctaaattaaagtaatatccagttcttactgattgagacagagtggaaagaaagacatcattgtacatcactgtcattccaaaggtacagtgtaactctggatggaggaataacttacctatcactacaacacttacaaatgagaatttctcagaatttcattctaggcaagttccactcaacaccagatcaagcaattctatctatttacactattagcctagttttctcatacagtcatcacaagcataggaagatacttcaaaaccaaaaaaaccaaggtgcatcattaatattcatttaattcaaataccaaatagtttacatagggccagcttagaaatagatactaaatccagagctactgcaatcaaagcttatatgagtgaatatggtagagttgcctgctaaaaggcaatgtaatataattgcagctagaaccctacagtggggaatgaggaattttaaacacacatttgattacagccaccaaaaaaatagacgtaaaaataaaggcatttggctggtccaagatgtaattatcaatcagtcagcacctgtgattcttttacttatttttttgtggttttttttttttaaacaaattttagcccaattttcttgagtcattctctctctgcagcagcagaggaagggcctgtacctccctaccaatgacttggtgtccttattttctaccccaagagcagggatattagctgtgtccaaatgggttctgaattctacagactcatcaacatgaggcaaggaatcattgaaaaccacctgtgtctcctttgggagaatgacatatctttagtatttacgtagcttattcttctatatctacatatgcaaagctttccttaacagtaaagggtacatatgcatagtgggaggagatcagacctttacaagtgaaggaaagcaacttcagaaatgaattattttctttgctttattatttttaccaagacagagaagtattgtattgagagataatctattttcataatcaatatgtgcctaaattatatttaaatcatttcactctgtactatattttcaggaattacagaatgtggtattcattcacttaaaggtacctctgtagaaataacctaaaactgcagaaggatctgaaagatctaaacatggtgtgcttagaaactgcagattttagatctaatgtatactgcattaataaatgatataaagtgtttgttga

SEQ ID NO: 25559 - DNA, 3457 bp, Homo sapiens
ccccaggcaggctgaggagcctaggggcggggtgggaaggaggaccggccgaaccttgggtgtgggacagagtgcgtgcgtgtggtgtgtccccaagggcaggaaggtggcgaagggaggcgaatccgagtgggtggagggaggggaagggcgggaggagaaaaaggtgggaggaggaccaggtgggagggtggcggctcactcaggacccagcgggggcagcgcgatgaggcgggtgaccctgttcctgaacggcagccccaagaacggaaagtgtaagagacttaaatgaatatgactgtcacacaaaaaaggtgtgtcctacttcaacactcaacattcaagaaatatttgtcaaagacctgctgtaagccaggtggttgctgtatatggaactttatctgatttgctttctgtggccagcagtaaactcggcataaaagccaccagtgtgtataatgggaaaggtggactgattgatgatattgctttgatcagggatgatgatgttttgtttgtttgtgaaggagagccatttattgatcctcagacagattctaagcctcctgagggattgttaggattccacacagactggctgacattaaatgttggagggcggtactttacaactacacgcgttactcctaccaggttgtagcatgcatctttttgagagagcagctgggatcgagtatactcttgacttaaatatgtttgtttataaagacaaatggagaaatcaatttttttccctgaattcttaggagcactttagtgaataaagaacctgacagtatgctggcccacatgtttaaggacaaaggtgtctggggaaataagcaagatcatagaggagctttcttaattgaccgaagtcctgagtacttcgaacccattttgaactacttgcgtcatggacagctcattgtaaatgatggcattaatttattgggtgtgttagaagaagcaagattttttggtattgactcattgattgaacacctagaagtggcaataaagaattctcaaccaccggaggatcattcaccaatatcccgaaaggaatttgtccgatttttgctagcaactccaaccaagtcagaactgcgatgccagggtttgaacttcagtggtgctgatctttctcgtttggaccttcgatacattaacttcaaaatggccaatttaagccgctgtaatcttgcacatgcaaatctttgctgtgcaaatcttgaacgagctgatctctctggatcagtgcttgactgtgcgaatctccagggagtcaagatgctctgttctaatgcagaaggagcatccctgaaactgtgtaattttgaggatccttctggtcttaaagccaatttagaaggtgctaatctgaaaggtgtggatatggaaggaagtcagatgacaggaattaacctgagagtggctaccttaaaaaatgcaaagttgaagaactgtaacctcagaggagcaactctggcaggaactgatttagagaattgtgatctgtctgggtgtgatcttcaagaagccaacctgagagggtccaacgtgaagggagctatatttgaagagatgctgacaccactacacatgtcacaaagtgtcagatgagaattttaggggctggaggaagatgtaaaagatgaaaatgttttccttatcacttttctttctccacccactcagttgtctagaagaaataacactgtaaggaaatttaaaaaaaaaacatttagaggattatgcttgttttgagtggtgcataagggaaaaaactgactttttttccatattctgatttttaacagaaaagcactcatttaatagatgtagggaaactagatattgctgccttttgaatggggtaggggggtttacctggttttatgaccaggcatagtatctattatatttgcttttaaataggcatgatgtggaaataccatcttggtttgagatgcatttgaggattttaatttatggaaagcacaacatatgcaattatatttattgaattcctagatgcagtatggatatttaaattgttaaaactttatgaaaacttggaaaaggttgttcaggtttataaatagctttagtgatgcctcccctctttaaatacctgtcacaccgtatgaatatggtgagatcagactccctaagactcttttcaggttcatttttataatgtttactttttaggacagaacagtagctaaattaaagtaatatccagttcttactgattgagacagagtggaaagaaagacatcattgtacatcactgtcattccaaaggtacagtgtaactctggatggaggaataacttacctatcactacaacacttacaaatgagaatttctcagaatttcattctaggcaagttccactcaacaccagatcaagcaattctatctatttacactattagcctagttttctcatacagtcatcacaagcataggaagatacttcaaaaccaaaaaaaccaaggtgcatcattaatattcatttaattcaaataccaaatagtttacatagggccagcttagaaatagatactaaatccagagctactgcaatcaaagcttatatgagtgaatatggtagagttgcctgctaaaaggcaatgtaatataattgcagctagaaccctacagtggggaatgaggaattttaaacacacatttgattacagccaccaaaaaaatagacgtaaaaataaaggcatttggctggtccaagatgtaattatcaatcagtcagcacctgtgattcttttacttatttttttgtggttttttttttttaaacaaattttagcccaattttcttgagtcattctctctctgcagcagcagaggaagggcctgtacctccctaccaatgacttggtgtccttattttctaccccaagagcagggatattagctgtgtccaaatgggttctgaattctacagactcatcaacatgaggcaaggaatcattgaaaaccacctgtgtctcctttgggagaatgacatatctttagtatttacgtagcttattcttctatatctacatatgcaaagctttccttaacagtaaagggtacatatgcatagtgggaggagatcagacctttacaagtgaaggaaagcaacttcagaaatgaattattttctttgctttattatttttaccaagacagagaagtattgtattgagagataatctattttcataatcaatatgtgcctaaattatatttaaatcatttcactctgtactatattttcaggaattacagaatgtggtattcattcacttaaaggtacctctgtagaaataacctaaaactgcagaaggatctgaaagatctaaacatggtgtgcttagaaactgcagattttagatctaatgtatactgcattaataaatgatataaagtgtttgttga

SEQ ID NO: 25560 - DNA, 3329 bp, Homo sapiens
ccccaggcaggctgaggagcctaggggcggggtgggaaggaggaccggccgaaccttgggtgtgggacagagtgcgtgcgtgtggtgtgtccccaagggcaggaaggtggcgaagggaggcgaatccgagtgggtggagggaggggaagggcgggaggagaaaaaggtgggaggaggaccaggtgggagggtggcggctcactcaggacccagcgggggcagcgcgatgaggcgggtgaccctgttcctgaacggcagccccaagaacggaaagtgtaagagacttaaatgaatatgactgtcacacaaaaaaggtgtgtcctacttcaacactcaacattcaagaaatatttgtcaaagacctgctgtaagccaggtggttgctgtatatggaactttatctgatttgctttctgtggccagcagtaaactcggcataaaagccaccagtgtgtataatgggaaaggtggactgattgatgatattgctttgatcagggatgatgatgttttgtttgtttgtgaaggagagccatttattgatcctcagacagattctaagcctcctgagggattgttaggattccacacagactggctgacattaaatgttggagggcggtactttacaactacacggagcactttagtgaataaagaacctgacagtatgctggcccacatgtttaaggacaaaggtgtctggggaaataagcaagatcatagaggagctttcttaattgaccgaagtcctgagtacttcgaacccattttgaactacttgcgtcatggacagctcattgtaaatgatggcattaatttattgggtgtgttagaagaagcaagattttttggtattgactcattgattgaacacctagaagtggcaataaagaattctcaaccaccggaggatcattcaccaatatcccgaaaggaatttgtccgatttttgctagcaactccaaccaagtcagaactgcgatgccagggtttgaacttcagtggtgctgatctttctcgtttggaccttcgatacattaacttcaaaatggccaatttaagccgctgtaatcttgcacatgcaaatctttgctgtgcaaatcttgaacgagctgatctctctggatcagtgcttgactgtgcgaatctccagggagtcaagatgctctgttctaatgcagaaggagcatccctgaaactgtgtaattttgaggatccttctggtcttaaagccaatttagaaggtgctaatctgaaaggtgtggatatggaaggaagtcagatgacaggaattaacctgagagtggctaccttaaaaaatgcaaagttgaagaactgtaacctcagaggagcaactctggcaggaactgatttagagaattgtgatctgtctgggtgtgatcttcaagaagccaacctgagagggtccaacgtgaagggagctatatttgaagagatgctgacaccactacacatgtcacaaagtgtcagatgagaattttaggggctggaggaagatgtaaaagatgaaaatgttttccttatcacttttctttctccacccactcagttgtctagaagaaataacactgtaaggaaatttaaaaaaaaaacatttagaggattatgcttgttttgagtggtgcataagggaaaaaactgactttttttccatattctgatttttaacagaaaagcactcatttaatagatgtagggaaactagatattgctgccttttgaatggggtaggggggtttacctggttttatgaccaggcatagtatctattatatttgcttttaaataggcatgatgtggaaataccatcttggtttgagatgcatttgaggattttaatttatggaaagcacaacatatgcaattatatttattgaattcctagatgcagtatggatatttaaattgttaaaactttatgaaaacttggaaaaggttgttcaggtttataaatagctttagtgatgcctcccctctttaaatacctgtcacaccgtatgaatatggtgagatcagactccctaagactcttttcaggttcatttttataatgtttactttttaggacagaacagtagctaaattaaagtaatatccagttcttactgattgagacagagtggaaagaaagacatcattgtacatcactgtcattccaaaggtacagtgtaactctggatggaggaataacttacctatcactacaacacttacaaatgagaatttctcagaatttcattctaggcaagttccactcaacaccagatcaagcaattctatctatttacactattagcctagttttctcatacagtcatcacaagcataggaagatacttcaaaaccaaaaaaaccaaggtgcatcattaatattcatttaattcaaataccaaatagtttacatagggccagcttagaaatagatactaaatccagagctactgcaatcaaagcttatatgagtgaatatggtagagttgcctgctaaaaggcaatgtaatataattgcagctagaaccctacagtggggaatgaggaattttaaacacacatttgattacagccaccaaaaaaatagacgtaaaaataaaggcatttggctggtccaagatgtaattatcaatcagtcagcacctgtgattcttttacttatttttttgtggttttttttttttaaacaaattttagcccaattttcttgagtcattctctctctgcagcagcagaggaagggcctgtacctccctaccaatgacttggtgtccttattttctaccccaagagcagggatattagctgtgtccaaatgggttctgaattctacagactcatcaacatgaggcaaggaatcattgaaaaccacctgtgtctcctttgggagaatgacatatctttagtatttacgtagcttattcttctatatctacatatgcaaagctttccttaacagtaaagggtacatatgcatagtgggaggagatcagacctttacaagtgaaggaaagcaacttcagaaatgaattattttctttgctttattatttttaccaagacagagaagtattgtattgagagataatctattttcataatcaatatgtgcctaaattatatttaaatcatttcactctgtactatattttcaggaattacagaatgtggtattcattcacttaaaggtacctctgtagaaataacctaaaactgcagaaggatctgaaagatctaaacatggtgtgcttagaaactgcagattttagatctaatgtatactgcattaataaatgatataaagtgtttgttga

SEQ ID NO: 25561 - DNA, 3061 bp, Homo sapiens
ccccaggcaggctgaggagcctaggggcggggtgggaaggaggaccggccgaaccttgggtgtgggacagagtgcgtgcgtgtggtgtgtccccaagggcaggaaggtggcgaagggaggcgaatccgagtgggtggagggaggggaagggcgggaggagaaaaaggtgggaggaggaccaggtgggagggtggcggctcactcaggacccagcgggggcagcgcgatgaggcgggtgaccctgttcctgaacggcagccccaagaacggaaagatcctcagacagattctaagcctcctgagggattgttaggattccacacagactggctgacattaaatgttggagggcggtactttacaactacacggagcactttagtgaataaagaacctgacagtatgctggcccacatgtttaaggacaaaggtgtctggggaaataagcaagatcatagaggagctttcttaattgaccgaagtcctgagtacttcgaacccattttgaactacttgcgtcatggacagctcattgtaaatgatggcattaatttattgggtgtgttagaagaagcaagattttttggtattgactcattgattgaacacctagaagtggcaataaagaattctcaaccaccggaggatcattcaccaatatcccgaaaggaatttgtccgatttttgctagcaactccaaccaagtcagaactgcgatgccagggtttgaacttcagtggtgctgatctttctcgtttggaccttcgatacattaacttcaaaatggccaatttaagccgctgtaatcttgcacatgcaaatctttgctgtgcaaatcttgaacgagctgatctctctggatcagtgcttgactgtgcgaatctccagggagtcaagatgctctgttctaatgcagaaggagcatccctgaaactgtgtaattttgaggatccttctggtcttaaagccaatttagaaggtgctaatctgaaaggtgtggatatggaaggaagtcagatgacaggaattaacctgagagtggctaccttaaaaaatgcaaagttgaagaactgtaacctcagaggagcaactctggcaggaactgatttagagaattgtgatctgtctgggtgtgatcttcaagaagccaacctgagagggtccaacgtgaagggagctatatttgaagagatgctgacaccactacacatgtcacaaagtgtcagatgagaattttaggggctggaggaagatgtaaaagatgaaaatgttttccttatcacttttctttctccacccactcagttgtctagaagaaataacactgtaaggaaatttaaaaaaaaaacatttagaggattatgcttgttttgagtggtgcataagggaaaaaactgactttttttccatattctgatttttaacagaaaagcactcatttaatagatgtagggaaactagatattgctgccttttgaatggggtaggggggtttacctggttttatgaccaggcatagtatctattatatttgcttttaaataggcatgatgtggaaataccatcttggtttgagatgcatttgaggattttaatttatggaaagcacaacatatgcaattatatttattgaattcctagatgcagtatggatatttaaattgttaaaactttatgaaaacttggaaaaggttgttcaggtttataaatagctttagtgatgcctcccctctttaaatacctgtcacaccgtatgaatatggtgagatcagactccctaagactcttttcaggttcatttttataatgtttactttttaggacagaacagtagctaaattaaagtaatatccagttcttactgattgagacagagtggaaagaaagacatcattgtacatcactgtcattccaaaggtacagtgtaactctggatggaggaataacttacctatcactacaacacttacaaatgagaatttctcagaatttcattctaggcaagttccactcaacaccagatcaagcaattctatctatttacactattagcctagttttctcatacagtcatcacaagcataggaagatacttcaaaaccaaaaaaaccaaggtgcatcattaatattcatttaattcaaataccaaatagtttacatagggccagcttagaaatagatactaaatccagagctactgcaatcaaagcttatatgagtgaatatggtagagttgcctgctaaaaggcaatgtaatataattgcagctagaaccctacagtggggaatgaggaattttaaacacacatttgattacagccaccaaaaaaatagacgtaaaaataaaggcatttggctggtccaagatgtaattatcaatcagtcagcacctgtgattcttttacttatttttttgtggttttttttttttaaacaaattttagcccaattttcttgagtcattctctctctgcagcagcagaggaagggcctgtacctccctaccaatgacttggtgtccttattttctaccccaagagcagggatattagctgtgtccaaatgggttctgaattctacagactcatcaacatgaggcaaggaatcattgaaaaccacctgtgtctcctttgggagaatgacatatctttagtatttacgtagcttattcttctatatctacatatgcaaagctttccttaacagtaaagggtacatatgcatagtgggaggagatcagacctttacaagtgaaggaaagcaacttcagaaatgaattattttctttgctttattatttttaccaagacagagaagtattgtattgagagataatctattttcataatcaatatgtgcctaaattatatttaaatcatttcactctgtactatattttcaggaattacagaatgtggtattcattcacttaaaggtacctctgtagaaataacctaaaactgcagaaggatctgaaagatctaaacatggtgtgcttagaaactgcagattttagatctaatgtatactgcattaataaatgatataaagtgtttgttga

SEQ ID NO: 25562 - DNA, 5927 bp, Homo sapiens
ccccaggcaggctgaggagcctaggggcggggtgggaaggaggaccggccgaaccttgggtgtgggacagagtgcgtgcgtgtggtgtgtccccaagggcaggaaggtggcgaagggaggcgaatccgagtgggtggagggaggggaagggcgggaggagaaaaaggtgggaggaggaccaggtgggagggtggcggctcactcaggacccagcgggggcagcgcgatgaggcgggtgaccctgttcctgaacggcagccccaagaacggaaaggtggttgctgtatatggaactttatctgatttgctttctgtggccagcagtaaactcggcataaaagccaccagtgtgtataatgggaaaggtggactgattgatgatattgctttgatcagggatgatgatgttttgtttgtttgtgaaggagagccatttattgatcctcagacagattctaagcctcctgagggattgttaggattccacacagactggctgacattaaatgttggagggcggtactttacaactacacggagcactttagtgaataaagaacctgacagtatgctggcccacatgtttaaggacaaaggtgtctggggaaataagcaagatcatagaggagctttcttaattgaccgaagtcctgagtacttcgaacccattttgaactacttgcgtcatggacagctcattgtaaatgatggcattaatttattgggtgtgttagaagaagcaagattttttggtattgactcattgattgaacacctagaagtggcaataaagaattctcaaccaccggaggatcattcaccaatatcccgaaaggaatttgtccgatttttgctagcaactccaaccaagtcagaactgcgatgccagggtttgaacttcagtggtgctgatctttctcgtttggaccttcgatacattaacttcaaaatggccaatttaagccgctgtaatcttgcacatgcaaatctttgctgtgcaaatcttgaacgagctgatctctctggatcagtgcttgactgtgcgaatctccagggagtcaagatgctctgttctaatgcagaaggagcatccctgaaactgtgtaattttgaggatccttctggtcttaaagccaatttagaaggtgctaatctgaaaggtgtggatatggaaggaagtcagatgacaggaattaacctgagagtggctaccttaaaaaatgcaaagttgaagaactgtaacctcagaggagcaactctggcaggaactgatttagaggtgagttcaccaacactttaagaatttttattactctagacttactaagcatctcatgcaaaatttattgaaatcaaaacaaagtagttggctggtaaaactggattggaagactcatctgacattcagtctaagttgatttcatttctctccttttccttgagtttttctcaagtaaataagtttgatagatgtgttatctaatgtattgcattttccataaaatttaattccgaatagaattaaatgggctagattacttcttaaactacttgagaaatttaaatgatatccaggtttgaaatcaggttcaggaaaagtctatttgaaattggaaccatatgttttttggttttcagcttgagattataattttgcctggtcatctttttcaaagaattatatttgtatgtcttcttaatttgccagtttagctagcagacttgatagctgttgataggtctatatcagcactatccaatagcactttgtgcaggagggacatgttctatatctgtgctgttcagtatagtagctaccacccatatatagctattgagcgcttgagatttggctagtgcaaatgagaaattgatttttaaattttatttaattttaattcatttaaatttaagtagccacatgtgctggtagctatgaaatctggtataaattggatagcagagaacggtatgtcaaaatttagcttgctgttaatgttttttcataatatttttgcctagatatcttgatagctctcggtagcagagtagcaggcccctttcaacttcaaggcaaaaagaattggcctaagtataatcctatcacgagcacaattatttattgtttgttacattactttcacctaagattatatttttttccttggttttagtactgtgtactcagtgtggcctagcagcaaaagcctccctctctctgattgcaaagactgatcaggttgactattgaggggagagctgctgacatttgttctcctaacaggttacgtttagtcacccttctctctaaccattgtcccctatcatatccagggacttaagtggaatctctatcttattgctccgtgatctcaagacaaattaagaaatagcttcaaattgcggtggttacactgttgtgtacatctgtcaaactcactgtattatatacgtacctttggggctttaaaaagaagggcagttccttgctataaaaatactagggctagggaatggaaaaatctattacacaatttgattaagtaaaatcttttcagattaaaaaaaaagtcttccccccatctcattccttttgttgttgttgttcttggatcatagtaaaattgttttgataatatttattactttggggccaggcgcagtgctcatgcctgtaaccccagcattttgggaggccaaggtgggcgaatcacttgaggttaggagtttgagaccagcctggccaacatggtgaaaccccgtctctactaaaaatagaaaaaattagccaggcgtggtggtgagtgcctgtaaccccagctactctggaagctgaggcaggagaatagctcgaatcctggaggtggaggttgcagtgagccgagattgcactccagcctgggcaacaagagcaaaactccgtttcaaaaaaaaaattgtgtgtgtgtgtgtgtgtgtgtgtgtgtgtatttattatgttggaatccattctgtattttaaatcagtggtccccaacctttttggcaccagggactggttttgtggaagaaaatattttcacagatcagagtcgggggctggttttgggatgattcaagcgcgttacatttattgtgcactttatttctactagtattacattgtaatacataatgaaataattatataactcaccataatgtagaatcagtgggagccctgagtttgttttcttgcaactagacagtcccatctgggggtgttggagacagtgacagatcatcagggattagattctcatgaggagtaccccacctagatccctcacatgtgcagttcacaatagggttcacgctcctgtgcgaatctaatgcccctgctgatctgacaggaggtggagctcaggctgtaacttgagccatacagggactggctgtaaatacagatgaagcttcatctactggtgacctcctgctgtgtggcctgattcttaacaggccatggaccagtatcagtctgtggcccaggggttggggacccctgttttcaatgtctccttataaaatatgcaagaacaagggacatgcttcctctttaacctttgtttatacatatttatggtgatcagcctgaactagaggtaacaaataaagatagaagaacatcttaatttagggtggtgtatcatcagttttccggaaattaactgagttttattgtataagaacattttcctaatctgccccagaaatcattctgagcagaaatagataaggcctgaaatttccacatgaattacatgaatattgttttcatcttgcagaattgtgatctgtctgggtgtgatcttcaagaagccaacctgagagggtccaacgtgaagggagctatatttgaagagatgctgacaccactacacatgtcacaaagtgtcagatgagaattttaggggctggaggaagatgtaaaagatgaaaatgttttccttatcacttttctttctccacccactcagttgtctagaagaaataacactgtaaggaaatttaaaaaaaaaacatttagaggattatgcttgttttgagtggtgcataagggaaaaaactgactttttttccatattctgatttttaacagaaaagcactcatttaatagatgtagggaaactagatattgctgccttttgaatggggtaggggggtttacctggttttatgaccaggcatagtatctattatatttgcttttaaataggcatgatgtggaaataccatcttggtttgagatgcatttgaggattttaatttatggaaagcacaacatatgcaattatatttattgaattcctagatgcagtatggatatttaaattgttaaaactttatgaaaacttggaaaaggttgttcaggtttataaatagctttagtgatgcctcccctctttaaatacctgtcacaccgtatgaatatggtgagatcagactccctaagactcttttcaggttcatttttataatgtttactttttaggacagaacagtagctaaattaaagtaatatccagttcttactgattgagacagagtggaaagaaagacatcattgtacatcactgtcattccaaaggtacagtgtaactctggatggaggaataacttacctatcactacaacacttacaaatgagaatttctcagaatttcattctaggcaagttccactcaacaccagatcaagcaattctatctatttacactattagcctagttttctcatacagtcatcacaagcataggaagatacttcaaaaccaaaaaaaccaaggtgcatcattaatattcatttaattcaaataccaaatagtttacatagggccagcttagaaatagatactaaatccagagctactgcaatcaaagcttatatgagtgaatatggtagagttgcctgctaaaaggcaatgtaatataattgcagctagaaccctacagtggggaatgaggaattttaaacacacatttgattacagccaccaaaaaaatagacgtaaaaataaaggcatttggctggtccaagatgtaattatcaatcagtcagcacctgtgattcttttacttatttttttgtggttttttttttttaaacaaattttagcccaattttcttgagtcattctctctctgcagcagcagaggaagggcctgtacctccctaccaatgacttggtgtccttattttctaccccaagagcagggatattagctgtgtccaaatgggttctgaattctacagactcatcaacatgaggcaaggaatcattgaaaaccacctgtgtctcctttgggagaatgacatatctttagtatttacgtagcttattcttctatatctacatatgcaaagctttccttaacagtaaagggtacatatgcatagtgggaggagatcagacctttacaagtgaaggaaagcaacttcagaaatgaattattttctttgctttattatttttaccaagacagagaagtattgtattgagagataatctattttcataatcaatatgtgcctaaattatatttaaatcatttcactctgtactatattttcaggaattacagaatgtggtattcattcacttaaaggtacctctgtagaaataacctaaaactgcagaaggatctgaaagatctaaacatggtgtgcttagaaactgcagattttagatctaatgtatactgcattaataaatgatataaagtgtttgttgaaaaggagtttcttctcttccttttgaaaatcatcactttctgtattttgcttacatttcttcaatatgtgttgacaaccagccctgtggttctgggtagcaaaggaaatacagtataacttaatttgttatggattagtctttttgaaagtaccattaaagtaaatttatttcttt

SEQ ID NO: 25563 - DNA, 2404 bp, Homo sapiens
ccccaggcaggctgaggagcctaggggcggggtgggaaggaggaccggccgaaccttgggtgtgggacagagtgcgtgcgtgtggtgtgtccccaagggcaggaaggtggcgaagggaggcgaatccgagtgggtggagggaggggaagggcgggaggagaaaaaggtgggaggaggaccaggtgggagggtggcggctcactcaggacccagcgggggcagcgcgatgaggcgggtgaccctgttcctgaacggcagccccaagaacggaaaggtggttgctgtatatggaactttatctgatttgctttctgtggccagcagtaaactcggcataaaagccaccagtgtgtataatgggaaaggtggactgattgatgatattgctttgatcagggatgatgatgttttgtttgtttgtgaaggagagccatttattgatcctcagacagattctaagcctcctgagggattgttaggattccacacagactggctgacattaaatgttggagggcggtactttacaactacacggagcactttagtgaataaagaacctgacagtatgctggcccacatgtttaaggacaaaggtgtctggggaaataagcaagatcatagaggagctttcttaattgaccgaagtcctgagtacttcgaacccattttgaactacttgcgtcatggacagctcattgtaaatgatggcattaatttattgggtgtgttagaagaagcaagattttttggtattgactcattgattgaacacctagaagtggcaataaagaattctcaaccaccggaggatcattcaccaatatcccgaaaggaatttgtccgatttttgctagcaactccaaccaagtcagaactgcgatgccagggtttgaacttcagtggtgctgatctttctcgtttggaccttcgatacattaacttcaaaatggccaatttaagccgctgtaatcttgcacatgcaaatctttgctgtgcaaatcttgaacgagctgatctctctggatcagtgcttgactgtgcgaatctccagggagtcaagatgctctgttctaatgcagaaggagcatccctgaaactgtgtaattttgaggatccttctggtcttaaagccaatttagaaggtgctaatctgaaaggtgtggatatggaaggaagtcagatgacaggaattaacctgagagtggctaccttaaaaaatgcaaagttgaagaactgtaacctcagaggagcaactctggcaggaactgatttagagaattgtgatctgtctgggtgtgatcttcaagaagccaacctgagagggtccaacgtgaagggagctatatttgaagagatgctgacaccactacacatgtcacaaagtgtcagatgagaattttaggggctggaggaagatgtaaaagatgaaaatgttttccttatcacttttctttctccacccactcagttgtctagaagaaataacactgtaaggaaatttaaaaaaaaaacatttagaggattatgcttgttttgagtggtgcataagggaaaaaactgactttttttccatattctgatttttaacagaaaagcactcatttaatagatgtagggaaactagatattgctgccttttgaatggggtaggggggtttacctggttttatgaccaggcatagtatctattatatttgcttttaaataggcatgatgtggaaataccatcttggtttgagatgcatttgaggattttaatttatggaaagcacaacatatgcaattatatttattgaattcctagatgcagtatggatatttaaattgttaaaactttatgaaaacttggaaaaggttgttcaggtttataaatagctttagtgatgcctcccctctttaaatacctgtcacaccgtatgaatatggtgagatcagactccctaagactcttttcaggttcatttttataatgtttactttttaggacagaacagtagctaaattaaagtaatatccagttcttactgattgagacagagtggaaagaaagacatcattgtacatcactgtcattccaaaggtacagtgtaactctggatggaggaataacttacctatcactacaacacttacaaatgagaatttctcagaatttcattctaggcaagttccactcccgtaccagctggtacgggagtggaacaaggaaaacatggaacccaaagggaactgcagcgagagcacaaagattctaggatactgcgagcaaatggggtggaggggtgctctcctgagctacagaaggaatgatctggtggttaagataaaacacaagtcaaacttattcgagttgtccacagtcagcaatgtgatcttcttgatggtctgccattcccgtaca

SEQ ID NO: 25564 - DNA, 2569 bp, Homo sapiens
aacttttccctattctctttattgtcatagcgttgttaatatcttaagatttggaggtaaacggaaatggagaatcagcaactatacttcaaccttattgtaaacagacaaaacactaacaataaaaagttttgaagttaaaaggacgtaagttccaccttctatcctttgtagagatataaaaacaaaacaaaacaaactctgactagacaggctacccgctacacactcaaatcgacctccgcgaccggagggggaagcgcaactggttatggcaacccccctgccaccccggcccataacgcttcaccacgttctgtgccacggccggaagtgacgcataacctgcgacgccagtgcctgccgcccacggccgcaggagtcgggcttcggtcgcaccagagacagcggactttcctccgatggttgcagcagagggatcatgacggggaaaaagtcctcccgggagaaacggcgcaaacgtagcagtcaggaggcggccgcagcgctcgcggccccggacatcgtacccgcgttggccagcggcagcagtggaagcactagcggctgcgggagcgccgggggctgcgggagcgtcagctgctgtgggaacgccaattttagtggaagtgtcaccggcggtgggagcggcggcagctgttggggcgggagcagcgtggagcgcagcgagcgccggaagcggaggagtaccgactcttccagcgtctcgggctccttgcagcaggaaactaaatatattttgccaactttggaaaaagaattattcttggcagagcacagtgaccttgaagaaggtggactggacctgactgtgtcattgaaaccagttagtttctatatatcagacaaaaaagaaatgcttcagcagtgcttctgtattataggagagaaaaagttacagaagatgcttcctgatgtgttaaagaactgttcaatagaagaaattaaaaaactatgccaggaacagttagagctcctgtctgaaaaaaaaattttgaagattcttgagggtgacaatggaatggactctgatatggaagaggaagcagatgatggttctaagatgggatctgatttagtcagtcagcaagacatctgtatagattctgcttcatccgtgagagagaataagcaacctgaaggtttggaattaaaacaaggaaaaggggaagatagtgatgtactcagtataaatgcagatgcttatgacagcgacatagaaggcccatgcaacgaagaagcagctgctcccgaggcaccagaaaatacagtccaaagtgaagctggtcagatagatgacctggagaaagacattgagaaaagtgtgaatgagattctaggactggcagagtctagcccaaacgaacccaaagcagccaccctggctgttcctccaccagaagatgttcaaccttctgcacagcaactggagctgctagaacttgagatgagggcaagagcgattaaagccctaatgaaagctggtgatataaaaaagccagcctaggtatttaacttgattttgaattttaggtatgtttgaacaaagccacatcatttaattttgtatctaaaatttatttggggtcttatatgttatttctcatgtaacccttattaggactcattttagccctaaattacctgtggctgtttctttttatttttttgactacttttatattataaatgtgtgttactgtcttatgaattcatggcaatatagttggatagcctggatactttgttagatgagtatttagctgtgtctgcaaatcttaaaagccattagcaaagagtcgtggtatttttttctttatttttaaatgtttgggcaccaaacctaaaagcaaaagattgacgaagcatgtttctcttaaggctacttgtattttacaatacaatattaaattatttaatttgagaaatttagttttgcttatatgcactttttaaatatatactattttgaagattccttatgtaaatgcaaatttcctagttaaaaccgaataacagagatctgaaatgactgagaaaaacttttttattaaaggaaggaattaatttaaggcaatttttaactatgtagaactaattgcccatgtttaattatagcagacacgccattctaacaggtatttgataccattggatgcattattctaggttttttctttaataaaaatggaacaagttttcatttacattccaagctgtcaggaaatgaagaatattttattatctaggattttatctgatgtagttgcttaaagatctgatgtgctataattccatgaatcagaaataataaaatgctatcattctggatctgaagacttttgatactttttcaaaagcaaaattaatttcaggaacctttgataagttgttgttataattaatctaattttgtatagtttttgtaaataaattaccatccttccacaattagggatgcttttatccccccatcactaattgcagttgtttgataccaaaataaatttacgtagagatccttaacttaaaataaattaattttttc

SEQ ID NO: 25565 - DNA, 3152 bp, Homo sapiens
aacttttccctattctctttattgtcatagcgttgttaatatcttaagatttggaggtaaacggaaatggagaatcagcaactatacttcaaccttattgtaaacagacaaaacactaacaataaaaagttttgaagttaaaaggacgtaagttccaccttctatcctttgtagagatataaaaacaaaacaaaacaaactctgactagacaggctacccgctacacactcaaatcgacctccgcgaccggagggggaagcgcaactggttatggcaacccccctgccaccccggcccataacgcttcaccacgttctgtgccacggccggaagtgacgcataacctgcgacgccagtgcctgccgcccacggccgcaggagtcgggcttcggtcgcaccagagacagcggactttcctccgatggttgcagcagagggatcatgacggggaaaaagtcctcccgggagaaacggcgcaaacgtagcagtcaggaggcggccgcagcgctcgcggccccggacatcgtacccgcgttggccagcggcagcagtggaagcactagcggctgcgggagcgccgggggctgcgggagcgtcagctgctgtgggaacgccaattttagtggaagtgtcaccggcggtgggagcggcggcagctgttggggcgggagcagcgtggagcgcagcgagcgccggaagcggaggagtaccgactcttccagcgtctcgggctccttgcagcaggaaactaaatatattttgccaactttggaaaaagaattattcttggcagagcacagtgaccttgaagaaggtggactggacctgactgtgtcattgaaaccagttagtttctatatatcagacaaaaaagaaatgcttcagcagtgcttctgtattataggagagaaaaagttacagaagatgcttcctgatgtgttaaagaactgttcaatagaagaaattaaaaaactatgccaggaacagttagagctcctgtctgaaaaaaaaattttgaagattcttgagggtgacaatggaatggactctgatatggaagaggaagcagatgatggttctaagatgggatctgatttagtcagtcagcaagacatctgtatagattctgcttcatccgtgagagagaataagcaacctgaaggtttggaattaaaacaaggaaaaggggaagatagtgatgtactcagtataaatgcagatgcttatgacagcgacatagaaggcccatgcaacgaagaagcagctgctcccgaggcaccagaaaatacagtccaaagtgaagctggtcagatagatgacctggagaaagacattgagaaaagtgtgaatgagattctaggactggcagagtctagcccaaacgaacccaaagcagccaccctggctgttcctccaccagaagatgttcaaccttctgcacagcaactggagctgctagaacttgagatgagggcaagagcgattaaagccctaatgaaagctggtgatataaaaaagccagcctaggtatttaacttgattttgaattttaggtatgtttgaacaaagccacatcatttaattttgtatctaaaatttatttggggtcttatatgttatttctcatgtaacccttattaggactcattttagccctaaattacctgtggctgtttctttttatttttttgactacttttatattataaatgtgtgttactgtcttatgaattcatggcaatatagttggatagcctggatactttgttagatgagtatttagctgtgtctgcaaatcttaaaagccattagcaaagagtcgtggtatttttttctttatttttaaatgtttgggcaccaaacctaaaagcaaaagattgacgaagcatgtttctcttaaggctacttgtattttacaatacaatattaaattatttaatttgagaaatttagttttgcttatatgcactttttaaatatatactattttgaagattccttatgtaaatgcaaatttcctagttaaaaccgaataacagagatctgaaatgactgagaaaaacttttttattaaaggaaggaattaatttaaggcaatttttaactatgtagaactaattgcccatgtttaattatagcagacacgccattctaacaggtatttgataccattggatgcattattctaggttttttctttaataaaaatggaacaagttttcatttacattccaagctgtcaggaaatgaagaatattttattatctaggattttatctgatgtagttgcttaaagatctgatgtgctataattccatgaatcagaaataataaaatgctatcattctggatctgaagacttttgatactttttcaaaagcaaaattaatttcaggaacctttgataagttgttgttataattaatctaattttgtatagtttttgtaaataaattaccatccttccacaattagggatgcttttatccccccatcactaattgcagttgtttgataccaaaataaatttacgtagagatccttaacttaaaataaattaattttttcaaaaaacataaatctggaactgttgtttctatatttgataacaaatacagtatattttatttataagccatggtctactgatactgtatgaggactttccttatatataaaagttgcagggattgtgttttattagctgctttaattatgttaattttagagagtttttaaatggaaatagaggacatttatgaaacgctggaattgcagttacaaattctttttgttgttgttgttcctgaacatgccttggaataattctaccattttttccccctccataaatctttctaataaagcatagaaaaagcctatatgattttaaatgcttctcttaagctggtaaacagatttgagttatgagttcattgttattgcttcaagatgaaaagacagtgatataatttttctatttcaacttaaaagtaatagttaatatgctaaagtagtacagaataaactttattgctgcttactaactacaaaatactgtagatggcatctgtatgattaaacatataaagtaaaacaggtctgagggctttgtagatgattaaagtctccaccttcatgaaaaaaaaaa

SEQ ID NO: 25566 - DNA, 3306 bp, Homo sapiens
aacttttccctattctctttattgtcatagcgttgttaatatcttaagatttggaggtaaacggaaatggagaatcagcaactatacttcaaccttattgtaaacagacaaaacactaacaataaaaagttttgaagttaaaaggacgtaagttccaccttctatcctttgtagagatataaaaacaaaacaaaacaaactctgactagacaggctacccgctacacactcaaatcgacctccgcgaccggagggggaagcgcaactggttatggcaacccccctgccaccccggcccataacgcttcaccacgttctgtgccacggccggaagtgacgcataacctgcgacgccagtgcctgccgcccacggccgcaggagtcgggcttcggtcgcaccagagacagcggactttcctccgatggttgcagcagagggatcatgacggggaaaaagtcctcccgggagaaacggcgcaaacgtagcagtcaggaggcggccgcagcgctcgcggccccggacatcgtacccgcgttggccagcggcagcagtggaagcactagcggctgcgggagcgccgggggctgcgggagcgtcagctgctgtgggaacgccaattttagtggaagtgtcaccggcggtgggagcggcggcagctgttggggcgggagcagcgtggagcgcagcgagcgccggaagcggaggagtaccgactcttccagcgtctcgggctccttgcagcaggtgcgtgcgcgcccctctggccgcttcctggagctgctgctttttcggaagaagtcgggcttccagagggatggggcgcaggctggagctcactgctagcgcggcaatctcaaggtcgtccgtccttgaggttcatgttcctacctaagtcctggaaactaaatatattttgccaactttggaaaaagaattattcttggcagagcacagtgaccttgaagaaggtggactggacctgactgtgtcattgaaaccagttagtttctatatatcagacaaaaaagaaatgcttcagcagtgcttctgtattataggagagaaaaagttacagaagatgcttcctgatgtgttaaagaactgttcaatagaagaaattaaaaaactatgccaggaacagttagagctcctgtctgaaaaaaaaattttgaagattcttgagggtgacaatggaatggactctgatatggaagaggaagcagatgatggttctaagatgggatctgatttagtcagtcagcaagacatctgtatagattctgcttcatccgtgagagagaataagcaacctgaaggtttggaattaaaacaaggaaaaggggaagatagtgatgtactcagtataaatgcagatgcttatgacagcgacatagaaggcccatgcaacgaagaagcagctgctcccgaggcaccagaaaatacagtccaaagtgaagctggtcagatagatgacctggagaaagacattgagaaaagtgtgaatgagattctaggactggcagagtctagcccaaacgaacccaaagcagccaccctggctgttcctccaccagaagatgttcaaccttctgcacagcaactggagctgctagaacttgagatgagggcaagagcgattaaagccctaatgaaagctggtgatataaaaaagccagcctaggtatttaacttgattttgaattttaggtatgtttgaacaaagccacatcatttaattttgtatctaaaatttatttggggtcttatatgttatttctcatgtaacccttattaggactcattttagccctaaattacctgtggctgtttctttttatttttttgactacttttatattataaatgtgtgttactgtcttatgaattcatggcaatatagttggatagcctggatactttgttagatgagtatttagctgtgtctgcaaatcttaaaagccattagcaaagagtcgtggtatttttttctttatttttaaatgtttgggcaccaaacctaaaagcaaaagattgacgaagcatgtttctcttaaggctacttgtattttacaatacaatattaaattatttaatttgagaaatttagttttgcttatatgcactttttaaatatatactattttgaagattccttatgtaaatgcaaatttcctagttaaaaccgaataacagagatctgaaatgactgagaaaaacttttttattaaaggaaggaattaatttaaggcaatttttaactatgtagaactaattgcccatgtttaattatagcagacacgccattctaacaggtatttgataccattggatgcattattctaggttttttctttaataaaaatggaacaagttttcatttacattccaagctgtcaggaaatgaagaatattttattatctaggattttatctgatgtagttgcttaaagatctgatgtgctataattccatgaatcagaaataataaaatgctatcattctggatctgaagacttttgatactttttcaaaagcaaaattaatttcaggaacctttgataagttgttgttataattaatctaattttgtatagtttttgtaaataaattaccatccttccacaattagggatgcttttatccccccatcactaattgcagttgtttgataccaaaataaatttacgtagagatccttaacttaaaataaattaattttttcaaaaaacataaatctggaactgttgtttctatatttgataacaaatacagtatattttatttataagccatggtctactgatactgtatgaggactttccttatatataaaagttgcagggattgtgttttattagctgctttaattatgttaattttagagagtttttaaatggaaatagaggacatttatgaaacgctggaattgcagttacaaattctttttgttgttgttgttcctgaacatgccttggaataattctaccattttttccccctccataaatctttctaataaagcatagaaaaagcctatatgattttaaatgcttctcttaagctggtaaacagatttgagttatgagttcattgttattgcttcaagatgaaaagacagtgatataatttttctatttcaacttaaaagtaatagttaatatgctaaagtagtacagaataaactttattgctgcttactaactacaaaatactgtagatggcatctgtatgattaaacatataaagtaaaacaggtctgagggctttgtagatgattaaagtctccaccttcatgaaaaaaaaaa

SEQ ID NO: 25567 - DNA, 3067 bp, Homo sapiens
aacttttccctattctctttattgtcatagcgttgttaatatcttaagatttggaggtaaacggaaatggagaatcagcaactatacttcaaccttattgtaaacagacaaaacactaacaataaaaagttttgaagttaaaaggacgtaagttccaccttctatcctttgtagagatataaaaacaaaacaaaacaaactctgactagacaggctacccgctacacactcaaatcgacctccgcgaccggagggggaagcgcaactggttatggcaacccccctgccaccccggcccataacgcttcaccacgttctgtgccacggccggaagtgacgcataacctgcgacgccagtgcctgccgcccacggccgcaggagtcgggcttcggtcgcaccagagacagcggactttcctccgatggttgcagcagagggatcatgacggggaaaaagtcctcccgggagaaacggcgcaaacgtagcagtcaggaggcggccgcagcgctcgcggccccggacatcgtacccgcgttggccagcggcagcagtggaagcactagcggctgcgggagcgccgggggctgcgggagcgtcagctgctgtgggaacgccaattttagtggaagtgtcaccggcggtgggagcggcggcagctgttggggcgggagcagcgtggagcgcagcgagcgccggaagcggaggagtaccgactcttccagcgtctcgggctccttgcagcaggaaactaaatatattttgccaactttggaaaaagaattattcttggcagagcacagtgaccttgaagaaggtggactggacctgactgtgtcattgaaaccagttagtttctatatatcagacaaaaaagaaatgcttcagcagtgcttctgtattataggagagaaaaagttacagaagatgcttcctgatgtgttaaaggtgacaatggaatggactctgatatggaagaggaagcagatgatggttctaagatgggatctgatttagtcagtcagcaagacatctgtatagattctgcttcatccgtgagagagaataagcaacctgaaggtttggaattaaaacaaggaaaaggggaagatagtgatgtactcagtataaatgcagatgcttatgacagcgacatagaaggcccatgcaacgaagaagcagctgctcccgaggcaccagaaaatacagtccaaagtgaagctggtcagatagatgacctggagaaagacattgagaaaagtgtgaatgagattctaggactggcagagtctagcccaaacgaacccaaagcagccaccctggctgttcctccaccagaagatgttcaaccttctgcacagcaactggagctgctagaacttgagatgagggcaagagcgattaaagccctaatgaaagctggtgatataaaaaagccagcctaggtatttaacttgattttgaattttaggtatgtttgaacaaagccacatcatttaattttgtatctaaaatttatttggggtcttatatgttatttctcatgtaacccttattaggactcattttagccctaaattacctgtggctgtttctttttatttttttgactacttttatattataaatgtgtgttactgtcttatgaattcatggcaatatagttggatagcctggatactttgttagatgagtatttagctgtgtctgcaaatcttaaaagccattagcaaagagtcgtggtatttttttctttatttttaaatgtttgggcaccaaacctaaaagcaaaagattgacgaagcatgtttctcttaaggctacttgtattttacaatacaatattaaattatttaatttgagaaatttagttttgcttatatgcactttttaaatatatactattttgaagattccttatgtaaatgcaaatttcctagttaaaaccgaataacagagatctgaaatgactgagaaaaacttttttattaaaggaaggaattaatttaaggcaatttttaactatgtagaactaattgcccatgtttaattatagcagacacgccattctaacaggtatttgataccattggatgcattattctaggttttttctttaataaaaatggaacaagttttcatttacattccaagctgtcaggaaatgaagaatattttattatctaggattttatctgatgtagttgcttaaagatctgatgtgctataattccatgaatcagaaataataaaatgctatcattctggatctgaagacttttgatactttttcaaaagcaaaattaatttcaggaacctttgataagttgttgttataattaatctaattttgtatagtttttgtaaataaattaccatccttccacaattagggatgcttttatccccccatcactaattgcagttgtttgataccaaaataaatttacgtagagatccttaacttaaaataaattaattttttcaaaaaacataaatctggaactgttgtttctatatttgataacaaatacagtatattttatttataagccatggtctactgatactgtatgaggactttccttatatataaaagttgcagggattgtgttttattagctgctttaattatgttaattttagagagtttttaaatggaaatagaggacatttatgaaacgctggaattgcagttacaaattctttttgttgttgttgttcctgaacatgccttggaataattctaccattttttccccctccataaatctttctaataaagcatagaaaaagcctatatgattttaaatgcttctcttaagctggtaaacagatttgagttatgagttcattgttattgcttcaagatgaaaagacagtgatataatttttctatttcaacttaaaagtaatagttaatatgctaaagtagtacagaataaactttattgctgcttactaactacaaaatactgtagatggcatctgtatgattaaacatataaagtaaaacaggtctgagggctttgtagatgattaaagtctccaccttcatgaaaaaaaaaa

SEQ ID NO: 25568 - DNA, 3232 bp, Homo sapiens
aacttttccctattctctttattgtcatagcgttgttaatatcttaagatttggaggtaaacggaaatggagaatcagcaactatacttcaaccttattgtaaacagacaaaacactaacaataaaaagttttgaagttaaaaggacgtaagttccaccttctatcctttgtagagatataaaaacaaaacaaaacaaactctgactagacaggctacccgctacacactcaaatcgacctccgcgaccggagggggaagcgcaactggttatggcaacccccctgccaccccggcccataacgcttcaccacgttctgtgccacggccggaagtgacgcataacctgcgacgccagtgcctgccgcccacggccgcaggagtcgggcttcggtcgcaccagagacagcggactttcctccgatggttgcagcagagggatcatgacggggaaaaagtcctcccgggagaaacggcgcaaacgtagcagtcaggaggcggccgcagcgctcgcggccccggacatcgtacccgcgttggccagcggcagcagtggaagcactagcggctgcgggagcgccgggggctgcgggagcgtcagctgctgtgggaacgccaattttagtggaagtgtcaccggcggtgggagcggcggcagctgttggggcgggagcagcgtggagcgcagcgagcgccggaagcggaggagtaccgactcttccagcgtctcgggctccttgcagcaggtgcgtgcgcgcccctctggccgcttcctggagctgctgctttttcggaagaagtcgggcttccagagggatggggcgcaggctggagctcactgctagcgcggcaatctcaaggtcgtccgtccttgaggttcatgttcctacctaagtcctggaaactaaatatattttgccaactttggaaaaagaattattcttggcagagcacagtgaccttgaagaaggtggactggacctgactgtgtcattgaaaccagttagtttctatatatcagacaaaaaagaaatgcttcagcagtgcttctgtattataggagagaaaaagttacagaagatgcttcctgatgtgttaaagaactgttcaatagaagaaattaaaaaactatgccaggaacagttagagctcctgtctgaaaaaaaaattttgaagattcttgagggtgacaatggaatggactctgatatggaagaggaagcagatgatggttctaagatgggatctgatttagtcagtcagaaaaggggaagatagtgatgtactcagtataaatgcagatgcttatgacagcgacatagaaggcccatgcaacgaagaagcagctgctcccgaggcaccagaaaatacagtccaaagtgaagctggtcagatagatgacctggagaaagacattgagaaaagtgtgaatgagattctaggactggcagagtctagcccaaacgaacccaaagcagccaccctggctgttcctccaccagaagatgttcaaccttctgcacagcaactggagctgctagaacttgagatgagggcaagagcgattaaagccctaatgaaagctggtgatataaaaaagccagcctaggtatttaacttgattttgaattttaggtatgtttgaacaaagccacatcatttaattttgtatctaaaatttatttggggtcttatatgttatttctcatgtaacccttattaggactcattttagccctaaattacctgtggctgtttctttttatttttttgactacttttatattataaatgtgtgttactgtcttatgaattcatggcaatatagttggatagcctggatactttgttagatgagtatttagctgtgtctgcaaatcttaaaagccattagcaaagagtcgtggtatttttttctttatttttaaatgtttgggcaccaaacctaaaagcaaaagattgacgaagcatgtttctcttaaggctacttgtattttacaatacaatattaaattatttaatttgagaaatttagttttgcttatatgcactttttaaatatatactattttgaagattccttatgtaaatgcaaatttcctagttaaaaccgaataacagagatctgaaatgactgagaaaaacttttttattaaaggaaggaattaatttaaggcaatttttaactatgtagaactaattgcccatgtttaattatagcagacacgccattctaacaggtatttgataccattggatgcattattctaggttttttctttaataaaaatggaacaagttttcatttacattccaagctgtcaggaaatgaagaatattttattatctaggattttatctgatgtagttgcttaaagatctgatgtgctataattccatgaatcagaaataataaaatgctatcattctggatctgaagacttttgatactttttcaaaagcaaaattaatttcaggaacctttgataagttgttgttataattaatctaattttgtatagtttttgtaaataaattaccatccttccacaattagggatgcttttatccccccatcactaattgcagttgtttgataccaaaataaatttacgtagagatccttaacttaaaataaattaattttttcaaaaaacataaatctggaactgttgtttctatatttgataacaaatacagtatattttatttataagccatggtctactgatactgtatgaggactttccttatatataaaagttgcagggattgtgttttattagctgctttaattatgttaattttagagagtttttaaatggaaatagaggacatttatgaaacgctggaattgcagttacaaattctttttgttgttgttgttcctgaacatgccttggaataattctaccattttttccccctccataaatctttctaataaagcatagaaaaagcctatatgattttaaatgcttctcttaagctggtaaacagatttgagttatgagttcattgttattgcttcaagatgaaaagacagtgatataatttttctatttcaacttaaaagtaatagttaatatgctaaagtagtacagaataaactttattgctgcttactaactacaaaatactgtagatggcatctgtatgattaaacatataaagtaaaacaggtctgagggctttgtagatgattaaagtctccaccttcatgaaaaaaaaaa

SEQ ID NO: 25569 - DNA, 2914 bp, Homo sapiens
agaaatatcttaaattactgaaattacttggttactttgattatgattataaagttttaaaaatgatgatagctcctggtacgtatgttacttttctgtataatatttgtgatttgtaacatctttacttcaatttatttatatgaatttaagtacagtgataatgcatacatagagcttttgggtgaatggccttttaggggaaaatcctaattcttcaaaagtctaaaattttaagaaattattcaatatttactatacttttgtttgtgtatcctaaatatctcttcccttatagctactccttgagttaattgcagtgtggagagaaaaatcaagtaatattaaacagatattctctcctatggttttgataaataattatgcaaagaatttgggaatttttgatgaagaagaatttattaaatgaaaacgtatgatgtcatgtacgtattctttatattttaagtagtattgtttaatggttctttattcttttaactttaggaaactaaatatattttgccaactttggaaaaagaattattcttggcagagcacagtgaccttgaagaaggtggactggacctgactgtgtcattgaaaccagttagtttctatatatcagacaaaaaagaaatgcttcagcagtgcttctgtattataggagagaaaaagttacagaagatgcttcctgatgtgttaaagaactgttcaatagaagaaattaaaaaactatgccaggaacagttagagctcctgtctgaaaaaaaaattttgaagattcttgagggtgacaatggaatggactctgatatggaagaggaagcagatgatggttctaagatgggatctgatttagtcagtcagcaagacatctgtatagattctgcttcatccgtgagagagaataagcaacctgaaggtttggaattaaaacaaggaaaaggggaagatagtgatgtactcagtataaatgcagatgcttatgacagcgacatagaaggcccatgcaacgaagaagcagctgctcccgaggcaccagaaaatacagtccaaagtgaagctggtcagatagatgacctggagaaagacattgagaaaagtgtgaatgagattctaggactggcagagtctagcccaaacgaacccaaagcagccaccctggctgttcctccaccagaagatgttcaaccttctgcacagcaactggagctgctagaacttgagatgagggcaagagcgattaaagccctaatgaaagctggtgatataaaaaagccagcctaggtatttaacttgattttgaattttaggtatgtttgaacaaagccacatcatttaattttgtatctaaaatttatttggggtcttatatgttatttctcatgtaacccttattaggactcattttagccctaaattacctgtggctgtttctttttatttttttgactacttttatattataaatgtgtgttactgtcttatgaattcatggcaatatagttggatagcctggatactttgttagatgagtatttagctgtgtctgcaaatcttaaaagccattagcaaagagtcgtggtatttttttctttatttttaaatgtttgggcaccaaacctaaaagcaaaagattgacgaagcatgtttctcttaaggctacttgtattttacaatacaatattaaattatttaatttgagaaatttagttttgcttatatgcactttttaaatatatactattttgaagattccttatgtaaatgcaaatttcctagttaaaaccgaataacagagatctgaaatgactgagaaaaacttttttattaaaggaaggaattaatttaaggcaatttttaactatgtagaactaattgcccatgtttaattatagcagacacgccattctaacaggtatttgataccattggatgcattattctaggttttttctttaataaaaatggaacaagttttcatttacattccaagctgtcaggaaatgaagaatattttattatctaggattttatctgatgtagttgcttaaagatctgatgtgctataattccatgaatcagaaataataaaatgctatcattctggatctgaagacttttgatactttttcaaaagcaaaattaatttcaggaacctttgataagttgttgttataattaatctaattttgtatagtttttgtaaataaattaccatccttccacaattagggatgcttttatccccccatcactaattgcagttgtttgataccaaaataaatttacgtagagatccttaacttaaaataaattaattttttcaaaaaacataaatctggaactgttgtttctatatttgataacaaatacagtatattttatttataagccatggtctactgatactgtatgaggactttccttatatataaaagttgcagggattgtgttttattagctgctttaattatgttaattttagagagtttttaaatggaaatagaggacatttatgaaacgctggaattgcagttacaaattctttttgttgttgttgttcctgaacatgccttggaataattctaccattttttccccctccataaatctttctaataaagcatagaaaaagcctatatgattttaaatgcttctcttaagctggtaaacagatttgagttatgagttcattgttattgcttcaagatgaaaagacagtgatataatttttctatttcaacttaaaagtaatagttaatatgctaaagtagtacagaataaactttattgctgcttactaactacaaaatactgtagatggcatctgtatgattaaacatataaagtaaaacaggtctgagggctttgtagatgattaaagtctccaccttcatgaaaaaaaaaa

SEQ ID NO: 25570 - DNA, 1434 bp, Homo sapiens
aacttttccctattctctttattgtcatagcgttgttaatatcttaagatttggaggtaaacggaaatggagaatcagcaactatacttcaaccttattgtaaacagacaaaacactaacaataaaaagttttgaagttaaaaggacgtaagttccaccttctatcctttgtagagatataaaaacaaaacaaaacaaactctgactagacaggctacccgctacacactcaaatcgacctccgcgaccggagggggaagcgcaactggttatggcaacccccctgccaccccggcccataacgcttcaccacgttctgtgccacggccggaagtgacgcataacctgcgacgccagtgcctgccgcccacggccgcaggagtcgggcttcggtcgcaccagagacagcggactttcctccgatggttgcagcagagggatcatgacggggaaaaagtcctcccgggagaaacggcgcaaacgtagcagtcaggaggcggccgcagcgctcgcggccccggacatcgtacccgcgttggccagcggcagcagtggaagcactagcggctgcgggagcgccgggggctgcgggagcgtcagctgctgtgggaacgccaattttagtggaagtgtcaccggcggtgggagcggcggcagctgttggggcgggagcagcgtggagcgcagcgagcgccggaagcggaggagtaccgactcttccagcgtctcgggctccttgcagcaggtgcgtgcgcgcccctctggccgcttcctggagctgctgctttttcggaagaagtcgggcttccagagggatggggcgcaggctggagctcactgctagcgcggcaatctcaaggtcgtccgtccttgaggttcatgttcctacctaagtcctggtgagccccacactcccatccgtgtcttgaatcttgaacttcaagtttctggatttcctgatcactttttttttaatttattttttaaactcttggctccttccactcctatggtttcagtctgccggaagaatacgagttggaagctagccttcatttcccttgcgagccaaacacttctcccttcgtcttcaccttttcgtagatatggttaactccgcattagagataagaaaattgaggcccaaagaagttaaactttacccacggtcacagagtttgttaatagctcctaggtttgaatccaaatatctgactacaaaagccatgttctttatacgccaccagtctgccaagagaacgccgttttaaaaaagttcataatttgtttgaaaacaaatgaatgaataggtactttaaattcattcaatgaggaaataaagggaaagcgtcaagtcccttttcttgcccctccattagtattttgatacgcggcctcttttaatcactcctcgtgagatacgtgtttttaagt

SEQ ID NO: 25571 - DNA, 176 bp, Homo sapiens
ccactgctaccataggtcccagaatcaaggtgttttctcctctgtttccaagggcagggctgtgtctctggtttcagccaggacaatcccatccagtgcctcaggagtgggctgctctctgaagaaagctgtgtgaacagggcagcttgaaagagccgtggaggtgatgctgccac

SEQ ID NO: 25572 - DNA, 556 bp, Homo sapiens
gtcatttgcaccgtactatgaataagcaccagagtcttttttttggaaagcagattttgatatgaggagtggggtcagaggaagacagaaggaaataagaaccgtgacagcaatgagcagggaagagaggggaaaggggcccctcccacgtgggtgaaaggaactgagtgggcagatggtgaaactgacccacaaatgatgccttcacggctttgtgtcttgattccttttgtccttctcacagtcctgtcacggtggtctgcatgttgtgggagcacacaataactgttagagcttgatggccataaataaaatttgaaagaaggatttggctatatgagacaatttcccacttggcatgatttggcctggagcctgcagactatccacggggtgactaaccatcacttctttactgggcaaggagttttcctgtgtgtttttttcctccttatctattttcatggcatgttgagatggggttggagccaggacttcatgcagaagtgaagagcctggtgctcagcagagggagtggcctgctttcggtcacaca

SEQ ID NO: 25573 - DNA, 394 bp, Homo sapiens
aaatataacccatgatgagaagaaaaaccagtgcgagcaacaaacccagaaaatgaaagatgatagaattagtaaacaacattaaaaatgaaatttatattaagccaaatgcggtggctcactcctgtaaccccagcactttgggaggccaaggtaggaggagaaaaatacttgaggccaagagttcaagaccagtctgggaaacacagggaggccccacctctatgaaaaatttttaaaatgaaagttttgttttttggtttttttttgagacaaggtctcactctgccacccaggctggagtgcagtggcacgacctcgatcactgcaacctctgcctcctgggctcaagcaatcctcccacctcagcaaatttttaacaaagctaaaaaaa

SEQ ID NO: 25574 - DNA, 397 bp, Homo sapiens
tccctctaaaggccaagcccagaagctgcgtgcaacacctctgctcccatcccatcgtcataacgtagtcacggggcagcatgtcgccatcagggagcctgggatgtgtagtctttaactgggcagccgcgtgctctgataaaacatgggaattttaatactaaaggaagaaagggagagtgaatattctgggacaacaagcagactctgccacaggcaatgaccgccctaaccctggggaagatgcagatgccttccctatcatctaattaattcaccatttattgagcatggactctgtgccagatattgtgcacaacacacaggttcttcctttaggcctcctccttacagtctagaaggggcagacagactgatgaacacccagggtgctcag

SEQ ID NO: 25575 - DNA, 955 bp, Homo sapiens
gtgggtggtggggtgggtgggatggctgggggtgggagtgtaagtcccttttcctactttcatgtaaagtgccacaggtgtcttggtttgcatattcaaatattatataggaaaaacagtctgttatgtatttcttcacctagcttcttgtaatatttatggacgtttccagtttttgtaccttcttagctaaagcagttgcctttttgtaatggcaattaatttatatgataaaactttgtatccactgtagttgacagtattggttgctaattaactgccatattgccctgtctttctattaaaaaaatactgtacctgtacttagaggctaacagattcatgtggacatttaccaggcaagaccaacttgtattgtccatgatttctacgatttccactatcttcaaatgaaaaataaacgctgagtagaactgatgttttcagactaactcctttcaactttagcatttgggagtcccagatttctgtttacgtttgtgtcgcctgtttgtctccaaaataagttctgctgctcttgggtcaaaacaaatgattaattcgcatttcctttgaagccattgtgaaaaccttaaaagaaaaaaaaaaaaaaaaaagcaagtatcttttccagttggtttgtcttcagcagcaatttactcttattgaagctgttccttcggagtgtgtgaacagactcaagatattattataaagcatcatccttcaatcaaaggattattttataatatgtgctgtgaaattaacttgagtggcaaagtttggtgcaatgagttatttcattcaatggtgattgatgctgttaagtaatatttttaagtgactcgaggaaatactgtgcatttacagatccatccttaaggatgcaggtctaaaaaaagagtaagaaagaaaaatcaagtggtagatagatagaagaagagagaaaaagaaa

SEQ ID NO: 25576 - DNA, 433 bp, Homo sapiens
gtgggtggtggggtgggtgggatggctgggggtgggagtgtaagtcccttttcctactttcatgtaaagtgccacaggtgtcttggtttgcatattcaaatattatataggaaaaacagtctgttatgtatttcttcacctagcttcttgtaatatttatggacgtttccagtttttgtaccttcttagctaaagcagttgcctttttgtaatggcaattaatttatatgataaaactttgtatccactgtagttgacagtattggttgctaattaactgccatattgccctgtctttctattaaaaaaatactgtacctgtacttagaggctaacagattcatgtggacatttaccaggcaagaccaacttgtattgtccatgatttctacgatttccactatcttcaaatgaaaaataaacgctgagtaga

SEQ ID NO: 25577 - DNA, 400 bp, Homo sapiens
  misc_feature (24)..(24): n is a, c, g, or t
  misc_feature (28)..(28): n is a, c, g, or t
tactactactaaattcgcggccgngtcnacgtaaagtgccacaggtgtcttggtttgcatattcaaatattatataggaaaaacagtctgttatgtatttcttcacctagcttcttgtaatatttatggacgtttccagtttttgtaccttcttagctaaagcagttgcctttttgtaatggcaattaatttatatgataaaactttgtatccactgtagttgacagtattggttgctaattaactgccatattgccctgtctttctattaaaaaaatactgtacctgtacttagaggctaacagattcatgtggacatttaccaggcaagaccaacttgtattgtccatgatttctacgatttccactatcttcaaatgaaaaataaacgctgagtaga

SEQ ID NO: 25578 - DNA, 543 bp, Homo sapiens
attgactaaggagaagtaagggaataatctgtaaaactcaacccaaaatgaagtcttttttcttgctagaggcatattatttatttggatagattaagattttcctctacatgtttaagaagttaatctcaatttggatgtgattagtaataatttcaaatctatatttcacttgagtttcttgcagtgtaattatgtttgttgtctgtttgggaatactaaaacaatcattttattgtagtatatttaatacttttaccatatttcttcttacttaaacgaatacatataaataacaaccatgagaatctcaagcatatttgaaatattttaatatcattatgaaagtagaaagataaaattagagtgctccaaaaatatttaaaaattctagtccaatatcctcatttagagaaagaaaccgaggcccagaaatgtaaaagcaagtgaataaaattagtggtatggccagaattaggtactttgttcatgaaaatatttagacatttttgaggtgagttaggactggcagggcacggaggg

SEQ ID NO: 25579 - DNA, 378 bp, Homo sapiens
cggattacaggcatgagccaccgcgcctggccatggccctggtttctaatgagccaagctgacctccacactctcacaagacgaccgtgcctccaggtttgtgcacatggtgtctcgcaaccaagcgcacacacactaccacttgtctgggcctgcgagctcctttcagctttactcaagcaccatggtctctggaaggtcttaggccccccaggtgtgtgttcccatagcccaactccccagatcttgttaagatcttgttaataccaaatgccatccttttggcttttgttttttctagagacacggtctcaccctgttgcccaggctggagtgcagtggtgcaatcttggctcacagcagcctccacctcgtggt

SEQ ID NO: 25580 - DNA, 410 bp, Homo sapiens
ttttttgagacggagtcttgttctgtcgcctaggctggagtcccgtggcgccatctcggctcactgcaacctctgcctcctgggttcaagcgattctcctgcctcagcctcccaagtagctaagactacaggcatccaccaccatgcccagctaatttttgtatttttagtagagacagggtttcaccatgttggccaggctggccttgaactcctgacctcgtgacctgccagcctcagcagttaccaccaagaaaataatactggatacctaccgcacatgttaaagcaggataaatctaaatgtatcaaatataaagtttaaaagaaaatgtgatatagtttataaccctggagtgcaggagactttctaactataacttaaaacccatacactataaaaggttatt

SEQ ID NO: 25581 - DNA, 375 bp, Homo sapiens
taatgatgagtgacgttgagcatcttttcacattcgtgttggccgtctgtacatctttggagaaatgtctattcaagttctttcctaatgagaccactctctttgaccacagaaaatgagaccaggcaggccataaataatatccagtgatgtgcaggagccagcttatatataatgtgaaaacaaataattcaaaatcaaagctgttggaaactggaattattttgagtcttaaaggaatgtgcttatgggacctttaatccctctcgcctggggcgataggtgtgagtcactccgcctggccttgaataaactcctttaaactggattctgatcctttcaattatttcaggttgccaataacctcatcaaaat

SEQ ID NO: 25582 - DNA, 413 bp, Homo sapiens
ctcaaattcctcagagaccagcagcgggagccaaagcctgggatgctcttacaacctgcaagcgaccagagaggtaggaagacctcccgcccctcatctctccttgcagctccctctgccctaccaggaggggatgtcttagagccagccatcccttctctccaggctcagctccagacccaagctccttgtccagtttgcaatgggaaaggagaagagctttgcattggagaagagactggagtcttagctggactggtccaagtttcaataaccaaatgtgtgaggagaaacatggactcagataagaaatcattcagagataggaaagagaggttcgatgagcgtattttaaagcagtgacggtaaagacggaacatttatgagcacatttccgtgaattaaggctcttg

SEQ ID NO: 25583 - DNA, 558 bp, Homo sapiens
actgcactccagcctggttaacagagtgagactccatctcaaaaaaaaaaaaaaaatgttatcgtgaaagcagaagagaataatacctggcttatacttgagaaaggtattagccttacagaagaagaaagaaaccccttacaatgtgacagaagaagatacacatatggatgcagacaaagatgtaagtttgtttgcagaaagaaagtgaggtctttctcactattgtaagggagaaaggaaaggagtaggaagttgaagcgactggtaaaggtttaaatcactgctatgatgaatatgaaagaactgagtagagatgcataggggagttataggcactggagaatcagttgagattaaagaatctggatgtatgtggcatcagactacatgattatgagatatctccagcagtgatcatgtggtcaacaaacaagatttagaaaaaaagacttttctgttttatttcaactatttggcatgtcagctttacttagaataacagaagtattggacatatttaaatgaaatacaataaaactaatgtgtatcaagtgt

SEQ ID NO: 25584 - DNA, 276 bp, Homo sapiens
ataatatatatattatatatatatatatatatacacatatgtatatataacttaaagttccattgtacgtagccggacaataaaatctggaaaccagcatgaaaccctgttattcacatgttaaaatgttgaaactatgaccaaaatgtgaaaactgctagagctatcagaaagagacaagacaaaaaccttctttcatatgtataaactaaatgtgataatctcaaaaaacttttcaaaattatgattaccttccagtttaaaaactttaatcct

SEQ ID NO: 25585 - DNA, 356 bp, Homo sapiens
gatctgctgctctgattgctgcttttaaccaaaaggtacagataaagaggtggatggccactgttgttacacctccccttattattgcaagcctctccccatccagctgaagtgacttcctggggatttaaacggccactgcccttctctcctctcatttttctgttttgatgttgttgttgttgtttgtttgtttgttgtttttgtttttgttttgagagccgcacattaaagaccagggcattcaaaaccaattgcttatacgggaaaaattaggaagtgacaagtcatgcccagggaaatgtgtaggctcagaagagacctgagaagactttaagttagcgtgtcagaatact

SEQ ID NO: 25586 - DNA, 501 bp, Homo sapiens
agaaaggctgggctgggctaagctgggtgtgagtcaggggaaacatcgttcctgctgagaggcccggggcacccagagtcccacccaggcacccagagtccagtcactctggaaagaagtttgccccagccatgcagactccccaagggctttgtgctgagggtggggctcaacgtcaggacgcacccttgcatccctggacctggcagccctgtccccctcgggattgagctcaggggaacagagcctggggaacccgtgcccctccccctctccaaaagaagccaggagacctgcggaagggagggcttgaaggcagatggctgagccattttctgcctccgtgagggctgattgaagggcaatgaggcagctaatgcgaagaaagatagaaatttacttgctttaacttcatacggtccacagtgaaagagttcattcagtcgccggcccgccatagctgatggatgaataaaccatttgcggcatcgatcatgcctc

SEQ ID NO: 25587 - DNA, 304 bp, Homo sapiens
tagagacgagatctcactttgttgcccagtctagacttgaactcctggcctcaagtgatccttctgtctcagcctccgaaagtgttggaattacaggtgttgagccactgcacctagccctaattttcctatttcttttctctttttttccaattttttaaaatagcaacaaggtctcactatgttgcccaggctggtcttaaactcttgaactcaagtgatcctcctgcctcagcctctcaaattgctttctatttctgtttttgactcctggatcatttagaagtgtattgtttagttttta

SEQ ID NO: 25588 - DNA, 5936 bp, Homo sapiens
gtgatggcatctcacactgcaaccgcacgtgcttggaggactgtggccatggtgtgtgcagtggccccccggactttacctgcgtgtgtgacctaggctggacatcagacctgccccctcccacacccgccccgggtccgccagccccccgctgctcccgggactgtggctgcagcttccacagccactgccgcaagcggggccctggcttctgcgacgagtgccaggactggacatggggggagcactgcgaacgatgccggcccggcagcttcggcaacgccacaggctctaggggctgccggccctgccagtgcaacgggcacggggacccacgccgtggccactgcgacaacctcagtgggctctgcttctgccaggaccacaccgagggtgcccactgccagctctgctccccaggctattatggggatccccgggccggtggttcctgctttcgggagtgtgggggtcgcgccctcctcaccaacgtgtcctcagtggcactgggctcacgccgggtcggggggctgctgcctccaggtggcggggctgcaagagccgggcctggcctgtcctactgtgtgtgggttgtctcggccactgaggagctacagccctgtgctcccgggaccctctgtcccccactcaccctcaccttctcccccgacagcagcaccccctgcacgctgagctacgtcctggcgtttgatggattcccacgcttcctggacactggtgttgtccagtcggaccgcagcctcatagctgccttctgcggccagcgacgggacaggcccctcactgttcaggccctgtctgggctgctcgtgctgcactgggaggccaatggctcctcatcctggggcttcaatgcttcggtgggctctgcccgctgtgggtcagggggccccgggagctgtcccgtcccccaggaatgcgtgccccaggacggtgctgcaggtgcggggctctgccgatgtcctcagggctgggctggcccacactgccgcatggctctgtgtcctgagaactgcaatgcccacactggggcaggaacttgtaaccagagcctgggtgtgtgcatctgtgccgagggcttcgggggccccgactgcgccaccaagctggatggcgggcagctggtctgggagaccctcatggacagccgcctctcagccgacactgccagccgcttcctgcaccgcctgggccacaccatggtggatggacccgatgccaccttgtggatgtttgggggcctgggcctgccccaggggctgctgggaaacctgtacaggtactcagtgagtgagcggcggtggacacagatgctggcgggagccgaggacgggggcccaggcccatcgccccgctccttccatgcagccgcatatgtgcccgctggccgtggtgccatgtatctgctggggggacttaccgctggaggcgtcacccgtgatttctgggtcctcaacctcaccaccctgcaatggcggcaggagaaggccccccagaccgtggagctgccagccgttgctggtcacacccttactgcccgccgaggcctgtctctgctcctggtgggcggttactccccggaaaatggcttcaaccagcagctgctggagtaccagctggcaaccggcacctgggtgtcaggagcccagagtgggacaccccccacaggtctctatggtcactctgctgtctaccacgaggccaccgactccctctacgtgtttggggggttccgattccatgtggagctggcggccccatcccccgagctctactccctgcactgtcctgaccgcacctggagtctgctggccccttctcagggggcaaagccccgcccccggcttttccacgcctcagccctgttaggggacaccatggtggttcttggggggcgctcggaccctgacgagttcagcagcgacgttctgctctaccaggtcaactgcaatgcctggcttctgcccgacctcacccgctcggcctctgtggggcccccaatggaggagtctgtggcccatgctgtggcagcagtcgggagccgcctgtatatctctgggggtttcgggggagtggccctgggccgcctgctggcactgaccctgccccctgacccctgccgcctgctgtcctcacctgaagcttgtaaccagtctggggcctgcacctggtgccatggggcctgcttgtccggggatcaggcccacaggctgggctgcgggggctccccctgctccccaatgcctcgctccccggaggaatgtcgacgtctccggacctgcagtgagtgcctggcccgccatcctcggaccctgcaacctggagatggagaggcgtccaccccccgctgtaagtggtgtaccaactgccccgaaggtgcttgcattggacgcaatgggtcctgcacctctgagaatgactgtcggatcaaccagcgagaggtcttctgggcagggaactgctccgaggctgcgtgcggggctgctgactgcgagcagtgcacgcgggagggcaagtgcatgtggacgcggcagttcaagaggacaggggagacccgccgcatcctctccgtgcagcccacctatgactggacgtgcttcagccactctctgctgaatgtgtcccccatgccggtggaatcatcacccccactgccctgccccaccccttgtcacctcctacccaactgtacctcctgcctggactctaagggagcagatgggggctggcagcactgtgtttggagcagcagcctgcagcagtgtctgagcccttcctacctgcccctgcgatgtatggccggaggctgtgggcggctgctccggggacctgagagctgctccctgggctgtgctcaggcaactcagtgcgccttgtgcctgcggcgcccccattgcggctggtgtgcctgggggggccaggatgggggtggccgctgcatggagggtggactcagcggcccccgtgatgggctgacatgtgggcgtccgggggcctcctgggccttcctgtcctgcccccctgaggacgagtgtgcaaacgggcaccacgactgcaacgagacgcagaattgccacgaccagccccacggctatgagtgcagctgcaagaccggctataccatggacaacatgacagggctgtgccgccctgtgtgcgcccagggctgcgtgaacggctcatgtgtggagcccgaccactgccgctgccactttggctttgtgggccgcaactgctccacggaatgccgctgcaaccgccacagtgaatgcgctggtgttggggcgcgtgaccactgcttgctctgccgcaaccacaccaagggcagccactgtgagcagtgcctcccgctgtttgtgggttcagctgtcggaggcgggacctgccggccctgccacgccttttgtcgtggaaatagccacatctgcatctccaggaaggagttacaaatgtccaagggagagccaaagaagtactcactggacccagaggagattgaaaactgggtgacagagggtcctagtgaagacgaggccgtgtgcgtgaactgccagaataacagctatggggagaaatgcgagagctgcctgcagggctacttcctcctggacgggaagtgcaccaatgcgccaagtgccgggaatcatttcacgggagtccgctgggcggccagcagtgctaccgcctcatctcggtggagcaggagtgctgcctggaccccacgtcccagaccaactgcttccatgagcccaaacgccgggcgctaggccccggccgcactgtcctctttggcgtgcagcccaaattcaccaacgtggacatccgcctgacgctggacgtgaccttcggggccgtggacctctatgtctccacctcctatgacaccttcgtggtccgtgtggcccctgacactggcgtccatactgtacacatccagccacccccagccccaccacctccaccaccccctgcagatggtgggccccggggggctggggatccaggaggagcaggggccagcagtgggccgggcgccccagcagagccacgggtacgggaggtatggccgcggggcctgattacctacgtgacggtgacggagccgtcggcagtgctggtggtccgcggcgtgcgggaccggctggtcatcacctacccacacgagcaccatgccctcaagtcgagccgcttctacctgctgctgctgggcgtgggagacccaagtgggcccggcgccaacggctcagccgactcgcagggcctgctcttcttccggcaggaccaggcccacattgacctgtttgtcttcttctccgtcttcttctcctgcttcttcctcttcctctcactctgtgtgctcctctggaaggccaagcaggctctggaccagcggcaggagcagcgccggcacttgcaggagatgaccaagatggccagccgccccttcgccaaggtcaccgtctgcttcccacctgaccctactgccccggcctccgcctggaagccggctgggctcccacctcccgccttccgccgctctgagcccttcctggcacccctgctgctgacaggggccggtgggccctggggacccatgggagggggctgctgcccaccagccatccccgccaccactgctgggctgcgagctgggcccatcactctcgagcccacagaagatggcatggctggcgtggccacactgctgctccagctgcctggcgggccccatgcacccaacggcgcctgcctggggtcagccctcgtcacactgcggcacaggctgcacgagtactgtgggggtggtgggggtgctgggggcagtgggcatgggactggtgcgggccggaagggactgttgagccaggacaacctcaccagcatgtccctctgacatgcccagggttctcatccacagcagctgggtcacctgatagggccgccctggacttggggtccctccacctgggggcccctggacactgtctacttggagaccactggcccccttcccccagggttgcccagatggggcctcctttgttctgcattcagcagctatttatcgagtacctactctgtcaggcactgtcataggcgtggggcaaagcaggaaccaagagacgaggttccctgatctcatgggacttaggttctggtgaagggagacaatcagtgcacatgcacacaccccacacgcatacacacatgaacacatgcacatgtgcacacacaagtaagatggcttcagagagggagaagcactgtgaggcctccagaggatgtggcagtgagggacgatggggtgaagtcagctgggcattcaaagaagctagactgagaacgcctgagaagaaccagctacgggaagagctttgggaagcaaaggcagaggccctggggtgggagcaggcttgttttattggaaggaccagaaaactggtaagtgtgacccagatcaagtgtgaggagatgaggctggggatagtcaggggctggatcacccagggccttgtgggccccacatagggttttgggttttattctcagggcaatgggaagctgttggatggtttgatgaaggggagtgacaggatccgatgtacctatttaagaatttaagagggtcgggtgcggtggctcatgcctataatcctagcactttgagaggccaaggtgggctgatcacaaggtcaagagttcgtgaccagcctggccaatatggtgaaaccccatgtctactaaaaatacaaaaattagctgggcatggtggcacacacttgtagtccgagctactcgggaggctgaggcagaagaatcgcttgaacccaggaggcggaggttgcagtgagctcagattgcgtcactgcactccaacctgggtgacagagcgagactccacctcaaaaaaaaaa

SEQ ID NO: 25589 - DNA, 5192 bp, Homo sapiens
gtgatggcatctcacactgcaaccgcacgtgcttggaggactgtggccatggtgtgtgcagtggccccccggactttacctgcgtgtgtgacctaggctggacatcagacctgccccctcccacacccgccccgggtccgccagccccccgctgctcccgggactgtggctgcagcttccacagccactgccgcaagcggggccctggcttctgcgacgagtgccaggactggacatggggggagcactgcgaacgatgccggcccggcagcttcggcaacgccacaggctctaggggctgccggccctgccagtgcaacgggcacggggacccacgccgtggccactgcgacaacctcagtgggctctgcttctgccaggaccacaccgagggtgcccactgccagctctgctccccaggctattatggggatccccgggccggtggttcctgctttcgggagtgtgggggtcgcgccctcctcaccaacgtgtcctcagtggcactgggctcacgccgggtcggggggctgctgcctccaggtggcggggctgcaagagccgggcctggcctgtcctactgtgtgtgggttgtctcggccactgaggagctacagccctgtgctcccgggaccctctgtcccccactcaccctcaccttctcccccgacagcagcaccccctgcacgctgagctacgtcctggcgtttgatggattcccacgcttcctggacactggtgttgtccagtcggaccgcagcctcatagctgccttctgcggccagcgacgggacaggcccctcactgttcaggccctgtctgggctgctcgtgctgcactgggaggccaatggctcctcatcctggggcttcaatgcttcggtgggctctgcccgctgtgggtcagggggccccgggagctgtcccgtcccccaggaatgcgtgccccaggacggtgctgcaggtgcggggctctgccgatgtcctcagggctgggctggcccacactgccgcatggctctgtgtcctgagaactgcaatgcccacactggggcaggaacttgtaaccagagcctgggtgtgtgcatctgtgccgagggcttcgggggccccgactgcgccaccaagctggatggcgggcagctggtctgggagaccctcatggacagccgcctctcagccgacactgccagccgcttcctgcaccgcctgggccacaccatggtggatggacccgatgccaccttgtggatgtttgggggcctgggcctgccccaggggctgctgggaaacctgtacaggtactcagtgagtgagcggcggtggacacagatgctggcgggagccgaggacgggggcccaggcccatcgccccgctccttccatgcagccgcatatgtgcccgctggccgtggtgccatgtatctgctggggggacttaccgctggaggcgtcacccgtgatttctgggtcctcaacctcaccaccctgcaatggcggcaggagaaggccccccagaccgtggagctgccagccgttgctggtcacacccttactgcccgccgaggcctgtctctgctcctggtgggcggttactccccggaaaatggcttcaaccagcagctgctggagtaccagctggcaaccggcacctgggtgtcaggagcccagagtgggacaccccccacaggtctctatggtcactctgctgtctaccacgaggccaccgactccctctacgtgtttggggggttccgattccatgtggagctggcggccccatcccccgagctctactccctgcactgtcctgaccgcacctggagtctgctggccccttctcagggggcaaagccccgcccccggcttttccacgcctcagccctgttaggggacaccatggtggttcttggggggcgctcggaccctgacgagttcagcagcgacgttctgctctaccaggtcaactgcaatgcctggcttctgcccgacctcacccgctcggcctctgtggggcccccaatggaggagtctgtggcccatgctgtggcagcagtcgggagccgcctgtatatctctgggggtttcgggggagtggccctgggccgcctgctggcactgaccctgccccctgacccctgccgcctgctgtcctcacctgaagcttgtaaccagtctggggcctgcacctggtgccatggggcctgcttgtccggggatcaggcccacaggctgggctgcgggggctccccctgctccccaatgcctcgctccccggaggaatgtcgacgtctccggacctgcagtgagtgcctggcccgccatcctcggaccctgcaacctggagatggagaggcgtccaccccccgctgtaagtggtgtaccaactgccccgaaggtgcttgcattggacgcaatgggtcctgcacctctgagaatgactgtcggatcaaccagcgagaggtcttctgggcagggaactgctccgaggctgcgtgcggggctgctgactgcgagcagtgcacgcgggagggcaagtgcatgtggacgcggcagttcaagaggacaggggagacccgccgcatcctctccgtgcagcccacctatgactggacgtgcttcagccactctctgctgaatgtgtcccccatgccggtggaatcatcacccccactgccctgccccaccccttgtcacctcctacccaactgtacctcctgcctggactctaagggagcagatgggggctggcagcactgtgtttggagcagcagcctgcagcagtgtctgagcccttcctacctgcccctgcgatgtatggccggaggctgtgggcggctgctccggggacctgagagctgctccctgggctgtgctcaggcaactcagtgcgccttgtgcctgcggcgcccccattgcggctggtgtgcctgggggggccaggatgggggtggccgctgcatggagggtggactcagcggcccccgtgatgggctgacatgtgggcgtccgggggcctcctgggccttcctgtcctgcccccctgaggacgagtgtgcaaacgggcaccacgactgcaacgagacgcagaattgccacgaccagccccacggctatgagtgcagctgcaagaccggctataccatggacaacatgacagggctgtgccgccctgtgtgcgcccagggctgcgtgaacggctcatgtgtggagcccgaccactgccgctgccactttggctttgtgggccgcaactgctccacggaatgccgctgcaaccgccacagtgaatgcgctggtgttggggcgcgtgaccactgcttgctctgccgcaaccacaccaagggcagccactgtgagcagtgcctcccgctgtttgtgggttcagctgtcggaggcgggacctgccggccctgccacgccttttgtcgtggaaatagccacatctgcatctccaggaaggagttacaaatgtccaagggagagccaaagaagtactcactggacccagaggagattgaaaactgggtgacagagggtcctagtgaagacgaggccgtgtgcgtgaactgccagaataacagctatggggagaaatgcgagagctgcctgcagggctacttcctcctggacgggaagtgcaccaagccaagcaggctctggaccagcggcaggagcagcgccggcacttgcaggagatgaccaagatggccagccgccccttcgccaaggtcaccgtctgcttcccacctgaccctactgccccggcctccgcctggaagccggctgggctcccacctcccgccttccgccgctctgagcccttcctggcacccctgctgctgacaggggccggtgggccctggggacccatgggagggggctgctgcccaccagccatccccgccaccactgctgggctgcgagctgggcccatcactctcgagcccacagaagatggcatggctggcgtggccacactgctgctccagctgcctggcgggccccatgcacccaacggcgcctgcctggggtcagccctcgtcacactgcggcacaggctgcacgagtactgtgggggtggtgggggtgctgggggcagtgggcatgggactggtgcgggccggaagggactgttgagccaggacaacctcaccagcatgtccctctgacatgcccagggttctcatccacagcagctgggtcacctgatagggccgccctggacttggggtccctccacctgggggcccctggacactgtctacttggagaccactggcccccttcccccagggttgcccagatggggcctcctttgttctgcattcagcagctatttatcgagtacctactctgtcaggcactgtcataggcgtggggcaaagcaggaaccaagagacgaggttccctgatctcatgggacttaggttctggtgaagggagacaatcagtgcacatgcacacaccccacacgcatacacacatgaacacatgcacatgtgcacacacaagtaagatggcttcagagagggagaagcactgtgaggcctccagaggatgtggcagtgagggacgatggggtgaagtcagctgggcattcaaagaagctagactgagaacgcctgagaagaaccagctacgggaagagctttgggaagcaaaggcagaggccctggggtgggagcaggcttgttttattggaaggaccagaaaactggtaagtgtgacccagatcaagtgtgaggagatgaggctggggatagtcaggggctggatcacccagggccttgtgggccccacatagggttttgggttttattctcagggcaatgggaagctgttggatggtttgatgaaggggagtgacaggatccgatgtacctatttaagaatttaagagggtcgggtgcggtggctcatgcctataatcctagcactttgagaggccaaggtgggctgatcacaaggtcaagagttcgtgaccagcctggccaatatggtgaaaccccatgtctactaaaaatacaaaaattagctgggcatggtggcacacacttgtagtccgagctactcgggaggctgaggcagaagaatcgcttgaacccaggaggcggaggttgcagtgagctcagattgcgtcactgcactccaacctgggtgacagagcgagactccacctcaaaaaaaaaa

SEQ ID NO: 25590 - DNA, 3140 bp, Homo sapiens
gtgatggcatctcacactgcaaccgcacgtgcttggaggactgtggccatggtgtgtgcagtggccccccggactttacctgcgtgtgtgacctaggctggacatcagacctgccccctcccacacccgccccgggtccgccagccccccgctgctcccgggactgtggctgcagcttccacagccactgccgcaagcggggccctggcttctgcgacgagtgccaggactggacatggggggagcactgcgaacgatgccggcccggcagcttcggcaacgccacaggctctaggggctgccggccctgccagtgcaacgggcacggggacccacgccgtggccactgcgacaacctcagtgggctctgcttctgccaggaccacaccgagggtgcccactgccagctctgctccccaggctattatggggatccccgggccggtggttcctgctttcgggagtgtgggggtcgcgccctcctcaccaacgtgtcctcagtggcactgggctcacgccgggtcggggggctgctgcctccaggtggcggggctgcaagagccgggcctggcctgtcctactgtgtgtgggttgtctcggccactgaggagctacagccctgtgctcccgggaccctctgtcccccactcaccctcaccttctcccccgacagcagcaccccctgcacgctgagctacgtcctggcgtttgatggattcccacgcttcctggacactggtgttgtccagtcggaccgcagcctcatagctgccttctgcggccagcgacgggacaggcccctcactgttcaggccctgtctgggctgctcgtgctgcactgggaggccaatggctcctcatcctggggcttcaatgcttcggtgggctctgcccgctgtgggtcagggggccccgggagctgtcccgtcccccaggaatgcgtgccccaggacggtgctgcaggtgcggggctctgccgatgtcctcagggctgggctggcccacactgccgcatggctctgtgtcctgagaactgcaatgcccacactggggcaggaacttgtaaccagagcctgggtgtgtgcatctgtgccgagggcttcgggggccccgactgcgccaccaagctggatggcgggcagctggtctgggagaccctcatggacagccgcctctcagccgacactgccagccgcttcctgcaccgcctgggccacaccatggtggatggacccgatgccaccttgtggatgtttgggggcctgggcctgccccaggggctgctgggaaacctgtacaggtactcagtgagtgagcggcggtggacacagatgctggcgggagccgaggacgggggcccaggcccatcgccccgctccttccatgcagccgcatatgtgcccgctggccgtggtgccatgtatctgctggggggacttaccgctggaggcgtcacccgtgatttctgggtcctcaacctcaccaccctgcaatggcggcaggagaaggccccccagaccgtggagctgccagccgttgctggtcacacccttactgcccgccgaggcctgtctctgctcctggtgggcggttactccccggaaaatggcttcaaccagcagctgctggagtaccagctggcaaccggcacctgggtgtcaggagcccagagtgggacaccccccacaggtctctatggtcactctgctgtctaccacgaggccaccgactccctctacgtgtttggggggttccgattccatgtggagctggcggccccatcccccgagctctactccctgcactgtcctgaccgcacctggagtctgctggccccttctcagggggcaaagccccgcccccggcttttccacgcctcagccctgttaggggacaccatggtggttcttggggggcgctcggaccctgacgagttcagcagcgacgttctgctctaccaggtcaactgcaatgcctggcttctgcccgacctcacccgctcggcctctgtggggcccccaatggaggagtctgtggcccatgctgtggcagcagtcgggagccgcctgtatatctctgggggtttcgggggagtggccctgggccgcctgctggcactgaccctgccccctgacccctgccgcctgctgtcctcacctgaagcttgtaaccagtctggggcctgcacctggtgccatggggcctgcttgtccggggatcaggcccacaggctgggctgcgggggctccccctgctccccaatgcctcgctccccggaggaatgtcgacgtctccggacctgcagtgagtgcctggcccgccatcctcggaccctgcaacctggagatggagaggcgtccaccccccgctgtaagtggtgtaccaactgccccgaaggtgcttgcattggacgcaatgggtcctgcacctctgagaatgactgtcggatcaaccagcgagaggtcttctgggcagggaactgctccgaggctgcgtgcggggctgctgactgcgagcagtgcacgcgggagggcaagtgcatgtggacgcggcagttcaagaggacaggggagacccgccgcatcctctccgtgcagcccacctatgactggacgtgcttcagccactctctgctgaatgtgtcccccatgccggtggaatcatcacccccactgccctgccccaccccttgtcacctcctacccaactgtacctcctgcctggactctaagggagcagatgggggctggcagcactgtgtttggagcagcagcctgcagcaggtactgcacctggccaggaccgtgccaggcaagggcccgggcaggtctccctcctctctgcgctggcagggacctttcttccaccatctcctccaccctcctccttccatctccctggctctagctgcagtcgtgcttccttctcgtgccaccatctctttcctccctcgttgcctcatgagggtccctgttgtgtcctccagccatgcttctgtgtgtgccactttcccaacccctggcctctgcctctccaactcttgtccatggtatcatggtctcctcatcctttccatgactttaaaaaaattttaatttaattttttgtttttaattttgtcgatataattcataggttca

SEQ ID NO: 25591 - DNA, 2430 bp, Homo sapiens
gtgatggcatctcacactgcaaccgcacgtgcttggaggactgtggccatggtgtgtgcagtggccccccggactttacctgcgtgtgtgacctaggctggacatcagacctgccccctcccacacccgccccgggtccgccagccccccgctgctcccgggactgtggctgcagcttccacagccactgccgcaagcggggccctggcttctgcgacgagtgccaggactggacatggggggagcactgcgaacgatgccggcccggcagcttcggcaacgccacaggctctaggggctgccggccctgccagtgcaacgggcacggggacccacgccgtggccactgcgacaacctcagtgggctctgcttctgccaggaccacaccgagggtgcccactgccagctctgctccccaggctattatggggatccccgggccggtggttcctgctttcgggagtgtgggggtcgcgccctcctcaccaacgtgtcctcagtggcactgggctcacgccgggtcggggggctgctgcctccaggtggcggggctgcaagagccgggcctggcctgtcctactgtgtgtgggttgtctcggccactgaggagctacagccctgtgctcccgggaccctctgtcccccactcaccctcaccttctcccccgacagcagcaccccctgcacgctgagctacgtcctggcgtttgatggattcccacgcttcctggacactggtgttgtccagtcggaccgcagcctcatagctgccttctgcggccagcgacgggacaggcccctcactgttcaggccctgtctgggctgctcgtgctgcactgggaggccaatggctcctcatcctggggcttcaatgcttcggtgggctctgcccgctgtgggtcagggggccccgggagctgtcccgtcccccaggaatgcgtgccccaggacggtgctgcaggtgcggggctctgccgatgtcctcagggctgggctggcccacactgccgcatggctctgtgtcctgagaactgcaatgcccacactggggcaggaacttgtaaccagagcctgggtgtgtgcatctgtgccgagggcttcgggggccccgactgcgccaccaagctggatggcgggcagctggtctgggagaccctcatggacagccgcctctcagccgacactgccagccgcttcctgcaccgcctgggccacaccatggtggatggacccgatgccaccttgtggatgtttgggggcctgggcctgccccaggggctgctgggaaacctgtacaggtactcagtgagtgagcggcggtggacacagatgctggcgggagccgaggacgggggcccaggcccatcgccccgctccttccatgcagccgcatatgtgcccgctggccgtggtgccatgtatctgctggggggacttaccgctggaggcgtcacccgtgatttctgggtcctcaacctcaccaccctgcaatggcggcaggagaaggccccccagaccgtggagctgccagccgttgctggtcacacccttactgcccgccgaggcctgtctctgctcctggtgggcggttactccccggaaaatggcttcaaccagcagctgctggagtaccagctggcaaccggcacctgggtgtcaggagcccagagtgggacaccccccacaggtctctatggtcactctgctgtctaccacgaggccaccgactccctctacgtgtttggggggttccgattccatgtggagctggcggccccatcccccgagctctactccctgcactgtcctgaccgcacctggagtctgctggccccttctcagggggcaaagccccgcccccggcttttccacgcctcagccctgttaggggacaccatggtggttcttggggggcgctcggaccctgacgagttcagcagcgacgttctgctctaccaggtcaactgcaatgcctggcttctgcccgacctcacccgctcggcctctgtggggcccccaatggaggagtctgtggcccatgctgtggcagcagtcgggagccgcctgtatatctctgggggtttcgggggagtggccctgggccgcctgctggcactgaccctgccccctgacccctgccgcctgctgtcctcacctgaagcttgtaaccagtctggggcctgcacctggtgccatggggcctgcttgtccggggatcaggcccacaggctgggctgcgggggctccccctgctccccaatgcctcgctccccggaggaatgtcgacgtctccggacctgcagtgagtgcctggcccgccatcctcggaccctgcaacctggagatggagaggtggtggggaccacatcagaagaagaggggggtgatgaaattaacaaataaaaagtatggggaaaaccaaaaaaaa

SEQ ID NO: 25592 - DNA, 959 bp, Homo sapiens
cagttgtgctgtggagaatggaccggagggacaagaggggcagcagggatggtgggctggagtagggtgctggcaatgagggagtctggctcagatgtgggatgtgtatggaagaatataaatgatggtgtggatgtcagggtgagggaggagacaaaaccacgatgacccctagctttgtggcctgaactgtgggtggctgaggggatcgttaattgaatggggcagactgaggcttgtgaggaagatcagagtctggttcttgacatgagatgcccttcagacatctcttcactcaggtccaactagggatacagaaacactgaatatttcaacagcagaaattgaatggggggattgatagcgctggcgagggaagcagctggaaagagacagatggcaccctgagacagcccagaggtgaataggacccccaggctgcagggataaagctcagtggtggtgttacctcaccggggaccagggtcacacagcaaagctggaacaacagaggcgtgttgtgggggagcctcagaggggacaaaacctctgcctgagatcccaccccaggtgggcatgggggccactgaggttggggatgaaaatgccggtaccgtcagtgcacagccctgttccagacagtgctgcctggaagatttctgggctctcctgaggcgccaccccgcacctgagccacctccttggactcctgtcctctaccccttgaggacctccctcccttctaccctagctgtcttcttgaacttgggactctcctttcccaagacttccatcactagctcctggagggactggactttgcatcttcccttcgcgtggagcctcagtgtgagaggccctagccaatgcgtgcatgtcagaggtggtggggaccacatcagaagaagaggggggtgatgaaattaacaaataaaaagtatggggaaaaccaaaaaaaa

SEQ ID NO: 25593 - DNA, 6237 bp, Homo sapiens
gtgatggcatctcacactgcaaccgcacgtgcttggaggactgtggccatggtgtgtgcagtggccccccggactttacctgcgtgtgtgacctaggctggacatcagacctgccccctcccacacccgccccgggtccgccagccccccgctgctcccgggactgtggctgcagcttccacagccactgccgcaagcggggccctggcttctgcgacgagtgccaggactggacatggggggagcactgcgaacgatgccggcccggcagcttcggcaacgccacaggctctaggggctgccggccctgccagtgcaacgggcacggggacccacgccgtggccactgcgacaacctcagtgggctctgcttctgccaggaccacaccgagggtgcccactgccagctctgctccccaggctattatggggatccccgggccggtggttcctgctttcgggagtgtgggggtcgcgccctcctcaccaacgtgtcctcagtggcactgggctcacgccgggtcggggggctgctgcctccaggtggcggggctgcaagagccgggcctggcctgtcctactgtgtgtgggttgtctcggccactgaggagctacagccctgtgctcccgggaccctctgtcccccactcaccctcaccttctcccccgacagcagcaccccctgcacgctgagctacgtcctggcgtttgatggattcccacgcttcctggacactggtgttgtccagtcggaccgcagcctcatagctgccttctgcggccagcgacgggacaggcccctcactgttcaggccctgtctgggctgctcgtgctgcactgggaggccaatggctcctcatcctggggcttcaatgcttcggtgggctctgcccgctgtgggtcagggggccccgggagctgtcccgtcccccaggaatgcgtgccccaggacggtgctgcaggtgcggggctctgccgatgtcctcagggctgggctggcccacactgccgcatggctctgtgtcctgagaactgcaatgcccacactggggcaggaacttgtaaccagagcctgggtgtgtgcatctgtgccgagggcttcgggggccccgactgcgccaccaagctggatggcgggcagctggtctgggagaccctcatggacagccgcctctcagccgacactgccagccgcttcctgcaccgcctgggccacaccatggtggatggacccgatgccaccttgtggatgtttgggggcctgggcctgccccaggggctgctgggaaacctgtacaggtactcagtgagtgagcggcggtggacacagatgctggcgggagccgaggacgggggcccaggcccatcgccccgctccttccatgcagccgcatatgtgcccgctggccgtggtgccatgtatctgctggggggacttaccgctggaggcgtcacccgtgatttctgggtcctcaacctcaccaccctgcaatggcggcaggagaaggccccccagaccgtggagctgccagccgttgctggtcacacccttactgcccgccgaggcctgtctctgctcctggtgggcggttactccccggaaaatggcttcaaccagcagctgctggagtaccagctggcaaccggcacctgggtgtcaggagcccagagtgggacaccccccacaggtctctatggtcactctgctgtctaccacgaggccaccgactccctctacgtgtttggggggttccgattccatgtggagctggcggccccatcccccgagctctactccctgcactgtcctgaccgcacctggagtctgctggccccttctcagggggcaaagcgagatcgtatgaggaatgtgcgtggctcatctcggggtctgggccaagttcctggggagcagcctgggtcatgggggttccgggaagtcaggaagaagatggctctgtgggctgctcttgctggtacaggaggtttcctggaggaaatctcacctcacctgaaggagccccgcccccggcttttccacgcctcagccctgttaggggacaccatggtggttcttggggggcgctcggaccctgacgagttcagcagcgacgttctgctctaccaggtcaactgcaatgcctggcttctgcccgacctcacccgctcggcctctgtggggcccccaatggaggagtctgtggcccatgctgtggcagcagtcgggagccgcctgtatatctctgggggtttcgggggagtggccctgggccgcctgctggcactgaccctgccccctgacccctgccgcctgctgtcctcacctgaagcttgtaaccagtctggggcctgcacctggtgccatggggcctgcttgtccggggatcaggcccacaggctgggctgcgggggctccccctgctccccaatgcctcgctccccggaggaatgtcgacgtctccggacctgcagtgagtgcctggcccgccatcctcggaccctgcaacctggagatggagaggcgtccaccccccgctgtaagtggtgtaccaactgccccgaaggtgcttgcattggacgcaatgggtcctgcacctctgagaatgactgtcggatcaaccagcgagaggtcttctgggcagggaactgctccgaggctgcgtgcggggctgctgactgcgagcagtgcacgcgggagggcaagtgcatgtggacgcggcagttcaagaggacaggggagacccgccgcatcctctccgtgcagcccacctatgactggacgtgcttcagccactctctgctgaatgtgtcccccatgccggtggaatcatcacccccactgccctgccccaccccttgtcacctcctacccaactgtacctcctgcctggactctaagggagcagatgggggctggcagcactgtgtttggagcagcagcctgcagcagtgtctgagcccttcctacctgcccctgcgatgtatggccggaggctgtgggcggctgctccggggacctgagagctgctccctgggctgtgctcaggcaactcagtgcgccttgtgcctgcggcgcccccattgcggctggtgtgcctgggggggccaggatgggggtggccgctgcatggagggtggactcagcggcccccgtgatgggctgacatgtgggcgtccgggggcctcctgggccttcctgtcctgcccccctgaggacgagtgtgcaaacgggcaccacgactgcaacgagacgcagaattgccacgaccagccccacggctatgagtgcagctgcaagaccggctataccatggacaacatgacagggctgtgccgccctgtgtgcgcccagggctgcgtgaacggctcatgtgtggagcccgaccactgccgctgccactttggctttgtgggccgcaactgctccacggaatgccgctgcaaccgccacagtgaatgcgctggtgttggggcgcgtgaccactgcttgctctgccgcaaccacaccaagggcagccactgtgagcagtgcctcccgctgtttgtgggttcagctgtcggaggcgggacctgccggccctgccacgccttttgtcgtggaaatagccacatctgcatctccaggaaggagttacaaatgtccaagggagagccaaagaagtactcactggacccagaggagattgaaaactgggtgacagagggtcctagtgaagacgaggccgtgtgcgtgaactgccagaataacagctatggggagaaatgcgagagctgcctgcagggctacttcctcctggacgggaagtgcaccaaatgccagtgtaatggccacgcggacacatgtaacgagcaggatgggacgggctgtccatgtcagaataacacagagacgggcacatgccagggcagctcccccagtgaccgtcgagactgctacaagtaccagtgcgccaagtgccgggaatcatttcacgggagtccgctgggcggccagcagtgctaccgcctcatctcggtggagcaggagtgctgcctggaccccacgtcccagaccaactgcttccatgagcccaaacgccgggcgctaggccccggccgcactgtcctctttggcgtgcagcccaaattcaccaacgtggacatccgcctgacgctggacgtgaccttcggggccgtggacctctatgtctccacctcctatgacaccttcgtggtccgtgtggcccctgacactggcgtccatactgtacacatccagccacccccagccccaccacctccaccaccccctgcagatggtgggccccggggggctggggatccaggaggagcaggggccagcagtgggccgggcgccccagcagagccacgggtacgggaggtatggccgcggggcctgattacctacgtgacggtgacggagccgtcggcagtgctggtggtccgcggcgtgcgggaccggctggtcatcacctacccacacgagcaccatgccctcaagtcgagccgcttctacctgctgctgctgggcgtgggagacccaagtgggcccggcgccaacggctcagccgactcgcagggcctgctcttcttccggcaggaccaggcccacattgacctgtttgtcttcttctccgtcttcttctcctgcttcttcctcttcctctcactctgtgtgctcctctggaaggccaagcaggctctggaccagcggcaggagcagcgccggcacttgcaggagatgaccaagatggccagccgccccttcgccaaggtcaccgtctgcttcccacctgaccctactgccccggcctccgcctggaagccggctgggctcccacctcccgccttccgccgctctgagcccttcctggcacccctgctgctgacaggggccggtgggccctggggacccatgggagggggctgctgcccaccagccatccccgccaccactgctgggctgcgagctgggcccatcactctcgagcccacagaagatggcatggctggcgtggccacactgctgctccagctgcctggcgggccccatgcacccaacggcgcctgcctggggtcagccctcgtcacactgcggcacaggctgcacgagtactgtgggggtggtgggggtgctgggggcagtgggcatgggactggtgcgggccggaagggactgttgagccaggacaacctcaccagcatgtccctctgacatgcccagggttctcatccacagcagctgggtcacctgatagggccgccctggacttggggtccctccacctgggggcccctggacactgtctacttggagaccactggcccccttcccccagggttgcccagatggggcctcctttgttctgcattcagcagctatttatcgagtacctactctgtcaggcactgtcataggcgtggggcaaagcaggaaccaagagacgaggttccctgatctcatgggacttaggttctggtgaagggagacaatcagtgcacatgcacacaccccacacgcatacacacatgaacacatgcacatgtgcacacacaagtaagatggcttcagagagggagaagcactgtgaggcctccagaggatgtggcagtgagggacgatggggtgaagtcagctgggcattcaaagaagctagactgagaacgcctgagaagaaccagctacgggaagagctttgggaagcaaaggcagaggccctggggtgggagcaggcttgttttattggaaggaccagaaaactggtaagtgtgacccagatcaagtgtgaggagatgaggctggggatagtcaggggctggatcacccagggccttgtgggccccacatagggttttgggttttattctcagggcaatgggaagctgttggatggtttgatgaaggggagtgacaggatccgatgtacctatttaagaatttaagagggtcgggtgcggtggctcatgcctataatcctagcactttgagaggccaaggtgggctgatcacaaggtcaagagttcgtgaccagcctggccaatatggtgaaaccccatgtctactaaaaatacaaaaattagctgggcatggtggcacacacttgtagtccgagctactcgggaggctgaggcagaagaatcgcttgaacccaggaggcggaggttgcagtgagctcagattgcgtcactgcactccaacctgggtgacagagcgagactccacctcaaaaaaaaaa

SEQ ID NO: 25594 - DNA, 5909 bp, Homo sapiens
gtgatggcatctcacactgcaaccgcacgtgcttggaggactgtggccatggtgtgtgcagtggccccccggactttacctgcgtgtgtgacctaggctggacatcagacctgccccctcccacacccgccccgggtccgccagccccccgctgctcccgggactgtggctgcagcttccacagccactgccgcaagcggggccctggcttctgcgacgagtgccaggactggacatggggggagcactgcgaacgatgccggcccggcagcttcggcaacgccacaggctctaggggctgccggccctgccagtgcaacgggcacggggacccacgccgtggccactgcgacaacctcagtgggctctgcttctgccaggaccacaccgagggtgcccactgccagctctgctccccaggctattatggggatccccgggccggtggttcctgctttcgggagtgtgggggtcgcgccctcctcaccaacgtgtcctcagtggcactgggctcacgccgggtcggggggctgctgcctccaggtggcggggctgcaagagccgggcctggcctgtcctactgtgtgtgggttgtctcggccactgaggagctacagccctgtgctcccgggaccctctgtcccccactcaccctcaccttctcccccgacagcagcaccccctgcacgctgagctacgtcctggcgtttgatggattcccacgcttcctggacactggtgttgtccagtcggaccgcagcctcatagctgccttctgcggccagcgacgggacaggcccctcactgttcaggccctgtctgggctgctcgtgctgcactgggaggccaatggctcctcatcctggggcttcaatgcttcggtgggctctgcccgctgtgggtcagggggccccgggagctgtcccgtcccccaggaatgcgtgccccaggacggtgctgcaggtgcggggctctgccgatgtcctcagggctgggctggcccacactgccgcatggctctgtgtcctgagaactgcaatgcccacactggggcaggaacttgtaaccagagcctgggtgtgtgcatctgtgccgagggcttcgggggccccgactgcgccaccaagctggatggcgggcagctggtctgggagaccctcatggacagccgcctctcagccgacactgccagccgcttcctgcaccgcctgggccacaccatggtggatggacccgatgccaccttgtggatgtttgggggcctgggcctgccccaggggctgctgggaaacctgtacaggtactcagtgagtgagcggcggtggacacagatgctggcgggagccgaggacgggggcccaggcccatcgccccgctccttccatgcagccgcatatgtgcccgctggccgtggtgccatgtatctgctggggggacttaccgctggaggcgtcacccgtgatttctgggtcctcaacctcaccaccctgcaatggcggcaggagaaggccccccagaccgtggagctgccagccgttgctggtcacacccttactgcccgccgaggcctgtctctgctcctggtgggcggttactccccggaaaatggcttcaaccagcagctgctggagtaccagctggcaaccggcacctgggtgtcaggagcccagagtgggacaccccccacaggtctctatggtcactctgctgtctaccacgaggccaccgactccctctacgtgtttggggggttccgattccatgtggagctggcggccccatcccccgagctctactccctgcactgtcctgaccgcacctggagtctgctggccccttctcagggggcaaagccccgcccccggcttttccacgcctcagccctgttaggggacaccatggtggttcttggggggcgctcggaccctgacgagttcagcagcgacgttctgctctaccaggtcaactgcaatgcctggcttctgcccgacctcacccgctcggcctctgtggggcccccaatggaggagtctgtggcccatgctgtggcagcagtcgggagccgcctgtatatctctgggggtttcgggggagtggccctgggccgcctgctggcactgaccctgccccctgacccctgccgcctgctgtcctcacctgaagcttgtaaccagtctggggcctgcacctggtgccatggggcctgcttgtccggggatcaggcccacaggctgggctgcgggggctccccctgctccccaatgcctcgctccccggaggaatgtcgacgtctccggacctgcagtgagtgcctggcccgccatcctcggaccctgcaacctggagatggagaggcgtccaccccccgctgtaagtggtgtaccaactgccccgaaggtgcttgcattggacgcaatgggtcctgcacctctgagaatgactgtcggatcaaccagcgagaggtcttctgggcagggaactgctccgaggctgcgtgcggggctgctgactgcgagcagtgcacgcgggagggcaagtgcatgtggacgcggcagttcaagaggacaggggagacccgccgcatcctctccgtgcagcccacctatgactggacgtgcttcagccactctctgctgaatgtgtcccccatgccggtggaatcatcacccccactgccctgccccaccccttgtcacctcctacccaactgtacctcctgcctggactctaagggagcagatgggggctggcagcactgtgtttggagcagcagcctgcagcagtgtctgagcccttcctacctgcccctgcgatgtatggccggaggctgtgggcggctgctccggggacctgagagctgctccctgggctgtgctcaggcaactcagtgcgccttgtgcctgcggcgcccccattgcggctggtgtgcctgggggggccaggatgggggtggccgctgcatggagggtggactcagcggcccccgtgatgggctgacatgtgggcgtccgggggcctcctgggccttcctgtcctgcccccctgaggacgagtgtgcaaacgggcaccacgactgcaacgagacgcagaattgccacgaccagccccacggctatgagtgcagctgcaagaccggctataccatggacaacatgacagggctgtgccgccctgtgtgcgcccagggctgcgtgaacggctcatgtgtggagcccgaccactgccgctgccactttggctttgtgggccgcaactgctccacggaatgccgctgcaaccgccacagtgaatgcgctggtgttggggcgcgtgaccactgcttgctctgccgcaaccacaccaagggcagccactgtgagcagtgcctcccgctgtttgtgggttcagctgtcggaggcgggacctgccggccctgccacgccttttgtcgtggaaatagccacatctgcatctccaggaaggagttacaaatgtccaagggagagccaaagaagtactcactggacccagaggagattgaaaactgggtgacagagggtcctagtgaagacgaggccgtgtgcgtgaactgccagaataacagctatggggagaaatgcgagagctgcctgcagggctacttcctcctggacgggaagtgcaccaatgcgccaagtgccgggaatcatttcacgggagtccgctgggcggccagcagtgctaccgcctcatctcggtggagcaggagtgctgcctggaccccacgtcccagaccaactgcttccatgagcccaaacgccgggcgctaggccccggccgcactgtcctctttggcgtgcagcccaaattcaccaacgtggacatccgcctgacgctggacgtgaccttcggggccgtggacctctatgtctccacctcctatgacaccttcgtggtccgtgtggcccctgacactggcgtccatactgtacacatccagccacccccagccccaccacctccaccaccccctgcagatggtgggccccggggggctggggatccaggaggagcaggggccagcagtgggccgggcgccccagcagagccacgggtacgggaggtatggccgcggggcctgattacctacgtgacggtgacggagccgtcggcagtgctggtggtccgcggcgtgcgggaccggctggtcatcacctacccacacgagcaccatgccctcaagtcgagccgcttctacctgctgctgctgggcgtgggagacccaagtgggcccggcgccaacggctcagccgactcgcagggcctgctcttcttccggcaggaccaggcccacattgacctgtttgtcttcttctccgtcttcttctcctgcttcttcctcttcctctcactctgtgtgctcctctggaaggccaagcaggctctggaccagcggcaggagcagcgccggcacttgcaggagatgaccaagatggccagccgccccttcgccaaggtcaccgtctgcttcccacctgaccctactgccccggcctccgcctggaagccggctgggctcccacctcccgccttccgccgctctgagcccttcctggcacccctgctgctgacaggggccggtgggccctggggacccatgggagggggctgctgcccaccagccatccccgccaccactgctgggctgcgagctgggcccatcactctcgagcccacagaagatggcatggctggcgtggccacactgctgctccagctgcctggcgggccccatgcacccaacggcgcctgcctggggtcagccctcgtcacactgcggcacaggctgcacgagtactgtgggggtggtgggggtgctgggggcagtgggcatgggactggtgcgggccggaagggactgttgagccaggacaacctcaccagcatgtccctctgacatgcccagggttctcatccacagcagctgggtcacctgatagggccgccctggacttggggtccctccacctgggggcccctggacactgtctacttggagaccactggcccccttcccccagggttgcccagatggggcctcctttgttctgcattcagcagctatttatcgagtacctactctgtcaggcactgtcataggcgtggggcaaagcaggaaccaagagacgaggttccctgatctcatgggacttaggttctggtgaagggagacaatcagtgcacatgcacacaccccacacgcatacacacatgaacacatgcacatgtgcacacacaagtaagatggcttcagagagggagaagcactgtgaggcctccagaggatgtggcagtgagggacgatggggtgaagtcagctgggcattcaaagaagctagactgagaacgcctgagaagaaccagctacgggaagagctttgggaacaggcttgttttattggaaggaccagaaaactggtaagtgtgacccagatcaagtgtgaggagatgaggctggggatagtcaggggctggatcacccagggccttgtgggccccacatagggttttgggttttattctcagggcaatgggaagctgttggatggtttgatgaaggggagtgacaggatccgatgtacctatttaagaatttaagagggtcgggtgcggtggctcatgcctataatcctagcactttgagaggccaaggtgggctgatcacaaggtcaagagttcgtgaccagcctggccaatatggtgaaaccccatgtctactaaaaatacaaaaattagctgggcatggtggcacacacttgtagtccgagctactcgggaggctgaggcagaagaatcgcttgaacccaggaggcggaggttgcagtgagctcagattgcgtcactgcactccaacctgggtgacagagcgagactccacctcaaaaaaaaaa

SEQ ID NO: 25595 - DNA, 1736 bp, Homo sapiens
gtgatggcatctcacactgcaaccgcacgtgcttggaggactgtggccatggtgtgtgcagtggccccccggactttacctgcgtgtgtgacctaggctggacatcagacctgccccctcccacacccgccccgggtccgccagccccccgctgctcccgggactgtggctgcagcttccacagccactgccgcaagcggggccctggcttctgcgacgagtgccaggactggacatggggggagcactgcgaacgatgccggcccggcagcttcggcaacgccacaggctctaggggctgccggccctgccagtgcaacgggcacggggacccacgccgtggccactgcgacaacctcagtgggctctgcttctgccaggaccacaccgagggtgcccactgccagctctgctccccaggctattatggggatccccgggccggtggttcctgctttcgggagtgtgggggtcgcgccctcctcaccaacgtgtcctcagtggcactgggctcacgccgggtcggggggctgctgcctccaggtggcggggctgcaagagccgggcctggcctgtcctactgtgtgtgggttgtctcggccactgaggagctacagccctgtgctcccgggaccctctgtcccccactcaccctcaccttctcccccgacagcagcaccccctgcacgctgagctacgtcctggcgtttgatggattcccacgcttcctggacactggtgttgtccagtcggaccgcagcctcatagctgccttctgcggccagcgacgggacaggcccctcactgttcaggccctgtctgggctgctcgtgctgcactgggaggccaatggctcctcatcctggggcttcaatgcttcggtgggctctgcccgctgtgggtcagggggccccgggagctgtcccgtcccccaggaatgcgtgccccaggacggtgctgcaggtgcggggctctgccgatgtcctcagggctgggctggcccacactgccgcatggctctgtgtcctgagaactgcaatgcccacactggggcaggaacttgtaaccagagcctgggtgtgtgcatctgtgccgagggcttcgggggccccgactgcgccaccaagctggatggcgggcagctggtctgggagaccctcatggacagccgcctctcagccgacactgccagccgcttcctgcaccgcctgggccacaccatggtggatggacccgatgccaccttgtggatgtttgggggcctgggcctgccccaggggctgctgggaaacctgtacaggtactcagtgagtgagcggcggtggacacagatgctggcgggagccgaggacgggggcccaggcccatcgccccgctccttccatgcagccgcatatgtgcccgctggccgtggtgccatgtatctgctggggggacttaccgctggaggcgtcacccgtgatttctgggtcctcaacctcaccaccctgcaatggcggcaggagaaggccccccagaccgtggagctgccagccgttgctggtcacacccttactgcccgccgaggcctgtctctgctcctggtgggcggttactccccggaaaatggcttcaaccagcagctgctggagtaccagctggcaaccggcacctgggtgtcaggagcccagagtgggacaccccccacagtttatgtcactctgctgtctaccacgccacccctgctggtacgagcc

SEQ ID NO: 25596 - DNA, 395 bp, Homo sapiens
gaaaacaatgagatgatagccatttgtgtttacctgggagcttcactcagaaattaaacttgataggaagagggaatgtggagaggttgggcagcaagctgataatgacttggtacctgaagtttagagatgtggtcggagcaagtctgtcaataggaaataaaatttatagaaggaatttaaatataattcagggagcttttggggatttagtgttaaggatcaacatggtcaaaattacagcaggaaataatttgcattcaggatgcagactcacaaagaagccagggagaggcattttaggggaaagaatgtggttaccttacttactgtgtgttggatgggacacaccatagcacatcaacatacccacgttctgcaatggatgcaactta

SEQ ID NO: 25597 - DNA, 375 bp, Homo sapiens
atggtttcattcttttgcattgctgattaccctctccaaatgaggcaatcaggtatgcatttatctcggtgagcagatgggtgactttggatacaatgggaggcgggtttgccctaagcagttcccagcttgacttttccctttagcttagtgattttgattccccaagatttattttcccttcataaggttttcctatgagcattaattattcattgtgtattttatcacacaaataaggcacagatttttaaaaaatcatcaacttcctggctacctatatagacataattacatagaagctcaactaaatttgcaaacattccagagtttgggtttccaataattctttgtgattctttaaaaggtaaagta

SEQ ID NO: 25598 - DNA, 802 bp, Homo sapiens
gtataattcaatgactggctttgccgcgtctttgtactgtcttagcctggcagcaactgcttcgggtttatcatcctcctgctggactaatggttcaccagtgacgtcatcaataccatgtacatgaggtggattgaagtccaggttatatacccttccgctaggagggtgaatccaacggcggctgagacgatattttgtccagggcttcggcttgtcctaatgtcctaggaaaaccatcaaggagccagtgctggccacgcctattctccaactcggacatcattaggcgtgtgatcacatggtctggaaccaaaagacttttctctatatactgctttgccatctcaccaacttcggtgctggccttgatgttctcccgcaagaagtggccgctggagagatgctggagaccaaagttctgggcgatcctctggcacacggtgcccttgcccgagccgggcggcccgaggatgaccgcgcgcaggagtttggaagccattgccttcgcgaggaggggggcggtcaaacgcgcagccccgaccgcggccccggagggagccccaggaactttgtttctcggccccctacctctggcaccctccgctctcactgggactcgccggccgcccctacagggggaaggcggtcttgatttcttaatctcatgcttcagtctcctcacctgcaaaatgagaatggtgataataggacctacattagggatgtgatattgtgaaatatttatttggtcttcctaccatctcctggcataaaatctttggaatctcccaagtgataa

SEQ ID NO: 25599 - DNA, 593 bp, Homo sapiens
aaaaaaccccccagaaccacagaatgttcatggtacatgctacagtaagcctacttgcatgaattatttctcccaggaatgtctaacaacaaaatcttttttaaaaaaacaaaggatatatgtacacaagttcttatagtgttgtcatttatttcagacaaggtctcactttgtcacctgggctggaatggagtggcacaacctcaacctcctgggccgaggcgatcctcccacttcagcctccctaggactacaggtgcgcccattacactcagctaatgtttacattttttgtagatacctggtttcgccatgttgcccaggctggtctcgaactcctgggctcaagtgatccacatgccttggtctcccaaagtgctgggattgcaggtgtgagccactgtgcccagctccatcatttataatagcaaaaaccaggaaatggctttaactcgagcaggagtagggaaccacagcgtgccagtgtggcctgccctagagtgaggcggcctccactgcctgggcagtgagggtaaactcagtctctttttcagaaagtgcattctccattttttgattgagacaagaagctg

SEQ ID NO: 25600 - DNA, 320 bp, Homo sapiens
aggggctcaggggcaggggcttggaagagatattgatcaaaggatgtgaaatttcagttagataggaggaataagttcaagagatctatagtataacggagttactattgttaatagctgtatattatattcctgataattgctacaagagtagcttttgcattctcaccacaaaaaaaaattatgtgaggtaatgagtatgtgaattagcctgatttagccatgtgctacctgataaatatgtacgacttgtatttgtcagcataaaaataattttaaaagacttgcatttctgagtatttcattcggaagattttaca

SEQ ID NO: 25601 - DNA, 478 bp, Homo sapiens
aggaggcactatagatatctgtacaggtaagagacaatctagtgcatatgaaaaagaagaaaagactggctgaaaaatattcttcctagatatattcgttagcaagaatattttttaaatctacatctgctgtgtgtctgtaaaatgactgacagtggtactgtaattaaaaaatatatatttatgtaaatatagtgacacttatagtctggcggatggattgcccagttgttcaaaagtataattgagtatacgattggattctggctttctgcttaggaaatagaaatagaattttataaagacccaatttacttagaaaggaaaaggcaaagggaaagatggggcaactagaaatacagaaaagagatgttaagaaatgtgagttgtgtttaaccagttatgtgccaagtatggaagaaaaaaaaggtggaggacagttagtgaatgacagatttctatgaagaatgttttgcta

SEQ ID NO: 25602 - DNA, 1113 bp, Homo sapiens
ttaaactgccccacagaaggcgaaaggaatgcttgaggctggaccacgtgggtctagcgtgtactgcgtttctggtccccagcccctgttttaccttttgctcctcctgccccatcaaccaagtgtcttcatttgtttctatggcaattaacttttggagatagaagtcccagcacacgagatccccaagcacattatctaccttgctgaacaggctggcagtcacacatgagccaggcgacccagggaaatgccagcccaaacaaagctgctgccacatccagagagggccggactctttctcccttgtagtcactcaagctaatcatccaaaacctgcatcctccatctccaagccccatcttattagcaccatctgggattgccaaccaagaaactgttttatctgagaactctaagaccaaagaacaagatttatttcctctactacagatttggcagtgacgcataaaaggcccatttctcaggaagaatacatgtcctaaggatgtaaaaaagaaaaaaatattagatctagttaccatggtctataaactggtcttttcccgccccaccctgatcctggcttctgtccaccctcaaatagctgtttgttcataaaccctaaatactagataattctaagttggaaggagacctctaagtcactgtagcatttccaaatcgccattcccaagagacatgtggatctgacatcgtgttttattcttgactgagcctcgcatatttgttctgtgtggaacaaaggcaaaggcagcccaagaacccgggtccttgcctacagtcagctttaggaaatgattgtgaacttgggaagcatttaaatagcaatactagacagtaaatggaaaaggccaaagtcagaaaataagtagggattccaaaggaagcctttattggttgggctaggctgggctagctgtggaagatagacttctatgtccctgccccaaccacaattttactttaattattatgtaattagtgaatcgatgtctgtcaccgtctgtagatgctgaggtcttgttcatctctttatttgcattgatatacatagccattgctcaataaatatgtgacccatgaaaaaaa

SEQ ID NO: 25603 - DNA, 332 bp, Homo sapiens
gaaaaacaaatgttaaccattcccccaaaagtccaagactgagatgactttggtagggaagtgtgtgcacacaagcactgtcttagtccatttgtgctgttataagaaaatacctgagaaatagcctgagacaaggtaatttataaagaacagaaatgtattttctcacagttctggaggcttggaagtccaagatcaaggtgctggtaggttgagtgactggtgagggcccctgtctctgattccacaatggccatcttgttgctggttcctcacatgttggaggatggaaaagcaaaagggcccagctaattctctccagccccttaata

SEQ ID NO: 25604 - DNA, 446 bp, Homo sapiens
cacatacacttacccagttttgcccaacaggagcatgttgcagaactgtagtataatatcacaaacagttgttatcattgataagccaagatacagaatatttccatcatctcaaggacccctcatgttgctttttataatgacttcaagaccctcttaaccctgacatctgccactctgttctttatttctgtaattttgctatttcaaaacaacaagaagttgtaatttttcccttgatatacctatacaagctaagactctcaaatatcttacctttagtttgggaatatattaatttattgagccaattggttcttatgtgcatcagaatttctgaccagcagtttttttggtctttgattaataaaacaaatgtgaattaataagtccaggtgattaatacagtttttcaaatgggatagtctgataagggtggtggcagc

SEQ ID NO: 25605 - DNA, 809 bp, Homo sapiens
ctcagtttatcagttctagtgctaacgtggcctgttttagcggtgtctcccattctgtgttctctggaaagacaagttaaaggggagagtttgtattaacaggtgtcacgtcttctcactctcgccatatccctgtaccttctggtagatgtaaacggacacaactgtgcttataaaaccaataactcgccagtcttcctcaggtccattcaagaccatttgagtgggtccttgggtgccatggacagaaatcttgtggggacatggatgaggggggcctccagccctgcaggactgtcaagaccagggccttggggaagggcagccgagcttcacattgtccccacttagccacttgtcagggttgctgtgaggctccagatgaaaatacatggagtttccttaactaccgtggcccacagaaatgacacatgagattcttttccttggtcgtaggatactgggggcggggtcagtgagaggcactgtccatctcagaaaaatctgtatcactcttgtttgctcatcttgaggaagccatggagagcacagtttctatggagtcagcagaaacaaaaatgagattaattcacacgtaaattctgcctttagatacagagacctaggttataggatcttgactgtatacacagttaagccatttgtagagttttccctatttgggggtagtttttgttctgattttttttttcagaggggatgtttgccaaattctttctagattataaaattaatacaaactctcataaaagtgaatacactaaaatataaagaagaaaaaaaaaatc

SEQ ID NO: 25606 - DNA, 323 bp, Homo sapiens
tttttaaaaaggaagacttatagaagccacagcagtcctcaaagtgtagtcccagaaccagcagcatcacctataaactagttagaaatgcaaattctcagaccccaacccaggcctaaagaatggcaaactcagcatgggcaaaaccctatctctgtgaaaaataaaaaaattagctgggcgtggtggtgcacgcctgtagtcccagctactaaggaggctgaggtgggaggatcacttgagcctgggaggtcaaggctgcaatgagctgtgatagcaccacagcactccaacctgggagaaagagtgagaccctgtctcag

SEQ ID NO: 25607 - DNA, 428 bp, Homo sapiens
agtgttcatgaggagcatcattcacagtggcccaaaaatggaaaccacccaaatgtctatcaactgatggataggtaaacaaagtgtagtgttttcatacaatagaatactattaggcaataaaaatgaaggaagtactgaatcaggctgcagcatgcatgaacctcaaaatgttatgctaagtgaaagaagccagacacaatgattgcatattgtatgattctgtatatatgaaatgtctagaaaatgcaaatctacggaggtagaaagtagattactggttggctagggtggagaggaaaacagggagtgcctgtaaatgggccggagggatctttttgggtgatgaaaatgcttcaatattggatggtggtaacctgagtgaattttatggtatgtaagtacctcaataaaggtgttaaagtata

SEQ ID NO: 25608 - DNA, 184 bp, Homo sapiens
ccttgggaacggaggagtaaggactgcccttctagtggaggaagactttaagcctcctctaaacctctctgcaaccagagccctgaaggaacagccaccactctcaggacaggcctcagctctgcagggtctcccagcaccaggtaccaggctcctgccaggctccacacaggctccacccttc

SEQ ID NO: 25609 - DNA, 354 bp, Homo sapiens
acgtctggagcatcctgcctggtctgtactgcaatgcctcatgaagttttctctccttaagagttgggcatcttggccaggcgcggtggctcacgcctgtaatcccagcactttgggaggccgaggcgggtggatcacgagatcaagagattgagaccatcctggccaacatggtgaaaccccgtcttactaaaaatacaaaaattaaccagtcatggtggcacacgcctgtagtcccagctacttgggaggctgaggcaggagaatctcttgaacctgggaggcaggggttgcagtgagcggattttgcaccactgcactccagcctgggcaacagagtgagactctgtctca

SEQ ID NO: 25610 - DNA, 472 bp, Homo sapiens
ttttattaaacctatgagtaagcagctcatcctaattgcgaagagtgttttggagttcactggatttggttgacctttgtggaacacaaataatgaaggagcagaacattgacaagctaagatgaaattctgacatagtacatctctgccaaaaaccacacaccctctgtggatatggatatgaattcccagattttatatactcttgaataaaaggtttatttttatttataagtgggcataaaataagaaatgtccatgcagccatttttccaacagatgctgtacaccgttcattttatatagactagggagattcaaatacagtgcattttctattggtatttgttctgtgcatttttagcaacttctaccagcaaataaagtattctcagtaaaacgaaaatgattctcaagttatcagtttgcaaaaaaaaacacttatttcatgccctgccaaattcaagttaca

SEQ ID NO: 25611 - DNA, 594 bp, Homo sapiens
  misc_feature (151)..(151): n is a, c, g, or t
  misc_feature (172)..(173): n is a, c, g, or t
  misc_feature (200)..(200): n is a, c, g, or t
  misc_feature (212)..(213): n is a, c, g, or t
  misc_feature (218)..(219): n is a, c, g, or t
gcgtcgatcgtgttgcaggtgagctgaagatgcacacgcacgtgcgaatagggagacagcatctcgggtcatacgagcatccctagcgttgacgagcagcgagatgagacgggatgatgttcgtggcatttcgcatcatggagtgtacctngaggatcgatcgtgcacgtgnngggaaagtgaccagactaatgtgggcngctaggccatgnntgtgnntgtgcagcacctgtgcgcgagccgagagcagggcgatggcattgcctcactctgggaagcgcaaggggtcagggagttccctttccgagtcaaagaaaggggtgatggacgcacctggaaaatcgggtcactcccacccgaatattgcgcttttcagaccggcttaagaaacggcgcaccacgagactatatcccacacctggctcagagggtcctacgcccacggaatctcgctgattgctagcacagcagtctgagatcaaactgcaaggcggcaacgaggctgggggaggggcgcccgccattgcccaggcttgcttaggtaaacaaagcagccgggaagctcgaactgggtggagcccaccacaactcaag

SEQ ID NO: 25612 - DNA, 340 bp, Homo sapiens
cccagcaaatatttttatgtttttgtcttacctttctctttctctaacttaaagtgttgcatctcgggaatgtgcaacacataaagcaacctgccaaaggaagtggtcccctctggagaagaacaacataatttctgccagcttctgttatcaaaagcacagtcctttcatgtgatcttaagtcggagtagaaggggttgcacatttttattattatttttatgtaatttgtttttagcatggaagcagaaaaacattgttatatccagccatatggataatttgagctagccacaatatataaaacttcagagaacaagacaggatgaggagacggtag

SEQ ID NO: 25613 - DNA, 485 bp, Homo sapiens
tggcagtgatatgtaaagggtctggagaaggagaagctgggagaagaaagtctacagttatagcgcagaagagtggtcctaaaagcctaaaccaggatattgatatttgagataaagataagactatccaaaatgctccttccttttcctaaatatcccaactgtaagacttacacatatttctcaagttgtataaaatcttctcaatgtcctctacgtccttagcccatcagtccatcttattttcatgttaaactcttctgtgcatcatgtcaggctcagtgattgtggagcgagtaatagctctcttttactgtactttgagaatgggtagaatcaagagggtgagtgcaatattggtttatacaacttggtatagcctaagttggtaagcattttcttttaccctaagttacaaagtgtgtgcactttggatagatacatgactactttattgtagaggcacaggtttgagaagggagata

SEQ ID NO: 25614 - DNA, 415 bp, Homo sapiens
tgagatcatgtggctcttccagtgacgttgtctgtaggcactcagaatggtccagcgtttgacataccaatgtaggctttcctacaatacagcgtccaacaaaactagactgccccgaacccctggtaatagaattgtttacctttataccaagaaggttgggaaagcaccaagatctgcaagtggcatgtgcccaggaagacttcgaggggttcgtgctgtaagacctaaagttcttatgaaattgtcaaaaagaaagaaacatgtcagcagggcctatggtggttccatgtgtgctaaatgtgttcgtggcaggatcaagcgtgctttccttatcggggagcagaaaatcgttgtgaaagtgttgaaggcacaagtacaaagtcacaaagctaaataaaattgaaactttttt

SEQ ID NO: 25615 - DNA, 643 bp, Homo sapiens
gaaaataagccaaagtgatttcgtttttgttttaggaatcaatactgtattagtttcttagggttgctgtaacaaaactgggtttttgccacccataaactgggtggcttaaaataacagaaatgtattttctcatagctctgaagggtagaagtctgaaatcaaggtgtcatggggccatactccctccggaggttctgaagaagaatccctccttgcttcctcctggcttctagtggtggccagcaatgcttggccttccttagcttgcagctacgtcactctaatctcggcttccaccatcatatgaccttttctgtatctctgtcttcacatgccttttttatgaggataccggttggatttagggcccactctaattcagaaggacctcatcttaacttgatcatatctgcagtgctcttatttctaaataaggtcacattcatagattccaggtggacatgaattttagggggacagtagttatatactgtgcatcacaacacttagaaccaagtaagttgggtttgcttcacattaatagtcttaactataaaaatattttggatttttatttttatttatttgttgttttttttttaaacagagcctgggtgacacagtgagaccccgtctccaa

SEQ ID NO: 25616 - DNA, 321 bp, Homo sapiens
tattgaataaagtgaaaaccaatttcatagacattatttttattaaaaaatagtgatgagtaggaaaataatatagtcacatgatttaaaattcaaagtagaccaggcactacggttcatccctgtaattccaacactttgggaggctgacgtgggagaatcacttgaggccaggagttcaagaccaacctgggcaatatagtgggacccccatctctacaaaaaaattttttttttaattagctgggcatggtggtagctgtagtcccagctactcaggaggctgagatgagaggatcacttgagcctggtgggggtcga

SEQ ID NO: 25617 - DNA, 189 bp, Homo sapiens
gaattgaagtgtatttataataagctagcagttttgatttttatgtattttttagttgtgctgtaatgggccatcaaaaaatgacaatttggtaatttttaggatttcctactggccttatgtggcaggtactagatatcattatatgtatttcatctttctgaccaaaagaggcttttttagaggaag

SEQ ID NO: 25618 - DNA, 283 bp, Homo sapiens
ttttttaagataaaaatctcgctgtgtcactaagactggggtgccatggcacgatcacaacgcactgagacctggaactcctaggtcaagaaatcgtcctgcctcagggcctctagtagctaagactacaagtgcatgccaccatacccactaattttttttccatgtagacagggtatcactttgttgcccaggcttatcttgaacccctgggccaaagcaaccatcctgcttcagcctcctaaatagctggaattataggtgtgggccaccacccctggct

SEQ ID NO: 25619 - DNA, 682 bp, Homo sapiens
tttgtcacttccagctggatctaccatgaaagacttctgaatccaggaaaagagactgactgggtaacatgttattcagggtctccctctcttttccaaggctggagtgtagtagtgctatcacagctgactgcagcctcaaccttccaggctgaagcgatcctcccatctcaacctcccacgtggctgagactataggtgcttgccactatgcccaactaatatttggaattttcctatacatggattccagaggggtgacagcaaaacgtgggaccatccagttgcaggaaaacaagcttaacacgcccactgattctacattatgctcctacctcccggcagcctctccaggcccagaactttctccagtcagcctcggcagaccaagctcatgactcacaatggcctatttaggcccataccctacctcacggcagtctccgcagatgaggcctactgcctcacaacagcctccacaggcacagctccatcgttacaatggcctctttagacccagctcctgcctcccagccttctctccaggccctgaacttcctcaagtcgacctcaccaggcccagctcatgcttcttggcagcctctccaggcccagctcctgcatcttggcagcctctccaggcccagcctctgcctcccgtcagcctctacagtcccaacat

SEQ ID NO: 25620 - DNA, 528 bp, Homo sapiens
gtcactttctcccatcacgctcaggtgggaccatccagttgcaggaaaacaagcttaacacgcccactgattctacattatggtgagttgtataattattttattatatattacagtgtaataatggaaataaagtgcctaataaatgtaatgtgcttaaatcttttggcccagctcctacctcccggcagcctctccaggcccagaactttctccagtcagcctcggcagaccaagctcatgactcacaatggcctatttaggcccataccctacctcacggcagtctccgcagatgaggcctactgcctcacaacagcctccacaggcacagctccatcgttacaatggcctctttagacccagctcctgcctcccagccttctctccaggccctgaacttcctcaagtcgacctcaccaggcccagctcatgcttcttggcagcctctccaggcccagctcctgcatcttggcagcctctccaggcccagcctctgcctcccgtcagcctctacagtcccaacat

SEQ ID NO: 25621 - DNA, 714 bp, Homo sapiens
tttagaaatgcaattatagccttttacctcctcctcaccagatactctctacagggcaagttcatcaaactgtgtgcttagaagctctggagcagaactctcacccaccagaagattgcctcaagagataaaagatgatttacaacccaaagtatgcccactagaggttttggccatttttacaatgtattcctgcccatgaagatgccaacttgactgcccaatacataaagcaccaaagcaagtatgcggacccccccacacctcctcacttctgctcctgtgtagacccccatctttaaaagcacttactttctcctgcaaaagcaaatcagacccttacagcaggaaggcttttcttcttctcctaaactagctttggaataaaaagttattttctttataccagacctcactcgtgttaattggaccctgcaaatggcatgtgactgaacctgtgtttggttacattatctttagtttctagtgaaaccaagcatcccctgattctaacttccttgttattgttttaggttactattaccttcttgtttatcaagttcacatttacttcttagggctagctaggtgcctggaatttcccttgaaagaactcaggattttccttggtttctatgcttgggggactacagggccctaaaagggggcccctcctctgtctcaacaccctaattcccagaatctgtttggaac

SEQ ID NO: 25622 - DNA, 2453 bp, Homo sapiens
aaatccttcttccaatgttcctcccctctctgtatgaaccctgtgttggggggcagaagatggaagcccttggcaagctcgatcgaaccaagctactaaattgctgagctcgttttaactgaagtgtgagaaggaggtttaaggcaagtagacaacatcctgttgttggggtgcttctctcttttttgcacatctggctgaactgggagtcaggtggttgacttgtgcctggctgcagtagcagcggcatctcccttgcacagttctcctcctcggcctgcccaagagtccaccaggccatggacgcagtggctgtgtatcatggcaaaatcagcagggaaaccggcgagaagctcctgcttgccactgggctggatggcagctatttgctgagggacagcgagagcgtgccaggcgtgtactgcctatgtgtgctgtatcacggttacatttatacataccgagtgtcccagacagaaacaggttcttggagtgctgagacagcacctggggtacataaaagatatttccggaaaataaaaaatctcatttcagcatttcagaagccagatcaaggcattgtaatacctctgcagtatccagttgagaagaagtcctcagctagaagtacacaaggtactacagggataagagaagatcctgatgtctgcctgaaagccccatgaagaaaaataaaacaccttgtactttattttctataatttaaatatatgctaagtcttatatattgtagataatacagttcggtgagctacaaatgcatttctaaagccattgtagtcctgtaatggaagcatctagcatgtcgtcaaagctgaaatggacttttgtacatagtgaggagctttgaaacgaggattgggaaaaagtaattccgtaggttattttcagttattatatttacaaatgggaaacaaaaggataatgaatactttataaaggattaatgtcaattcttgccaaatataaataaaaataatcctcagtttttgtgaaaagctccatttttagtgaaatattattttatagctactaattttaaaatgtcttgcttgattgtatggtgggaagttggctggtgtcccttgtctttgccaagttctccactagctatggtgtcataggctcttttgggatttttgaagctgtatactgtgtgctaaaacaagcactaaacaaagagtgaaggatttatgtttaattctgaaagcaaccttcttgcctagtgttctgatattggacagtaaaatccacagaccaacctggagttgaaaatcttataatttaaaatatgctctaaacatgtttatcgtatttgatgctacaggatttgaaattgtattacaaatccaatgaaatgagtttttcttttcatttacctctgccccagttgtttctactacatggaagacctcattttgaagggaaatttcagcagctgcagctcatgagtaactgatttgtaacaagcctccttttaaagtaaccctacaaaaccactggaaagtttatggttgtattattttttaaaaaaattccaagtgattgaaacctacacgagatacagaattttatgcggcattttcttctcacatttatatttttgtgattttgtgattgattatatgtcactttgctacagggctcacagaattcattcactcaacaaacataatagggcgctgagggcatagaagtaaaaacacctggtccctgctctcagttcactgtcttgttggacgagaaaagaaacaataacgataaaagacagtgaaagaaaataacgataaaagacagtgaaagaaaataacaataaaagacaaggaaaaaataacaatgaaagttgataagtacatgataagcgaggttccccgtgtgtaggtagatctggtctttagaggcagatagataggtcagtgcaaatactctggtccatgggccatatgaaaaggctaagcttcactgtaaaataataactgggaattctggattgtgtatgggtgttggtgaacttggttttaattagtgaactgctgagagacagagctattctccatgtactggcaagacctgatttctgagcatttaatatggatgccgtgggagtacaaaagtggagtgtggcctgagtaatgcattatgggtggtttaccatttcttgaggtaaaagcatcacatgaacttgtaaaggaatttaaaaatcctactttcataataagttgcataggtttaataatttttaattatatggcttgagtttaaattgtaataggcgtaactaattttaactctataatgtgttcattctggaataatcctaaacatatgaattatgtttgcatgttcacttccaagagcctttttttgaaaaaaagctttttttgaatcatcaagtctttcacatttaaataaagtgtttgaaagctttattt

SEQ ID NO: 25623 - DNA, 2484 bp, Homo sapiens
aaatccttcttccaatgttcctcccctctctgtatgaaccctgtgttggggggcagaagatggaagcccttggcaagctcgatcgaaccaagctactaaattgctgagctcgttttaactgaagtgtgagaaggaggtttaaggcaagtagacaacatcctgttgttggggtgcttctctcttttttgcacatctggctgaactgggagtcaggtggttgacttgtgcctggctgcagtagcagcggcatctcccttgcacagttctcctcctcggcctgcccaagagtccaccaggccatggacgcagtggctgtgtatcatggcaaaatcagcagggaaaccggcgagaagctcctgcttgccactgggctggatggcagctatttgctgagggacagcgagagcgtgccaggcgtgtactgcctatgtgtgctgtatcacggttacatttatacataccgagtgtcccagacagaaacaggttcttggagtgctgagacagcacctggggtacataaaagatatttccggaaaataaaaaatctcatttcagcatttcagaagccagatcaaggcattgtaatacctctgcagtatccagttgagaagaagtcctcagctagaagtacacaaggtactacagggataagagaagatcctgatgtctgcctgaaagccccatgaagaaaaataaaacaccttgtactttattttctataatttaaatatatgctaagtcttatatattgtagataatacagttcggtgagctacaaatgcatttctaaagccattgtagtcctgtaatggaagcatctagcatgtcgtcaaagctgaaatggacttttgtacatagtgaggagctttgaaacgaggattgggaaaaagtaattccgtaggttattttcagttattatatttacaaatgggaaacaaaaggataatgaatactttataaaggattaatgtcaattcttgccaaatataaataaaaataatcctcagtttttgtgaaaagctccatttttagtgaaatattattttatagctactaattttaaaatgtcttgcttgattgtatggtgggaagttggctggtgtcccttgtctttgccaagttctccactagctatggtgtcataggctcttttgggatttttgaagctgtatactgtgtgctaaaacaagcactaaacaaagagtgaaggatttatgtttaattctgaaagcaaccttcttgcctagtgttctgatattggacagtaaaatccacagaccaacctggagttgaaaatcttataatttaaaatatgctctaaacatgtttatcgtatttgatgctacaggatttgaaattgtattacaaatccaatgaaatgagtttttcttttcatttacctctgccccagttgtttctactacatggaagacctcattttgaagggaaatttcagcagctgcagctcatgagtaactgatttgtaacaagcctccttttaaagtaaccctacaaaaccactggaaagtttatggttgtattattttttaaaaaaattccaagtgattgaaacctacacgagatacagaattttatgcggcattttcttctcacatttatatttttgtgattttgtgattgattatatgtcactttgctacagggctcacagaattcattcactcaacaaacataatagggcgctgagggcatagaagtaaaaacacctggtccctgctctcagttcactgtcttgttggacgagaaaagaaacaataacgataaaagacagtgaaagaaaataacgataaaagacagtgaaagaaaataacaataaaagacaaggaaaaaataacaatgaaagttgataagtacatgataagcgaggttccccgtgtgtaggtagatctggtctttagaggcagatagataggtcagtgcaaatactctggtccatgggccatatgaaaaggctaagcttcactgtaaaataataactgggaattctggattgtgtatgggtgttggtgaacttggttttaattagtgaactgctgagagacagagctattctccatgtactggcaagacctgatttctgagcatttaatatggatgccgtgggagtacaaaagtggagtgtggcctgagtaatgcattatgggtggtttaccatttcttgaggtaaaagcatcacatgaacttgtaaaggaatttaaaaatcctactttcataataagttgcataggtttaataatttttaattatatggcttgagtttaaattgtaataggcgtaactaattttaactctataatgtgttcattctggaataatcctaaacatatgaattatgtttgcatgttcacttccaagagcctttttttgaaaaaaagctttttttgaatcatcaagtctttcacatttaaataaagtgtttgaaagctttatttttttttttttttttttttttttttttttttt

SEQ ID NO: 25624 - DNA, 2389 bp, Homo sapiens
aaatccttcttccaatgttcctcccctctctgtatgaaccctgtgttggggggcagaagatggaagcccttggcaagctcgatcgaaccaagctactaaattgctgagctcgttttaactgaagtgtgagaaggaggtttaaggcaagtagacaacatcctgttgttggggtgcttctctcttttttgcacatctggctgaactgggagtcaggtggttgacttgtgcctggctgcagtagcagcggcatctcccttgcacagttctcctcctcggcctgcccaagagtccaccaggccatggacgcagtggctgtgtatcatggcaaaatcagcagggaaaccggcgagaagctcctgcttgccactgggctggatggcagctatttgctgagggacagcgagagcgtgccaggcgtgtactgcctatgtgtgctacagcacctggggtacataaaagatatttccggaaaataaaaaatctcatttcagcatttcagaagccagatcaaggcattgtaatacctctgcagtatccagttgagaagaagtcctcagctagaagtacacaaggtactacagggataagagaagatcctgatgtctgcctgaaagccccatgaagaaaaataaaacaccttgtactttattttctataatttaaatatatgctaagtcttatatattgtagataatacagttcggtgagctacaaatgcatttctaaagccattgtagtcctgtaatggaagcatctagcatgtcgtcaaagctgaaatggacttttgtacatagtgaggagctttgaaacgaggattgggaaaaagtaattccgtaggttattttcagttattatatttacaaatgggaaacaaaaggataatgaatactttataaaggattaatgtcaattcttgccaaatataaataaaaataatcctcagtttttgtgaaaagctccatttttagtgaaatattattttatagctactaattttaaaatgtcttgcttgattgtatggtgggaagttggctggtgtcccttgtctttgccaagttctccactagctatggtgtcataggctcttttgggatttttgaagctgtatactgtgtgctaaaacaagcactaaacaaagagtgaaggatttatgtttaattctgaaagcaaccttcttgcctagtgttctgatattggacagtaaaatccacagaccaacctggagttgaaaatcttataatttaaaatatgctctaaacatgtttatcgtatttgatgctacaggatttgaaattgtattacaaatccaatgaaatgagtttttcttttcatttacctctgccccagttgtttctactacatggaagacctcattttgaagggaaatttcagcagctgcagctcatgagtaactgatttgtaacaagcctccttttaaagtaaccctacaaaaccactggaaagtttatggttgtattattttttaaaaaaattccaagtgattgaaacctacacgagatacagaattttatgcggcattttcttctcacatttatatttttgtgattttgtgattgattatatgtcactttgctacagggctcacagaattcattcactcaacaaacataatagggcgctgagggcatagaagtaaaaacacctggtccctgctctcagttcactgtcttgttggacgagaaaagaaacaataacgataaaagacagtgaaagaaaataacgataaaagacagtgaaagaaaataacaataaaagacaaggaaaaaataacaatgaaagttgataagtacatgataagcgaggttccccgtgtgtaggtagatctggtctttagaggcagatagataggtcagtgcaaatactctggtccatgggccatatgaaaaggctaagcttcactgtaaaataataactgggaattctggattgtgtatgggtgttggtgaacttggttttaattagtgaactgctgagagacagagctattctccatgtactggcaagacctgatttctgagcatttaatatggatgccgtgggagtacaaaagtggagtgtggcctgagtaatgcattatgggtggtttaccatttcttgaggtaaaagcatcacatgaacttgtaaaggaatttaaaaatcctactttcataataagttgcataggtttaataatttttaattatatggcttgagtttaaattgtaataggcgtaactaattttaactctataatgtgttcattctggaataatcctaaacatatgaattatgtttgcatgttcacttccaagagcctttttttgaaaaaaagctttttttgaatcatcaagtctttcacatttaaataaagtgtttgaaagctttattt

SEQ ID NO: 25625 - DNA, 2376 bp, Homo sapiens
aaatccttcttccaatgttcctcccctctctgtatgaaccctgtgttggggggcagaagatggaagcccttggcaagctcgatcgaaccaagctactaaattgctgagctcgttttaactgaagtgtgagaaggaggtttaaggcaagtagacaacatcctgttgttggggtgcttctctcttttttgcacatctggctgaactgggagtcaggtggttgacttgtgcctggctgcagtagcagcggcatctcccttgcacagttctcctcctcggcctgcccaagagtccaccaggccatggacgcagtggctgtgtatcatggcaaaatcagcagggaaaccggcgagaagctcctgcttgccactgggctggatggcagctatttgctgagggacagcgagagcgtgccaggtatcacggttacatttatacataccgagtgtcccagacagaaacaggttcttggagtgctgagcatttcagaagccagatcaaggcattgtaatacctctgcagtatccagttgagaagaagtcctcagctagaagtacacaaggtactacagggataagagaagatcctgatgtctgcctgaaagccccatgaagaaaaataaaacaccttgtactttattttctataatttaaatatatgctaagtcttatatattgtagataatacagttcggtgagctacaaatgcatttctaaagccattgtagtcctgtaatggaagcatctagcatgtcgtcaaagctgaaatggacttttgtacatagtgaggagctttgaaacgaggattgggaaaaagtaattccgtaggttattttcagttattatatttacaaatgggaaacaaaaggataatgaatactttataaaggattaatgtcaattcttgccaaatataaataaaaataatcctcagtttttgtgaaaagctccatttttagtgaaatattattttatagctactaattttaaaatgtcttgcttgattgtatggtgggaagttggctggtgtcccttgtctttgccaagttctccactagctatggtgtcataggctcttttgggatttttgaagctgtatactgtgtgctaaaacaagcactaaacaaagagtgaaggatttatgtttaattctgaaagcaaccttcttgcctagtgttctgatattggacagtaaaatccacagaccaacctggagttgaaaatcttataatttaaaatatgctctaaacatgtttatcgtatttgatgctacaggatttgaaattgtattacaaatccaatgaaatgagtttttcttttcatttacctctgccccagttgtttctactacatggaagacctcattttgaagggaaatttcagcagctgcagctcatgagtaactgatttgtaacaagcctccttttaaagtaaccctacaaaaccactggaaagtttatggttgtattattttttaaaaaaattccaagtgattgaaacctacacgagatacagaattttatgcggcattttcttctcacatttatatttttgtgattttgtgattgattatatgtcactttgctacagggctcacagaattcattcactcaacaaacataatagggcgctgagggcatagaagtaaaaacacctggtccctgctctcagttcactgtcttgttggacgagaaaagaaacaataacgataaaagacagtgaaagaaaataacgataaaagacagtgaaagaaaataacaataaaagacaaggaaaaaataacaatgaaagttgataagtacatgataagcgaggttccccgtgtgtaggtagatctggtctttagaggcagatagataggtcagtgcaaatactctggtccatgggccatatgaaaaggctaagcttcactgtaaaataataactgggaattctggattgtgtatgggtgttggtgaacttggttttaattagtgaactgctgagagacagagctattctccatgtactggcaagacctgatttctgagcatttaatatggatgccgtgggagtacaaaagtggagtgtggcctgagtaatgcattatgggtggtttaccatttcttgaggtaaaagcatcacatgaacttgtaaaggaatttaaaaatcctactttcataataagttgcataggtttaataatttttaattatatggcttgagtttaaattgtaataggcgtaactaattttaactctataatgtgttcattctggaataatcctaaacatatgaattatgtttgcatgttcacttccaagagcctttttttgaaaaaaagctttttttgaatcatcaagtctttcacatttaaataaagtgtttgaaagctttattt

SEQ ID NO: 25626 - DNA, 2334 bp, Homo sapiens
aaatccttcttccaatgttcctcccctctctgtatgaaccctgtgttggggggcagaagatggaagcccttggcaagctcgatcgaaccaagctactaaattgctgagctcgttttaactgaagtgtgagaaggaggtttaaggcaagtagacaacatcctgttgttggggtgcttctctcttttttgcacatctggctgaactgggagtcaggtggttgacttgtgcctggctgcagtagcagcggcatctcccttgcacagttctcctcctcggcctgcccaagagtccaccaggccatggacgcagtggctgtgtatcatggcaaaatcagcagggaaaccggcgagaagctcctgcttgccactgggctggatggcagctatttgctgagggacagcgagagcgtgccaggcgtgtactgcctatgtgtgctcatttcagaagccagatcaaggcattgtaatacctctgcagtatccagttgagaagaagtcctcagctagaagtacacaaggtactacagggataagagaagatcctgatgtctgcctgaaagccccatgaagaaaaataaaacaccttgtactttattttctataatttaaatatatgctaagtcttatatattgtagataatacagttcggtgagctacaaatgcatttctaaagccattgtagtcctgtaatggaagcatctagcatgtcgtcaaagctgaaatggacttttgtacatagtgaggagctttgaaacgaggattgggaaaaagtaattccgtaggttattttcagttattatatttacaaatgggaaacaaaaggataatgaatactttataaaggattaatgtcaattcttgccaaatataaataaaaataatcctcagtttttgtgaaaagctccatttttagtgaaatattattttatagctactaattttaaaatgtcttgcttgattgtatggtgggaagttggctggtgtcccttgtctttgccaagttctccactagctatggtgtcataggctcttttgggatttttgaagctgtatactgtgtgctaaaacaagcactaaacaaagagtgaaggatttatgtttaattctgaaagcaaccttcttgcctagtgttctgatattggacagtaaaatccacagaccaacctggagttgaaaatcttataatttaaaatatgctctaaacatgtttatcgtatttgatgctacaggatttgaaattgtattacaaatccaatgaaatgagtttttcttttcatttacctctgccccagttgtttctactacatggaagacctcattttgaagggaaatttcagcagctgcagctcatgagtaactgatttgtaacaagcctccttttaaagtaaccctacaaaaccactggaaagtttatggttgtattattttttaaaaaaattccaagtgattgaaacctacacgagatacagaattttatgcggcattttcttctcacatttatatttttgtgattttgtgattgattatatgtcactttgctacagggctcacagaattcattcactcaacaaacataatagggcgctgagggcatagaagtaaaaacacctggtccctgctctcagttcactgtcttgttggacgagaaaagaaacaataacgataaaagacagtgaaagaaaataacgataaaagacagtgaaagaaaataacaataaaagacaaggaaaaaataacaatgaaagttgataagtacatgataagcgaggttccccgtgtgtaggtagatctggtctttagaggcagatagataggtcagtgcaaatactctggtccatgggccatatgaaaaggctaagcttcactgtaaaataataactgggaattctggattgtgtatgggtgttggtgaacttggttttaattagtgaactgctgagagacagagctattctccatgtactggcaagacctgatttctgagcatttaatatggatgccgtgggagtacaaaagtggagtgtggcctgagtaatgcattatgggtggtttaccatttcttgaggtaaaagcatcacatgaacttgtaaaggaatttaaaaatcctactttcataataagttgcataggtttaataatttttaattatatggcttgagtttaaattgtaataggcgtaactaattttaactctataatgtgttcattctggaataatcctaaacatatgaattatgtttgcatgttcacttccaagagcctttttttgaaaaaaagctttttttgaatcatcaagtctttcacatttaaataaagtgtttgaaagctttattt

SEQ ID NO: 25627 - DNA, 1855 bp, Homo sapiens
ggttgcagtgagccaagaccgcacactacactccagcctgggcatagagcaagactccatctcaaaaaaaaaagaaaaaagaaaatagtctctggtataaataacctctagaaagactccaccaaaaatttcatcttagcatttctccccaaacttcatgtaaaataaaatagagttgagagaaaaatagaaaggcaagggagtacctgttcactatttttattaaaccagtgttctactttattttaggtgtatcttttcttatttaaatgtcagctaaactttctttttaagatatggaatgaaagatgcccatccttcaggtttcgtttaagcaagaatccccattctcaaataatataatataaactttccaaattcttaagtagatcatctgagattgaaagctaagtttaactttctcaaagatattttagccgccatgacacctagacaaagtggtatattaaattctgattaatttggtcctaaagcacctaagaatcattcttactttcttatccacaggggttattaagttttcacattaaaaaaaatccaacagtgaataatactgcattggggttactgtaattgttaagtaaaataagaaatacaaatctttagttagatcacatggcacctgactactgcttagaaaatggtaagacttactacataaatcatgagtcactattgacatctactatatcatatcataggttaggtatctaattataaatagtcaaatcagctgactcaaggtggcatagctcaagcagaggaagataatacaagttgagtatggatttaacactctaaacctgtcagcactgtaggaaaagtaacttaaaactgcacaccccacttatgcataatcatcagatataaagagggtacattcctgtaatttattgttgctctagtgatcttaaagaattaagtccacattcataaagtccaaacttgtctccaaggatttgctttgactttgggagtatctggatcattaagtaatttccggaggctcagagtaaaagctttttatctctaaatattacttccctggaatattagatgtagcagaagtcagtaacggagtgacctttctcttaaacaattcatagattcactgaaattttcttcaactttaggaaaattaaatatattccacagtgctgtaagtcttaaatattgattttcctctgaaatcttgactcatcctacccaccaacattctccctttgtacactatgttctttgtaatgttcatgttacacaagtgaaaattagtaacattagtaaattttcattgcaggtttatttgttcatatttctggatatataatccattactgttaaacttcatatcaatgttccgatatttcttcatcttatgttttatgttacaaaacaggttatttcactatatgtatgtttaattgattaattcttccctttttttggaaatgaaacagcactctcaattattgggacagaaaagttatttcatagggaatacttcaaacactgatatctacaacaggcagtaagattcgtcacaacaattggtatactgtcaatataccatacaaagttccatctggtcttgattaaaaattattttagttttctcaggaaaatgatacagagggagaattgcctagattatatgagagaaaaaaaagtagagagaaacataatgttttcttagattattacagcagtgaactatttccacctggtaagaagtgccttggatgggtcagtctctagacctgatgtgtctggtgccaattgttggttctgtagtggaattcaagcgaaagggatcccattaatggctccgttgagg

SEQ ID NO: 25628 - DNA, 2429 bp, Homo sapiens
ggttgcagtgagccaagaccgcacactacactccagcctgggcatagagcaagactccatctcaaaaaaaaaagaaaaaagaaaatagtctctggtataaataacctctagaaagactccaccaaaaatttcatcttagcatttctccccaaacttcatgtaaaataaaatagagttgagagaaaaatagaaaggcaagggagtacctgttcactatttttattaaaccagtgttctactttattttaggtgtatcttttcttatttaaatgtcagctaaactttctttttaagatatggaatgaaagatgcccatccttcaggtttcgtttaagcaagaatccccattctcaaataatataatataaactttccaaattcttaagtagatcatctgagattgaaagctaagtttaactttctcaaagatattttagccgccatgacacctagacaaagtggtatattaaattctgattaatttggtcctaaagcacctaagaatcattcttactttcttatccacaggggttattaagttttcacattaaaaaaaatccaacagtgaataatactgcattggggttactgtaattgttaagtaaaataagaaatacaaatctttagttagatcacatggcacctgactactgcttagaaaatggtaagacttactacataaatcatgagtcactattgacatctactatatcatatcataggttaggtatctaattataaatagtcaaatcagctgactcaaggtggcatagctcaagcagaggaagataatacaagttgagtatggatttaacactctaaacctgtcagcactgtaggaaaagtaacttaaaactgcacaccccacttatgcataatcatcagatataaagagggtacattcctgtaatttattgttgctctagtgatcttaaagaattaagtccacattcataaagtccaaacttgtctccaaggatttgctttgactttgggagtatctggatcattaagtaatttccggaggctcagagtaaaagctttttatctctaaatattacttccctggaatattagatgtagcagaagtcagtaacggagtgacctttctcttaaacaattcatagattcactgaaattttcttcaactttaggaaaattaaatatattccacagtgctgtaagtcttaaatattgattttcctctgaaatcttgactcatcctacccaccaacattctccctttgtacactatgttctttgtaatgttcatgttacacaagtgaaaattagtaacattagtaaattttcattgcaggtttatttgttcatatttctggatatataatccattactgttaaacttcatatcaatgttccgatatttcttcatcttatgttttatgttacaaaacaggttatttcactatatgtatgtttaattgattaattcttccctttttttggaaatgaaacagcactctcaattattgggacagaaaagttatttcatagggaatacttcaaacactgatatctacaacaggcagtaagattcgtcacaacaattggtatactgtcaatataccatacaaagttccatctggtcttgattaaaaattattttagttttctcaggaaaatgatacagagggagaattgcctagattatatgagagaaaaaaaagtagagagaaacataatgttttcttagattattacagcagtgaactatttccacctggtaagaagggtgcacttgagaatggggttcaagtactctaggaacatagatgtaagttctggatgcacagtagttgttgcttagctgtaagctggaaatttcaaggcagaaacagcagataccacaactataactgggtctccttgttttttgttttatgtgtatacgtgagattatggggaaagacaaaagtaatgcatagagatttattttttaacattcaattcataagcagtgtttatacctctttgtacttacttgaaaagtgtatattatgtaaatttagtataaaaacacttggactaattcataccatgtggtaaaatttcacattcaaaagaaatacccttctgttattaaaaataaaaaaaaaaggagccaggagggtggctcatgactgtaatcccagtgctctgggaagccaaggtggagggatcatttgaggccaggactacttgagaacagcctgggcaacatagctagatcccttctctacaaaaagtaaaaaaaaaaaaaaaaaaaaaaaaaaaaaatagctaggcagggtggcacatgactggctattaaggaggctcaggtggagggatctcttcagcccaggaatttaaggcttcagtgagctaagattgggccattgcactccagccagggcaacagaccaagacccagtctcaaaataaataaa

SEQ ID NO: 25629 - DNA, 2636 bp, Homo sapiens
ggttgcagtgagccaagaccgcacactacactccagcctgggcatagagcaagactccatctcaaaaaaaaaagaaaaaagaaaatagtctctggtataaataacctctagaaagactccaccaaaaatttcatcttagcatttctccccaaacttcatgtaaaataaaatagagttgagagaaaaatagaaaggcaagggagtacctgttcactatttttattaaaccagtgttctactttattttaggtgtatcttttcttatttaaatgtcagctaaactttctttttaagatatggaatgaaagatgcccatccttcaggtttcgtttaagcaagaatccccattctcaaataatataatataaactttccaaattcttaagtagatcatctgagattgaaagctaagtttaactttctcaaagatattttagccgccatgacacctagacaaagtggtatattaaattctgattaatttggtcctaaagcacctaagaatcattcttactttcttatccacaggggttattaagttttcacattaaaaaaaatccaacagtgaataatactgcattggggttactgtaattgttaagtaaaataagaaatacaaatctttagttagatcacatggcacctgactactgcttagaaaatggtaagacttactacataaatcatgagtcactattgacatctactatatcatatcataggttaggtatctaattataaatagtcaaatcagctgactcaaggtggcatagctcaagcagaggaagataatacaagttgagtatggatttaacactctaaacctgtcagcactgtaggaaaagtaacttaaaactgcacaccccacttatgcataatcatcagatataaagagggtacattcctgtaatttattgttgctctagtgatcttaaagaattaagtccacattcataaagtccaaacttgtctccaaggatttgctttgactttgggagtatctggatcattaagtaatttccggaggctcagagtaaaagctttttatctctaaatattacttccctggaatattagatgtagcagaagtcagtaacggagtgacctttctcttaaacaattcatagattcactgaaattttcttcaactttaggaaaattaaatatattccacagtgctgtaagtcttaaatattgattttcctctgaaatcttgactcatcctacccaccaacattctccctttgtacactatgttctttgtaatgttcatgttacacaagtgaaaattagtaacattagtaaattttcattgcaggtttatttgttcatatttctggatatataatccattactgttaaacttcatatcaatgttccgatatttcttcatcttatgttttatgttacaaaacaggttatttcactatatgtatgtttaattgattaattcttccctttttttggaaatgaaacagcactctcaattattgggacagaaaagttatttcatagggaatacttcaaacactgatatctacaacaggcagtaagattcgtcacaacaattggtatactgtcaatataccatacaaagttccatctggtcttgattaaaaattattttagttttctcaggaaaatgatacagagggagaattgcctagattatatgagagaaaaaaaagtagagagaaacataatgttttcttagattattacagcagtgaactatttccacctggtaagaagggtgcacttgagaatggggttcaagtactctaggaacatagatgtaagttctggatgcacagtagttgttgcttagctgtaagctggaaatttcaaggcagaaacagcagataccacaactataactgggtctccttgttttttgttttatgtgtatacgtgagattatggggaaagacaaaagtaatgcatagagatttattttttaacattcaattcataagcagtgtttatacctctttgtacttacttgaaaagtgtatattatgtaaatttagtataaaaacacttggactaattcataccatgtggtaaaatttcacattcaaaagaaatacccttctgttattaaaaataaaaaaaaaaggagccaggagggtggctcatgactgtaatcccagtgctctgggaagccaaggtggagggatcatttgaggccaggactacttgagaacagcctgggcaacatagctagatcccttctctacaaaaagtaaaaaaaaaaaaaaaaaaaaaaaaaaaaaggcgctgggcgggggggccaaagaacggggaaaaaaagggggccccagggggagggggcaccccctcacccccagggaataaaagggcccacaggaacaaaaaggggcccagggagccacccagcggggggacgaagacacaagaaccactgtctttcaaaatatattaacatacaacattgaagaaaaagagggcgtgggaccggaaactaacactcaagatttatccagggcgtgtggtttgagaccccagtgggaacttgctcatagaggacattaaaaaacctttgaacacttttcttcaaaattcttcaaatttttatcaccacaatatattccccctccatgtagcggaatatt

SEQ ID NO: 25630 - DNA, 260 bp, Homo sapiens
ccagtagttcccgttgtacagtgctaccaatgtcctttccatacttcgcttagattaaaaaaaaagtcattaaccagatcctgttttgaaaatactttgaaatatggtaatgaagtattcttttcttacttctttgttacctttcccctaaacatccagaatcatccatcaatgttcagtttctgacttctgaaataagctcctaaaactagtttcagagtaaactgatgtgaatggcaaagcttttcttctttctcgag

SEQ ID NO: 25631 - DNA, 385 bp, Homo sapiens
tcgagaattcatgaggagactgccaccttccttaataaagtggagccccaaatgccaagattgtcatacagggagaatctccaagtggtaaggggttattgctggatctggcaataatctgattcttgttctgaggcttcccctttaacacgtattgagggttcaatttagtgctgctgcctccatctttcttctccagtttaagtctctgatccaagtatgaacacattagtctttccctaatgccaatggaacagctgatgtaaggctaggacatttaaatcaagctttgctaaaagctggaggataatgaatagagagcaacatgaaactatttagtctggcttacaaagacatttttctcatgcccttatcttttggtgtg

SEQ ID NO: 25632 - DNA, 395 bp, Homo sapiens
taggaaatatactgaacaagaatgaaaccaagcatcaaaatttgtggggtccagctaaggcagtacatagaggaaaattataacttttaatgcctatattagaataaaggaggccaggcacagtggctcatccctgtaatcccagcacttcgggaagccaaggtgagaggattgcttgagctcagaagtttgagaccagcctgggcaacatagtgagagctcgcctctatgaaaaattttaaaaaattatcctggggtggtggcatgcacctgtagtcccagttactctggtggctaatattagaggatcacttaagcccaggaggtcgaggctgcagtgagctgttattacaccactgcactccagtctgggcaacaaagtgagatcctattca

SEQ ID NO: 25633 - DNA, 428 bp, Homo sapiens
attttagagtcagtttgctgatatccacaaaacaatttgctagtattttgactaggattacattgaatctagagattgcgtgggaaaaaattctaacttagtgatattgagtctttctatcaatgaacatctaatatctgtcaatgtatttatatctttgatatctttcattagacttgtataattttccttatattgaaccctgtgctattttgttagatttgctcctagtaaatgtttctattgcaaattcttattgttcattgttgttatgggaaatcatttgagttttttgtattaagattgcatttggcaaccttgttataattgcttattagtttcaggagttttttgttgattctttgggattttctacacagacagatgtcatctgtgaacaatgacagtttcatttctttttttctaat

SEQ ID NO: 25634 - DNA, 670 bp, Homo sapiens
tccgttttggaagaatggcagcactttccaagcacaggttggggttcagggttaatttgcaaagttcccccaaggtgaggctttgaggacagtagcattgcccaggtgagccttgtggtattgaaaacccgcccaagctgatcattgaaggtgggcgcccagcaaggctggctgtttccagagaagaggccgggcccaggattaatgttgcattgcagacgcatctctgaacaatcacatgctgttctgcaccagggaagctggggtttttaacatccttttgtggtccctgcttacgatgcatactgccctgtgggagaagcttcctacccgcgtggagtacaggtgctgctccctgacctggctctggatgttcccctctcgcttattctacttcctgctgaagggccccttctaaagggggttgagagaaggccttgcctttgtatctcctctgagactctgaccacccacttcctgccagggcagggccgtgggagacccaggccgtggggccgggtctgtgtgcggggccaggcagccgtctgcgtcgctgttttccagcctccgtgttgagcatgacgtaaagtgacaagtgtttaagtcagcacgaaaacactgaaggcccctccgtccctgcagcctgtgaacacgtctactcggccacccg

SEQ ID NO: 25635 - DNA, 456 bp, Homo sapiens
cctgaccccagtgtccgagagcagcaaggtcgtcgtggtggagagtgtcatgggacagctcagctcacatcaccagctcacctctggtctgtggggcaagaggctgcaatattccatcctgggtgtctgggctgctaacctggcctgctcaggcttcccaccctgtgccctgggctgggcacacccccgggaagggaccccggacacggctcccacatccaggctcaaggcggatgcacttcctgcacctccagtcttctgtgtagcggctttaacccacgtatgtctgtcacgtccagtcccgagacggctgagtgaccccaagaaaggcttccctgacacccggacagaggctggagggctggggctgcgtgagggtggtgggcctgcggggacattcttactgtgctaaaaagccactgcaaacatagcaataaaaacctgtcattttccaaa

SEQ ID NO: 25636 - DNA, 417 bp, Homo sapiens
ttaactcattagcttagcagaaacatgttgtaggccagatttgtcctgcaggctgttatttgccagcctatcttagaatacagatatacctcattttgttgtgcttcacagatagtgtgattttcacagtttgaaggtttgcagtgaccctgcattgagcaagtctgttagtaccatttttccaacagcatgtgcccacttcatgtctctgtgtcacattttgataattctcacaatatttcaggctttttcattattctgttgtggtgattctgtaatcagtgatctttgatgttactttagtaattgttttggggtaccaggaaccaccttgtacctggcaaacttaatcagtaaatgtatgtgttctgactgttcaactgactggctgttccacttgtctctcttcctcttctt

SEQ ID NO: 25637 - DNA, 355 bp, Homo sapiens
ttgtgaaatgaggctggtaatatctccattgtagtttcagctaaagtatccagtacctagtaaatgctcaaaataccattattttggcctggcacagtggctcaggcctgtaattccagcactttcggaggccgaggcaggtcaatcacttgaggtcaggagttcgagaccagcctggccaacaaggtgaaaccccatctctactaaaaatacaaaaaattagccgggtgtggtggcgcatgcctgtaatcctagctacttgggaggctgaagccggagaatcacttgaacctgggaggcagaggttgcagtgagctgagattgcaccatggcactccagcctgggtgacaagag

SEQ ID NO: 25638 - DNA, 482 bp, Homo sapiens
attaatttgtaactacaggattgcaaaaaattttaatagctttaacctctagaaacaggatatgtaaatgctgaaaaacaaagtcccaaccagataagtcctgtgggtggtttcccagtcatgattcatggaaggagaaatgtactgatgagaaatcacatccaaaatattgtctctgcagtggtaatacttacaaagtcgacgcagtctcaggcggagctcactgaagatggtttccaagcttatatgtacttcacccatcccccaccctccagcccaaaacaaatcccaaacatactgcttagaactcagcctgcgcagcccagaggtacagagaggcaggaagcacccaggtgtccacatacggtgccattgtggacttgtagggcaggattccaggatatgggtgatgggcgtgtggaaccgcggcgccccctgcacagtgtggctcatttgagccggatgggggccgtgaaggcatc

SEQ ID NO: 25639 - DNA, 693 bp, Homo sapiens
aaaaaaaaaaaaaaaaagccccaaaccagctgagcttagatggatctctctggccatctttttaaacagtaagggacctttaaaaagtttgattcctctcttccccacagcaaggctatttgcttcctgaagataaatcaattgtaaaaagtagcttaatttaaagcgttcaattcccctgctttttacattgaggagaaattatggtgacagctattcctgttttgcgtgcttagtaccagccaggcactgagcccaaaactccaactcactcttggctgttgagccaaccctgtgccagaagaaaatccccactccctacaatgtgtggaattcacattatagttggagacagaaggggagaaacaaacacagcctgccaatcctggagaatgcctggtgggggtgctgggggaagaagtccaatttcagctgggaaaatgggacaggagccttgggagtgggtttacacctcaaattcccttatggccacagtccattggcccctagcctcctccccactttacagatgaagagactaggtttagagagaggaacagccggcttggcagaggcaactgctgaggcagttgaggaaaggtgaggacctcccagagtgagaggggcaagggaactggaagtcaactgtgggacctggaagtaggggagggaagaataaatctgcggaggggt

SEQ ID NO: 25640 - DNA, 390 bp, Homo sapiens
gcccgcactgtaagccaggctgtgattatgaggggcagctttatgaggagggggtcaccttcctgtccagctccaacccttgtctacagtgcacctgcctgaggagccgagttcgctgcatggccctgaagtgcccgcctagcccctgcccagagccagtgctgaggcctgggcactgctgcccaacctgccaaggctgcacagaaggtggctctcactgggaacatggccaagagtggacaacacctggggacccctgccgaatctgccggtgcctgggtacagaggtgcttaatcagaaagcatcggcatggcgagggccattcataactctgagttccaacaaaagttgatatctggaagattaataaaagtttaatttaagaaaac

SEQ ID NO: 25641 - DNA, 441 bp, Homo sapiens
agaaagaagtctcggcgtcggtgtaccaggtccctctcaagtcttcagctcagtactgattaattagcacatgcgtataaactaccagagaagccccagaaagaagcagtggaaacaatccccacaactcacagaagtagcagagtaattcctccttccactacccaaagtgagaatctcacaaggcatcagatgagtagtcagaaggttcctgccctcagtagcatggaaaaactagtctctaaaagctgctgcgactctgctgaacaaaagcttaaaaacaagccttgaaaggatcaaacagtctccaagtaacttagcctcatcccagaacgaagcttcaaggattatttgtagtacaaaaatatccagcaacaaagtaaaattttacaaggtaaaactcacaatagctggaaaattaaccaggccaagaaagaagca

SEQ ID NO: 25642 - DNA, 497 bp, Homo sapiens
agttaatgacatttgttatgccatagaaaatatttgttgaattgccactctaatgactttatatcagccaactcattatcaacactagaaaagatgattaaaaaatacttcagtacgttcatgtgttggcttgttaacatttttaagagtctataagagaaaaatgcatccaatctcgacaaaaatatttttcaagtatcttgtaggtacgtacaactaactaccttgtgaacaaaagtcactatataattatataatttctgacacttaaaaaagtttattgtgcaaaagaagatatatgttctaataccaaatccacatataaaataattgacttatttaaataatttaagatgctcttttatatatttatattaaaaactttacagagaataaaaaaggcattatacaggctgcttatggtttttgatgtttggatatacaatacatgtatcaaagattgtggaaataaatcaagcaatatattcaattggact

SEQ ID NO: 25643 - DNA, 493 bp, Homo sapiens
tcactttccatgtcttttctgattcttatatagacaatgtcaaggacttagaacatttgaaaaaaaaatttgaaagaaaaagttatcagaaaccctatccctaatttttcctgaatcacctgtaagatgtaacatggatggagctgcaagccattaccttaagggaactaatgcaagaacataaaaccaaacatcacatgttctcgcttataggtgggagctaaacattgagttcatatgaacacgagatgggaacaacagacaccagggcctacttgagggtgcggtgtaggcagagagtgagtgtgggaaattatctattggatactgtgcttattacctgggtgatgaaataaggtatacaccaaaccatcacaagacactatgcatagaacaaaactgcacttgtacccctgaaactaaaagttaaaaaaagaaaacaaaaatctccccaaaacaatttaagtaatattttgcagtaaatgccttactt

SEQ ID NO: 25644 - DNA, 835 bp, Homo sapiens
tgagatggagtttcactcttgctgtccaggctggggtgcaatggcccaatctcggctcaccacaacctccaccttccaggttcagcgattctcctgcctcagcctccggagtacctgggattacaggcatgcaccaccacgcctggctaattttgtatttttagtagagacggggtttttccatgttggtcaggctggtctcgaactcccgacctcaggtgatccgcccacctcggcctcccgaagcctttatctttgctaacaaaaatcctccaagaatgtctgcattctctgcctttgcttcctgggtgctcacggcctgccttcctgccttcactgctcacaaactgctcccaagggtgaacaaccttgagcgctcctaagaaccagtgtgtcctcggcctctctgctctcccgatactgggtccttggcctgtggatggacggcaaacagcacttagccctcaaacctggtcctgtcttccagaactcgttcagtctccgttaaatgacaaggagctcaccactaccaaccgcagcttgaacttaacaaaaacagagtggggttttcatttggaagagaaaaagaggaaaaaagcccttagtgcttttagaaaagtacatggggccgggtgtggtggctcacgcctgtaatcccagaaccttgggaagctgaggcaggcggatcacggggtcaagagatggacatcattctggccaacatggtgaaaccccatctctactaaaaataccaaaattaactgggcgtggtggcgcgcacctgtagtcccagctactcgggaggctgaggcaagagaatcgcttgaacccggga

SEQ ID NO: 25645 - DNA, 433 bp, Homo sapiens
agatactattcaacaatttaaaagaataaactattgatacatgcaacataagtgaatcccaaaattattatgctgagtggaaaaagtaagatttttaaaaagagtatatgctgtatgagtccatttatagtaagctgtaaaacatgcaaactggcctgccacagtggctcctgcctatgatcccagcactttgggaggccgaggtgggaggatcacttgagctcaggagttccagaccaacctgagcaacatggcaaaaccatgtctccaccaaacaaacaaaaattagccaggcatggtgacatgtgcctgtagtcccagctatttgggaggctaaggtgggaggatcacttgagcccaggaggtggaagctgcagtgagccgagatcatgccactgcactccagcctgggcgacagagtgagacccggtct

SEQ ID NO: 25646 - DNA, 634 bp, Homo sapiens
tccttgccgacttaactcgttgctcggttataggtccagtttcattattgtcggtgttaaatgccgccccaggagaatgtgcgttgccgcagtttgagaagcttgaagttaagatgctggccttggagtcggatcgttctgtccagttctgattctgcccacttactggctttgattttaaccaacttctcttgtcctcggtagaatcctgtgtttttaatcattatgtaatataccatacagcattattatatagtacattgcagtattataaataatttggaaagttaaaacaaattcatagtcccattgcagaaacacagtattgccattttagtgcactacagcaattaacttgataggcataccttagaatctcattttagagataatgcctgagcccaaccaaacaaggctaaaatgaaaaagcttgtaaattccctgatgattcttatgcacattaaggtttgagaagcattgctctggcacagtattttttattctcaggtgtctctctctaccttgtatattgcttaaatgtgtgttttgtgattgaataattatccaattttagttatggatgtaatccacatgcttgacatttttattaaatacaatataaaaacactatata

SEQ ID NO: 25647 - DNA, 1344 bp, Homo sapiens
gcatttcgggtctgcgaggtggggtaggcgggcaaggcgggcgccgaggtttgcaaaggctcgcagcggccagaaacccggctccgagcggcggcggcccggcttccgctgcccgtgagctaaggacggtccgctccctctagccagctccgaatcctgatccaggcgggggccaggggcccctcgcctcccctctgaggaccgaagatgagcttcctcttcagcagccgctcttctaaaacattcaaaccaaagaagaatatccctgaaggatctcatcagtatgaactcttaaaacatgcagaagcaactctaggaagtgggaatctgagacaagctgttatgttgcctgagggagaggatctcaatgaatggattgctgtgaacactgtggatttctttaaccagatcaacatgttatatggaactattacagaattctgcactgaagcaagctgtccagtcatgtctgcaggtccgagatatgaatatcactgggcagatggtactaatattaaaaagccaatcaaatgttctgcaccaaaatacattgactatttgatgacttgggttcaagatcagcttgatgatgaaactctttttccttctaagattggtgtcccatttcccaaaaactttatgtctgtggcaaagactattctaaagcgtctgttcagggtttatgcccatatttatcaccagcactttgattctgtgatgcagctgcaagaggaggcccacctcaacacctcctttaagcactttattttctttgttcaggagtttaatctgattgataggcgtgagctggcacctcttcaagaattaatagagaaacttggatcaaaagacagataaatgtttcttctagaacacagttacccccttgcttcatctattgctagaactatctcattgctatctgttatagactagtgatacaaactttaagaaaacaggataaaaagatacccattgcctgtgtctactgataaaattatcccaaaggtaggttggtgtgatagtttccgagtaagaccttaaggacacagccaaatcttaagtactgtgtgaccactcttgttgttatcacatagtcatacttggttgtaatatgtgatggttaacctgtagcttataaatttacttattattcttttactcatttactcagtcatttctttacaagaaaatgattgaatctgttttaggtgacagcacaatggacattaagaatttccatcaataatttatgaataagtttccagaacaaatttcctaataacacaatcagattggttttattcttttattttacgaataaaaaatgtatttttcagtatc

SEQ ID NO: 25648 - DNA, 516 bp, Homo sapiens
cttgggcgcgttattttttttcccccgatccatccaagaaaaggtagtttttcccaccgtagagttctgaaaagaggtaaaatagtagtcctttggtcatcctatttttgctttcaattttgatatttcagactgtaaaaggccttgggggatgatagtacatgtggtagcagtaatttttttgaagcaactgcactgacattcatttgagttttctctcattatcagattctgttccaaacaagtattctgtagatccaaatggattaccagtgtgctacagacttcttattatagaacagcattctattctacatcaaaaatagtttgtgtaagttagttttggttaccatctaaaatatttttaaatgttctttacataaaaatttatgttgtgttttaaaatccttaggggctttatctatttttctaagtcagttaactgtacttctaaaaaaagtattttgtatctacttttgtaacttcgtcagaataaaatatattgaaagcaaaaaa

SEQ ID NO: 25649 - DNA, 657 bp, Homo sapiens
ctacaatatattatgtaatataaacaatataaataaatgatcctgtaggcccacctcaacacctcctttaagcactttattttctttgttcaggagtttaatctgattgataggcgtgagctggcacctcttcaagaattaatagagaaacttggatcaaaagacagataaatgtttcttctagaacacagttacccccttgcttcatctattgctagaactatctcattgctatctgttatagactagtgatacaaactttaagaaaacaggataaaaagatacccattgcctgtgtctactgataaaattatcccaaaggtaggttggtgtgatagtttccgagtaagaccttaaggacacagccaaatcttaagtactgtgtgaccactcttgttgttatcacatagtcatacttggttgtaatatgtgatggttaacctgtagcttataaatttacttattattcttttactcatttactcagtcatttctttacaagaaaatgattgaatctgttttaggtgacagcacaatggacattaagaatttccatcaataatttatgaataagtttccagaacaaatttcctaataacacaatcagattggttttattcttttattttacgaataaaaaatgtatttttcagtatc

SEQ ID NO: 25650 - DNA, 560 bp, Homo sapiens
aattattagaaaaaaaagattccaacattacaataagagaacagaacactaacgcttggagctgatcctgctagcccagtggaggccaagtgccacagtgagaaaagccctctattagacattccacaatccatgttttaagcttatccaaaggtccaaatgtcagccattctgtatgttcatgttgatcatttgcgaacaagaaagcaggtttctaggtatcacttaggatgtgaactgcctctcaactttaaaccctgttagctttacttttttaagtccacaagtgatgaaactagtttctcagctaggcttgtactttcctcattatttctagtatttcaaatattctcaaacaaaagagttaccacttttctccatttattttcagttatggaaatgttccctctcttcaccactaagctccaaagcaaatgaaagacgatcacatgtcaggacagtagtaaaggcagcttataaatgggacataaatcagagatgtgttggtattttgagactcaagactgtcctttttttttctataaacttggtgccggctc

SEQ ID NO: 25651 - DNA, 4974 bp, Homo sapiens
  misc_feature (4845)..(4845): n is a, c, g, or t
  misc_feature (4860)..(4861): n is a, c, g, or t
  misc_feature (4865)..(4865): n is a, c, g, or t
  misc_feature (4873)..(4873): n is a, c, g, or t
  misc_feature (4880)..(4880): n is a, c, g, or t
  misc_feature (4884)..(4884): n is a, c, g, or t
gcatttcgggtctgcgaggtggggtaggcgggcaaggcgggcgccgaggtttgcaaaggctcgcagcggccagaaacccggctccgagcggcggcggcccggcttccgctgcccgtgagctaaggacggtccgctccctctagccagctccgaatcctgatccaggcgggggccaggggcccctcgcctcccctctgaggaccgaagatgagcttcctcttcagcagccgctcttctaaaacattcaaaccaaagaagaatatccctgaaggatctcatcagtatgaactcttaaaacatgcagaagcaactctaggaagtgggaatctgagacaagctgttatgttgcctgagggagaggatctcaatgaatggattgctgtgaacactgtggatttctttaaccagatcaacatgttatatggaactattacagaattctgcactgaagcaagctgtccagtcatgtctgcaggtccgagatatgaatatcactgggcagatggtactaatattaaaaagccaatcaaatgttctgcaccaaaatacattgactatttgatgacttgggttcaagatcagcttgatgatgaaactctttttccttctaagattggtgtcccatttcccaaaaactttatgtctgtggcaaagactattctaaagcgtctgttcagggtttatgcccatatttatcaccagcactttgattctgtgatgcagctgcaagaggaggcccacctcaacacctcctttaagcactttattttctttgttcaggagtttaatctgattgataggcgtgagctggcacctcttcaagaattaatagagaaacttggatcaaaagacagataaatgtttcttctagaacacagttacccccttgcttcatctattgctagaactatctcattgctatctgttatagactagtgatacaaactttaagaaaacaggataaaaagatacccattgcctgtgtctactgataaaattatcccaaaggtaggttggtgtgatagtttccgagtaagaccttaaggacacagccaaatcttaagtactgtgtgaccactcttgttgttatcacatagtcatacttggttgtaatatgtgatggttaacctgtagcttataaatttacttattattcttttactcatttactcagtcatttctttacaagaaaatgattgaatctgttttaggtgacagcacaatggacattaagaatttccatcaataatttatgaataagtttccagaacaaatttcctaataacacaatcagattggttttattcttttattttacgaataaaaaatgtatttttcagtatccttgagatttagaacatctgtgtcacttcagataacattttagtttcaagtttgtatggtagtgtttttatagataagatacgtctattttttcaaaattcatgattgcagtttaaatcatcatatgacgtgtgggtgggagcaaccaaagttatttttacagggactttattttttgatctttatttgagattgttttcatatctatctaaattattaggagtgtgtgtatcagaagtaattttttaatgtcttctaaggatggtcttccaggcttttaaactgaaaagcttaattcagatagtagcttttggctgagaaaaggaatccaaaatattaataaatttagatctcaaaaccactatttttattatttcattatttttcagaggccttaaaattctggataagagaatggaggaaaatactcagagtacttgattattttatttccttttattaaaaaattacttctatgtttttattgtctcttgagccttagttaagagtagtgtagaaatgcatgaacttcatcctaataaggataaaacttaaggaaaaccacaataaaccatgaaggtgtacacatcttataacacagataaagttttggtgtgctacctattcttgagagagtgagtgagtgtatgtgtttaaaggaaacaaaatgggagaaataagttttaaaaaaatcctcattttgttaatattcaaaagatggactgagcttccacttgggttttatcttgttttaattgtttttgtatcaaaacttgaaattcctctatttctattgggatataaaagccttccccttcagtgaagaaaacatttattttttatttgattcctaggatttagtaaactctagctgtctatttaaaatgtactgaggcacaacaagtattatactggaagacttgccaaactggcaaagctttaagttcatcagcattctatgtggttcagagctgtgatttttgcaaagtattttaccaacctcctcgatggctttgataaaggttagatttgatgtttttttttagatttatttttcttactccactaaactataaagaaaataattacttagaaactccattttaaataatcatttcctagaaattcttaaatatatacagaattttaaagaaaacatttcatctgatttagttagcatccacatatcattgaggaattaaagtgtgggacagtcattattaaaaaaaagagagaaaagccctctattagacattccacaatccatgttttaagcttatccaaaggtccaaatgtcagccattctgtatgttcatgttgatcatttgcgaacaagaaagcaggtttctaggtatcacttaggatgtgaactgcctctcaactttaaaccctgttagctttacttttttaagtccacaagtgatgaaactagtttctcagctaggcttgtactttcctcattatttctagtatttcaaatattctcaaacaaaagagttaccacttttctccatttattttcagttatggaaatgttccctctcttcaccactaagctccaaagcaaatgaaagacgatcacatgtcaggacagtagtaaaggcagcttataaatgggacataaatcagagatgtgttggtattttgagactcaagactgtccttttttaaaataaaaataaaaacattaccaggttcccaagccaatctggcttaaccaacagtgcactgaaatattagtgtttacctccaaggctagggagccaaggggaggaggagaattggaggaaggggagataatgggaagaggatggcgccttcctgagttggctagagggccaacctttgataacagtttgacgaaatcaatcttttttttttttttttttttgagacagagtctcactctgtcacccaggctggagtacagtggtgggatctcggctcactgcaagctctgcctcccaggttcatgccattctcctgccccagcctctcctgagtagctggaactacaggtgcccgccaccacgcccagctaattttttctatttttagtcatgcctggctaattttttgtatttttagtagagatggggtttcaccgtgttagccaggatggtctccatctccttacctcgcaatccgcccgcctcagcctcccaaagtgttgggattacaggcatgagccaccgtgcccggcctatagaaatcaatctttttgactcttctcacttttatctccccatgcccaaggtttgcctgttccataacactcactcccttcccccttgctaatcagaagccatctcctctcagtgtctgatctctgctcttcatacatgattacagtcatggggtagagagtgcttgctaaattatgcagttaatcctatggtgctttaattttcaggccttcaaaaaacacttgtacagtgatgtgcagatttttaaacagttgaacttccttgtactacagtttttgtattgacagccaaatttgtctttcattcttcagattgtgaataaagtgatttttacagggcttccagcaaagtttttcctttcatctaaggcttgtagaaccctagcttatatagctgcttacatgagaaatgcaaaatctgtattcaccatgactttagtaacaaaggtaaagttttttagtagtgccaaggcaagaggaacaatcttggtggtagtactaagttttgtcaatattgtggtttcctgattgtattgttggctttctctctgagcattgaggtatactagaagtagagcttctcaaacataatatcattacctcataagcattaacaaatcaggcccaaagagcgtaagtcctagaaatttgttttaaagcagccctagtcatggtgctggtgctaccgccttgttttaggagcctgcctcctgtcagtatgaaaccctcacctgaaaaatgccagcctggacaccaaacactgagccccttcaacaggcacattatttccccctgagatccataagggaatttagtttctactattgtagagttctgaaaagaggtaaaatagtagtcctttggtcatcctatttttgctttcaattttgatatttcagactgtaaaaggccttgggggatgatagtacatgtggtagcagtaatttttttgaagcaactgcactgacattcatttgagttttctctcattatcagattctgttccaaacaagtattctgtagatccaaatggattaccagtgtgctacagacttcttattatagaacagcattctattctacatcaaaaatagtttgtgtaagttagttttggttaccatctaaaatatttttaaatgttctttacataaaaatttatgttgtgttttaaaatccttaggggctttatctatttttctaagtcagttaactgtacttctaaaaaaagtattttgtatctacttttgtaacttcgtcagaataaaatatattgaaagcaaaaaaaacacaaacanaaaaaactttttggnngccncgggcccnaaaagtntttnaacccattgttgtgggcggggccattggtagcgacacgggcaaagggtgcccaggaaaccgggccagaagggcgggttcttccaataacg

SEQ ID NO: 25652 - DNA, 4900 bp, Homo sapiens
gcatttcgggtctgcgaggtggggtaggcgggcaaggcgggcgccgaggtttgcaaaggctcgcagcggccagaaacccggctccgagcggcggcggcccggcttccgctgcccgtgagctaaggacggtccgctccctctagccagctccgaatcctgatccaggcgggggccaggggcccctcgcctcccctctgaggaccgaagatgagcttcctcttcagcagccgctcttctaaaacattcaaaccaaagaagaatatccctgaaggatctcatcagtatgaactcttaaaacatgcagaagcaactctaggaagtgggaatctgagacaagctgttatgttgcctgagggagaggatctcaatgaatggattgctgtgaacactgtggatttctttaaccagatcaacatgttatatggaactattacagaattctgcactgaagcaagctgtccagtcatgtctgcaggtccgagatatgaatatcactgggcagatggtactaatattaaaaagccaatcaaatgttctgcaccaaaatacattgactatttgatgacttgggttcaagatcagcttgatgatgaaactctttttccttctaagattggtgtcccatttcccaaaaactttatgtctgtggcaaagactattctaaagcgtctgttcagggtttatgcccatatttatcaccagcactttgattctgtgatgcagctgcaagaggaggcccacctcaacacctcctttaagcactttattttctttgttcaggagtttaatctgattgataggcgtgagctggcacctcttcaagaattaatagagaaacttggatcaaaagacagataaatgtttcttctagaacacagttacccccttgcttcatctattgctagaactatctcattgctatctgttatagactagtgatacaaactttaagaaaacaggataaaaagatacccattgcctgtgtctactgataaaattatcccaaaggtaggttggtgtgatagtttccgagtaagaccttaaggacacagccaaatcttaagtactgtgtgaccactcttgttgttatcacatagtcatacttggttgtaatatgtgatggttaacctgtagcttataaatttacttattattcttttactcatttactcagtcatttctttacaagaaaatgattgaatctgttttaggtgacagcacaatggacattaagaatttccatcaataatttatgaataagtttccagaacaaatttcctaataacacaatcagattggttttattcttttattttacgaataaaaaatgtatttttcagtatccttgagatttagaacatctgtgtcacttcagataacattttagtttcaagtttgtatggtagtgtttttatagataagatacgtctattttttcaaaattcatgattgcagtttaaatcatcatatgacgtgtgggtgggagcaaccaaagttatttttacagggactttattttttgatctttatttgagattgttttcatatctatctaaattattaggagtgtgtgtatcagaagtaattttttaatgtcttctaaggatggtcttccaggcttttaaactgaaaagcttaattcagatagtagcttttggctgagaaaaggaatccaaaatattaataaatttagatctcaaaaccactatttttattatttcattatttttcagaggccttaaaattctggataagagaatggaggaaaatactcagagtacttgattattttatttccttttattaaaaaattacttctatgtttttattgtctcttgagccttagttaagagtagtgtagaaatgcatgaacttcatcctaataaggataaaacttaaggaaaaccacaataaaccatgaaggtgtacacatcttataacacagataaagttttggtgtgctacctattcttgagagagtgagtgagtgtatgtgtttaaaggaaacaaaatgggagaaataagttttaaaaaaatcctcattttgttaatattcaaaagatggactgagcttccacttgggttttatcttgttttaattgtttttgtatcaaaacttgaaattcctctatttctattgggatataaaagccttccccttcagtgaagaaaacatttattttttatttgattcctaggatttagtaaactctagctgtctatttaaaatgtactgaggcacaacaagtattatactggaagacttgccaaactggcaaagctttaagttcatcagcattctatgtggttcagagctgtgatttttgcaaagtattttaccaacctcctcgatggctttgataaaggttagatttgatgtttttttttagatttatttttcttactccactaaactataaagaaaataattacttagaaactccattttaaataatcatttcctagaaattcttaaatatatacagaattttaaagaaaacatttcatctgatttagttagcatccacatatcattgaggaattaaagtgtgggacagtcattattaaaaaaaagagagaaaagccctctattagacattccacaatccatgttttaagcttatccaaaggtccaaatgtcagccattctgtatgttcatgttgatcatttgcgaacaagaaagcaggtttctaggtatcacttaggatgtgaactgcctctcaactttaaaccctgttagctttacttttttaagtccacaagtgatgaaactagtttctcagctaggcttgtactttcctcattatttctagtatttcaaatattctcaaacaaaagagttaccacttttctccatttattttcagttatggaaatgttccctctcttcaccactaagctccaaagcaaatgaaagacgatcacatgtcaggacagtagtaaaggcagcttataaatgggacataaatcagagatgtgttggtattttgagactcaagactgtccttttttaaaataaaaataaaaacattaccaggttcccaagccaatctggcttaaccaacagtgcactgaaatattagtgtttacctccaaggctagggagccaaggggaggaggagaattggaggaaggggagataatgggaagaggatggcgccttcctgagttggctagagggccaacctttgataacagtttgacgaaatcaatcttttttttttttttttttttgagacagagtctcactctgtcacccaggctggagtacagtggtgggatctcggctcactgcaagctctgcctcccaggttcatgccattctcctgccccagcctctcctgagtagctggaactacaggtgcccgccaccacgcccagctaattttttctatttttagtcatgcctggctaattttttgtatttttagtagagatggggtttcaccgtgttagccaggatggtctccatctccttacctcgcaatccgcccgcctcagcctcccaaagtgttgggattacaggcatgagccaccgtgcccggcctatagaaatcaatctttttgactcttctcacttttatctccccatgcccaaggtttgcctgttccataacactcactcccttcccccttgctaatcagaagccatctcctctcagtgtctgatctctgctcttcatacatgattacagtcatggggtagagagtgcttgctaaattatgcagttaatcctatggtgctttaattttcaggccttcaaaaaacacttgtacagtgatgtgcagatttttaaacagttgaacttccttgtactacagtttttgtattgacagccaaatttgtctttcattcttcagattgtgaataaagtgatttttacagggcttccagcaaagtttttcctttcatctaaggcttgtagaaccctagcttatatagctgcttacatgagaaatgcaaaatctgtattcaccatgactttagtaacaaaggtaaagttttttagtagtgccaaggcaagaggaacaatcttggtggtagtactaagttttgtcaatattgtggtttcctgattgtattgttggctttctctctgagcattgaggtatactagaagtagagcttctcaaacataatatcattacctcataagcattaacaaatcaggcccaaagagcgtaagtcctagaaatttgttttaaagcagccctagtcatggtgctggtgctaccgccttgttttaggagcctgcctcctgtcagtatgaaaccctcacctgaaaaatgccagcctggacaccaaacactgagccccttcaacaggcacattatttccccctgagatccataagggaatttagtttctactattgtagagttctgaaaagaggtaaaatagtagtcctttggtcatcctatttttgctttcaattttgatatttcagactgtaaaaggccttgggggatgatagtacatgtggtagcagtaatttttttgaagcaactgcactgacattcatttgagttttctctcattatcagattctgttccaaacaagtattctgtagatccaaatggattaccagtgtgctacagacttcttattatagaacagcattctattctacatcaaaaatagtttgtgtaagttagttttggttaccatctaaaatatttttaaatgttctttacataaaaatttatgttgtgttttaaaatccttaggggctttatctatttttctaagtcagttaactgtacttctaaaaaaagtattttgtatctacttttgtaacttcgtcagaataaaatatattgaaagcaaaaaatgactgattaaagtatgtatatcaacacacatttctatttaaatatagaaacttgagagttttgca

SEQ ID NO: 25653 - DNA, 4874 bp, Homo sapiens
gcatttcgggtctgcgaggtggggtaggcgggcaaggcgggcgccgaggtttgcaaaggctcgcagcggccagaaacccggctccgagcggcggcggcccggcttccgctgcccgtgagctaaggacggtccgctccctctagccagctccgaatcctgatccaggcgggggccaggggcccctcgcctcccctctgaggaccgaagatgagcttcctcttcagcagccgctcttctaaaacattcaaaccaaagaagaatatccctgaaggatctcatcagtatgaactcttaaaacatgcagaagcaactctaggaagtgggaatctgagacaagctgttatgttgcctgagggagaggatctcaatgaatggattgctgtgaacactgtggatttctttaaccagatcaacatgttatatggaactattacagaattctgcactgaagcaagctgtccagtcatgtctgcaggtccgagatatgaatatcactgggcagatggtactaatattaaaaagccaatcaaatgttctgcaccaaaatacattgactatttgatgacttgggttcaagatcagcttgatgatgaaactctttttccttctaagattggtgtcccatttcccaaaaactttatgtctgtggcaaagactattctaaagcgtctgttcagggtttatgcccatatttatcaccagcactttgattctgtgatgcagctgcaagaggaggcccacctcaacacctcctttaagcactttattttctttgttcaggagtttaatctgattgataggcgtgagctggcacctcttcaagaattaatagagaaacttggatcaaaagacagataaatgtttcttctagaacacagttacccccttgcttcatctattgctagaactatctcattgctatctgttatagactagtgatacaaactttaagaaaacaggataaaaagatacccattgcctgtgtctactgataaaattatcccaaaggtaggttggtgtgatagtttccgagtaagaccttaaggacacagccaaatcttaagtactgtgtgaccactcttgttgttatcacatagtcatacttggttgtaatatgtgatggttaacctgtagcttataaatttacttattattcttttactcatttactcagtcatttctttacaagaaaatgattgaatctgttttaggtgacagcacaatggacattaagaatttccatcaataatttatgaataagtttccagaacaaatttcctaataacacaatcagattggttttattcttttattttacgaataaaaaatgtatttttcagtatccttgagatttagaacatctgtgtcacttcagataacattttagtttcaagtttgtatggtagtgtttttatagataagatacgtctattttttcaaaattcatgattgcagtttaaatcatcatatgacgtgtgggtgggagcaaccaaagttatttttacagggactttattttttgatctttatttgagattgttttcatatctatctaaattattaggagtgtgtgtatcagaagtaattttttaatgtcttctaaggatggtcttccaggcttttaaactgaaaagcttaattcagatagtagcttttggctgagaaaaggaatccaaaatattaataaatttagatctcaaaaccactatttttattatttcattatttttcagaggccttaaaattctggataagagaatggaggaaaatactcagagtacttgattattttatttccttttattaaaaaattacttctatgtttttattgtctcttgagccttagttaagagtagtgtagaaatgcatgaacttcatcctaataaggataaaacttaaggaaaaccacaataaaccatgaaggtgtacacatcttataacacagataaagttttggtgtgctacctattcttgagagagtgagtgagtgtatgtgtttaaaggaaacaaaatgggagaaataagttttaaaaaaatcctcattttgttaatattcaaaagatggactgagcttccacttgggttttatcttgttttaattgtttttgtatcaaaacttgaaattcctctatttctattgggatataaaagccttccccttcagtgaagaaaacatttattttttatttgattcctaggatttagtaaactctagctgtctatttaaaatgtactgaggcacaacaagtattatactggaagacttgccaaactggcaaagctttaagttcatcagcattctatgtggttcagagctgtgatttttgcaaagtattttaccaacctcctcgatggctttgataaaggttagatttgatgtttttttttagatttatttttcttactccactaaactataaagaaaataattacttagaaactccattttaaataatcatttcctagaaattcttaaatatatacagaattttaaagaaaacatttcatctgatttagttagcatccacatatcattgaggaattaaagtgtgggacagtcattattaaaaaaaagagagaaaagccctctattagacattccacaatccatgttttaagcttatccaaaggtccaaatgtcagccattctgtatgttcatgttgatcatttgcgaacaagaaagcaggtttctaggtatcacttaggatgtgaactgcctctcaactttaaaccctgttagctttacttttttaagtccacaagtgatgaaactagtttctcagctaggcttgtactttcctcattatttctagtatttcaaatattctcaaacaaaagagttaccacttttctccatttattttcagttatggaaatgttccctctcttcaccactaagctccaaagcaaatgaaagacgatcacatgtcaggacagtagtaaaggcagcttataaatgggacataaatcagagatgtgttggtattttgagactcaagactgtccttttttaaaataaaaataaaaacattaccaggttcccaagccaatctggcttaaccaacagtgcactgaaatattagtgtttacctccaaggctagggagccaaggggaggaggagaattggaggaaggggagataatgggaagaggatggcgccttcctgagttggctagagggccaacctttgataacagtttgacgaaatcaatcttttttttttttttttttttgagacagagtctcactctgtcacccaggctggagtacagtggtgggatctcggctcactgcaagctctgcctcccaggttcatgccattctcctgccccagcctctcctgagtagctggaactacaggtgcccgccaccacgcccagctaattttttctatttttagtcatgcctggctaattttttgtatttttagtagagatggggtttcaccgtgttagccaggatggtctccatctccttacctcgcaatccgcccgcctcagcctcccaaagtgttgggattacaggcatgagccaccgtgcccggcctatagaaatcaatctttttgactcttctcacttttatctccccatgcccaaggtttgcctgttccataacactcactcccttcccccttgctaatcagaagccatctcctctcagtgtctgatctctgctcttcatacatgattacagtcatggggtagagagtgcttgctaaattatgcagttaatcctatggtgctttaattttcaggccttcaaaaaacacttgtacagtgatgtgcagatttttaaacagttgaacttccttgtactacagtttttgtattgacagccaaatttgtctttcattcttcagattgtgaataaagtgatttttacagggcttccagcaaagtttttcctttcatctaaggcttgtagaaccctagcttatatagctgcttacatgagaaatgcaaaatctgtattcaccatgactttagtaacaaaggtaaagttttttagtagtgccaaggcaagaggaacaatcttggtggtagtactaagttttgtcaatattgtggtttcctgattgtattgttggctttctctctgagcattgaggtatactagaagtagagcttctcaaacataatatcattacctcataagcattaacaaatcaggcccaaagagcgtaagtcctagaaatttgttttaaagcagccctagtcatggtgctggtgctaccgccttgttttaggagcctgcctcctgtcagtatgaaaccctcacctgaaaaatgccagcctggacaccaaacactgagccccttcaacaggcacattatttccccctgagatccataagggaatttagtttctactattgtagagttctgaaaagaggtaaaatagtagtcctttggtcatcctatttttgctttcaattttgatatttcagactgtaaaaggccttgggggatgatagtacatgtggtagcagtaatttttttgaagcaactgcactgacattcatttgagttttctctcattatcagattctgttccaaacaagtattctgtagatccaaatggattaccagtgtgctacagacttcttattatagaacagcattctattctacatcaaaaatagtttgtgtaagttagttttggttaccatctaaaatatttttaaatgtaaagaacatttaaaaatattttagatggtaaccaaaactatctttacataaaaatttatgttgtgttttaaaatccttaggggctttatctatttttctaagtcagttaactgtacttctaaaaaaagtattttgtatctacttttgtaacttcgtcagaataaaatatattgaaagcaaaaaa

SEQ ID NO: 25654 - DNA, 5031 bp, Homo sapiens
  misc_feature (4902)..(4902): n is a, c, g, or t
  misc_feature (4917)..(4918): n is a, c, g, or t
  misc_feature (4922)..(4922): n is a, c, g, or t
  misc_feature (4930)..(4930): n is a, c, g, or t
  misc_feature (4937)..(4937): n is a, c, g, or t
  misc_feature (4941)..(4941): n is a, c, g, or t
gcatttcgggtctgcgaggtggggtaggcgggcaaggcgggcgccgaggtttgcaaaggctcgcagcggccagaaacccggctccgagcggcggcggcccggcttccgctgcccgtgagctaaggacggtccgctccctctagccagctccgaatcctgatccaggcgggggccaggggcccctcgcctcccctctgaggaccgaagatgagcttcctcttcagcagccgctcttctaaaacattcaaaccaaagaagaatatccctgaaggatctcatcagtatgaactcttaaaacatgcagaagcaactctaggaagtgggaatctgagacaagctgttatgttgcctgagggagaggatctcaatgaatggattgctgtgaacactgtggatttctttaaccagatcaacatgttatatggaactattacagaattctgcactgaagcaagctgtccagtcatgtctgcaggtccgagatatgaatatcactgggcagatggtactaatattaaaaagccaatcaaatgttctgcaccaaaatacattgactatttgatgacttgggttcaagatcagcttgatgatgaaactctttttccttctaagattggtgtcccatttcccaaaaactttatgtctgtggcaaagactattctaaagcgtctgttcagggtttatgcccatatttatcaccagcactttgattctgtgatgcagctgcaagaggaggcccacctcaacacctcctttaagcactttattttctttgttcaggagtttaatctgattgataggcgtgagctggcacctcttcaagaattaatagagaaacttggatcaaaagacagataaatgtttcttctagaacacagttacccccttgcttcatctattgctagaactatctcattgctatctgttatagactagtgatacaaactttaagaaaacaggataaaaagatacccattgcctgtgtctactgataaaattatcccaaaggtaggttggtgtgatagtttccgagtaagaccttaaggacacagccaaatcttaagtactgtgtgaccactcttgttgttatcacatagtcatacttggttgtaatatgtgatggttaacctgtagcttataaatttacttattattcttttactcatttactcagtcatttctttacaagaaaatgattgaatctgttttaggtgacagcacaatggacattaagaatttccatcaataatttatgaataagtttccagaacaaatttcctaataacacaatcagattggttttattcttttattttacgaataaaaaatgtatttttcagtatcttatctataaaaacactaccatacaaacttgaaactaaaatgttatctgaagtgacacagatgttctaaatctcaaggatactgaaaaataacattttagtttcaagtttgtatggtagtgtttttatagataagatacgtctattttttcaaaattcatgattgcagtttaaatcatcatatgacgtgtgggtgggagcaaccaaagttatttttacagggactttattttttgatctttatttgagattgttttcatatctatctaaattattaggagtgtgtgtatcagaagtaattttttaatgtcttctaaggatggtcttccaggcttttaaactgaaaagcttaattcagatagtagcttttggctgagaaaaggaatccaaaatattaataaatttagatctcaaaaccactatttttattatttcattatttttcagaggccttaaaattctggataagagaatggaggaaaatactcagagtacttgattattttatttccttttattaaaaaattacttctatgtttttattgtctcttgagccttagttaagagtagtgtagaaatgcatgaacttcatcctaataaggataaaacttaaggaaaaccacaataaaccatgaaggtgtacacatcttataacacagataaagttttggtgtgctacctattcttgagagagtgagtgagtgtatgtgtttaaaggaaacaaaatgggagaaataagttttaaaaaaatcctcattttgttaatattcaaaagatggactgagcttccacttgggttttatcttgttttaattgtttttgtatcaaaacttgaaattcctctatttctattgggatataaaagccttccccttcagtgaagaaaacatttattttttatttgattcctaggatttagtaaactctagctgtctatttaaaatgtactgaggcacaacaagtattatactggaagacttgccaaactggcaaagctttaagttcatcagcattctatgtggttcagagctgtgatttttgcaaagtattttaccaacctcctcgatggctttgataaaggttagatttgatgtttttttttagatttatttttcttactccactaaactataaagaaaataattacttagaaactccattttaaataatcatttcctagaaattcttaaatatatacagaattttaaagaaaacatttcatctgatttagttagcatccacatatcattgaggaattaaagtgtgggacagtcattattaaaaaaaagagagaaaagccctctattagacattccacaatccatgttttaagcttatccaaaggtccaaatgtcagccattctgtatgttcatgttgatcatttgcgaacaagaaagcaggtttctaggtatcacttaggatgtgaactgcctctcaactttaaaccctgttagctttacttttttaagtccacaagtgatgaaactagtttctcagctaggcttgtactttcctcattatttctagtatttcaaatattctcaaacaaaagagttaccacttttctccatttattttcagttatggaaatgttccctctcttcaccactaagctccaaagcaaatgaaagacgatcacatgtcaggacagtagtaaaggcagcttataaatgggacataaatcagagatgtgttggtattttgagactcaagactgtccttttttaaaataaaaataaaaacattaccaggttcccaagccaatctggcttaaccaacagtgcactgaaatattagtgtttacctccaaggctagggagccaaggggaggaggagaattggaggaaggggagataatgggaagaggatggcgccttcctgagttggctagagggccaacctttgataacagtttgacgaaatcaatcttttttttttttttttttttgagacagagtctcactctgtcacccaggctggagtacagtggtgggatctcggctcactgcaagctctgcctcccaggttcatgccattctcctgccccagcctctcctgagtagctggaactacaggtgcccgccaccacgcccagctaattttttctatttttagtcatgcctggctaattttttgtatttttagtagagatggggtttcaccgtgttagccaggatggtctccatctccttacctcgcaatccgcccgcctcagcctcccaaagtgttgggattacaggcatgagccaccgtgcccggcctatagaaatcaatctttttgactcttctcacttttatctccccatgcccaaggtttgcctgttccataacactcactcccttcccccttgctaatcagaagccatctcctctcagtgtctgatctctgctcttcatacatgattacagtcatggggtagagagtgcttgctaaattatgcagttaatcctatggtgctttaattttcaggccttcaaaaaacacttgtacagtgatgtgcagatttttaaacagttgaacttccttgtactacagtttttgtattgacagccaaatttgtctttcattcttcagattgtgaataaagtgatttttacagggcttccagcaaagtttttcctttcatctaaggcttgtagaaccctagcttatatagctgcttacatgagaaatgcaaaatctgtattcaccatgactttagtaacaaaggtaaagttttttagtagtgccaaggcaagaggaacaatcttggtggtagtactaagttttgtcaatattgtggtttcctgattgtattgttggctttctctctgagcattgaggtatactagaagtagagcttctcaaacataatatcattacctcataagcattaacaaatcaggcccaaagagcgtaagtcctagaaatttgttttaaagcagccctagtcatggtgctggtgctaccgccttgttttaggagcctgcctcctgtcagtatgaaaccctcacctgaaaaatgccagcctggacaccaaacactgagccccttcaacaggcacattatttccccctgagatccataagggaatttagtttctactattgtagagttctgaaaagaggtaaaatagtagtcctttggtcatcctatttttgctttcaattttgatatttcagactgtaaaaggccttgggggatgatagtacatgtggtagcagtaatttttttgaagcaactgcactgacattcatttgagttttctctcattatcagattctgttccaaacaagtattctgtagatccaaatggattaccagtgtgctacagacttcttattatagaacagcattctattctacatcaaaaatagtttgtgtaagttagttttggttaccatctaaaatatttttaaatgttctttacataaaaatttatgttgtgttttaaaatccttaggggctttatctatttttctaagtcagttaactgtacttctaaaaaaagtattttgtatctacttttgtaacttcgtcagaataaaatatattgaaagcaaaaaaaacacaaacanaaaaaactttttggnngccncgggcccnaaaagtntttnaacccattgttgtgggcggggccattggtagcgacacgggcaaagggtgcccaggaaaccgggccagaagggcgggttcttccaataacg

SEQ ID NO: 25655 - DNA, 4807 bp, Homo sapiens
  misc_feature (4678)..(4678): n is a, c, g, or t
  misc_feature (4693)..(4694): n is a, c, g, or t
  misc_feature (4698)..(4698): n is a, c, g, or t
  misc_feature (4706)..(4706): n is a, c, g, or t
  misc_feature (4713)..(4713): n is a, c, g, or t
  misc_feature (4717)..(4717): n is a, c, g, or t
gcatttcgggtctgcgaggtggggtaggcgggcaaggcgggcgccgaggtttgcaaaggctcgcagcggccagaaacccggctccgagcggcggcggcccggcttccgctgcccgtgagctaaggacggtccgctccctctagccagctccgaatcctgatccaggcgggggccaggggcccctcgcctcccctctgaggaccgaagatgagcttcctcttctgtggatttctttaaccagatcaacatgttatatggaactattacagaattctgcactgaagcaagctgtccagtcatgtctgcaggtccgagatatgaatatcactgggcagatggtactaatattaaaaagccaatcaaatgttctgcaccaaaatacattgactatttgatgacttgggttcaagatcagcttgatgatgaaactctttttccttctaagattggtgtcccatttcccaaaaactttatgtctgtggcaaagactattctaaagcgtctgttcagggtttatgcccatatttatcaccagcactttgattctgtgatgcagctgcaagaggaggcccacctcaacacctcctttaagcactttattttctttgttcaggagtttaatctgattgataggcgtgagctggcacctcttcaagaattaatagagaaacttggatcaaaagacagataaatgtttcttctagaacacagttacccccttgcttcatctattgctagaactatctcattgctatctgttatagactagtgatacaaactttaagaaaacaggataaaaagatacccattgcctgtgtctactgataaaattatcccaaaggtaggttggtgtgatagtttccgagtaagaccttaaggacacagccaaatcttaagtactgtgtgaccactcttgttgttatcacatagtcatacttggttgtaatatgtgatggttaacctgtagcttataaatttacttattattcttttactcatttactcagtcatttctttacaagaaaatgattgaatctgttttaggtgacagcacaatggacattaagaatttccatcaataatttatgaataagtttccagaacaaatttcctaataacacaatcagattggttttattcttttattttacgaataaaaaatgtatttttcagtatccttgagatttagaacatctgtgtcacttcagataacattttagtttcaagtttgtatggtagtgtttttatagataagatacgtctattttttcaaaattcatgattgcagtttaaatcatcatatgacgtgtgggtgggagcaaccaaagttatttttacagggactttattttttgatctttatttgagattgttttcatatctatctaaattattaggagtgtgtgtatcagaagtaattttttaatgtcttctaaggatggtcttccaggcttttaaactgaaaagcttaattcagatagtagcttttggctgagaaaaggaatccaaaatattaataaatttagatctcaaaaccactatttttattatttcattatttttcagaggccttaaaattctggataagagaatggaggaaaatactcagagtacttgattattttatttccttttattaaaaaattacttctatgtttttattgtctcttgagccttagttaagagtagtgtagaaatgcatgaacttcatcctaataaggataaaacttaaggaaaaccacaataaaccatgaaggtgtacacatcttataacacagataaagttttggtgtgctacctattcttgagagagtgagtgagtgtatgtgtttaaaggaaacaaaatgggagaaataagttttaaaaaaatcctcattttgttaatattcaaaagatggactgagcttccacttgggttttatcttgttttaattgtttttgtatcaaaacttgaaattcctctatttctattgggatataaaagccttccccttcagtgaagaaaacatttattttttatttgattcctaggatttagtaaactctagctgtctatttaaaatgtactgaggcacaacaagtattatactggaagacttgccaaactggcaaagctttaagttcatcagcattctatgtggttcagagctgtgatttttgcaaagtattttaccaacctcctcgatggctttgataaaggttagatttgatgtttttttttagatttatttttcttactccactaaactataaagaaaataattacttagaaactccattttaaataatcatttcctagaaattcttaaatatatacagaattttaaagaaaacatttcatctgatttagttagcatccacatatcattgaggaattaaagtgtgggacagtcattattaaaaaaaagagagaaaagccctctattagacattccacaatccatgttttaagcttatccaaaggtccaaatgtcagccattctgtatgttcatgttgatcatttgcgaacaagaaagcaggtttctaggtatcacttaggatgtgaactgcctctcaactttaaaccctgttagctttacttttttaagtccacaagtgatgaaactagtttctcagctaggcttgtactttcctcattatttctagtatttcaaatattctcaaacaaaagagttaccacttttctccatttattttcagttatggaaatgttccctctcttcaccactaagctccaaagcaaatgaaagacgatcacatgtcaggacagtagtaaaggcagcttataaatgggacataaatcagagatgtgttggtattttgagactcaagactgtccttttttaaaataaaaataaaaacattaccaggttcccaagccaatctggcttaaccaacagtgcactgaaatattagtgtttacctccaaggctagggagccaaggggaggaggagaattggaggaaggggagataatgggaagaggatggcgccttcctgagttggctagagggccaacctttgataacagtttgacgaaatcaatcttttttttttttttttttttgagacagagtctcactctgtcacccaggctggagtacagtggtgggatctcggctcactgcaagctctgcctcccaggttcatgccattctcctgccccagcctctcctgagtagctggaactacaggtgcccgccaccacgcccagctaattttttctatttttagtcatgcctggctaattttttgtatttttagtagagatggggtttcaccgtgttagccaggatggtctccatctccttacctcgcaatccgcccgcctcagcctcccaaagtgttgggattacaggcatgagccaccgtgcccggcctatagaaatcaatctttttgactcttctcacttttatctccccatgcccaaggtttgcctgttccataacactcactcccttcccccttgctaatcagaagccatctcctctcagtgtctgatctctgctcttcatacatgattacagtcatggggtagagagtgcttgctaaattatgcagttaatcctatggtgctttaattttcaggccttcaaaaaacacttgtacagtgatgtgcagatttttaaacagttgaacttccttgtactacagtttttgtattgacagccaaatttgtctttcattcttcagattgtgaataaagtgatttttacagggcttccagcaaagtttttcctttcatctaaggcttgtagaaccctagcttatatagctgcttacatgagaaatgcaaaatctgtattcaccatgactttagtaacaaaggtaaagttttttagtagtgccaaggcaagaggaacaatcttggtggtagtactaagttttgtcaatattgtggtttcctgattgtattgttggctttctctctgagcattgaggtatactagaagtagagcttctcaaacataatatcattacctcataagcattaacaaatcaggcccaaagagcgtaagtcctagaaatttgttttaaagcagccctagtcatggtgctggtgctaccgccttgttttaggagcctgcctcctgtcagtatgaaaccctcacctgaaaaatgccagcctggacaccaaacactgagccccttcaacaggcacattatttccccctgagatccataagggaatttagtttctactattgtagagttctgaaaagaggtaaaatagtagtcctttggtcatcctatttttgctttcaattttgatatttcagactgtaaaaggccttgggggatgatagtacatgtggtagcagtaatttttttgaagcaactgcactgacattcatttgagttttctctcattatcagattctgttccaaacaagtattctgtagatccaaatggattaccagtgtgctacagacttcttattatagaacagcattctattctacatcaaaaatagtttgtgtaagttagttttggttaccatctaaaatatttttaaatgttctttacataaaaatttatgttgtgttttaaaatccttaggggctttatctatttttctaagtcagttaactgtacttctaaaaaaagtattttgtatctacttttgtaacttcgtcagaataaaatatattgaaagcaaaaaaaacacaaacanaaaaaactttttggnngccncgggcccnaaaagtntttnaacccattgttgtgggcggggccattggtagcgacacgggcaaagggtgcccaggaaaccgggccagaagggcgggttcttccaataacg

SEQ ID NO: 25656 - DNA, 4920 bp, Homo sapiens
  misc_feature (4791)..(4791): n is a, c, g, or t
  misc_feature (4806)..(4807): n is a, c, g, or t
  misc_feature (4811)..(4811): n is a, c, g, or t
  misc_feature (4819)..(4819): n is a, c, g, or t
  misc_feature (4826)..(4826): n is a, c, g, or t
  misc_feature (4830)..(4830): n is a, c, g, or t
gcatttcgggtctgcgaggtggggtaggcgggcaaggcgggcgccgaggtttgcaaaggctcgcagcggccagaaacccggctccgagcggcggcggcccggcttccgctgcccgtgagctaaggacggtccgctccctctagccagctccgaatcctgatccaggcgggggccaggggcccctcgcctcccctctgaggaccgaagatgagcttcctcttcagcagccgctcttctaaaacattcaaaccaaagaagaatatccctgaaggatctcatcagtatgaactgttgcctgagggagaggatctcaatgaatggattgctgtgaacactgtggatttctttaaccagatcaacatgttatatggaactattacagaattctgcactgaagcaagctgtccagtcatgtctgcaggtccgagatatgaatatcactgggcagatggtactaatattaaaaagccaatcaaatgttctgcaccaaaatacattgactatttgatgacttgggttcaagatcagcttgatgatgaaactctttttccttctaagattggtgtcccatttcccaaaaactttatgtctgtggcaaagactattctaaagcgtctgttcagggtttatgcccatatttatcaccagcactttgattctgtgatgcagctgcaagaggaggcccacctcaacacctcctttaagcactttattttctttgttcaggagtttaatctgattgataggcgtgagctggcacctcttcaagaattaatagagaaacttggatcaaaagacagataaatgtttcttctagaacacagttacccccttgcttcatctattgctagaactatctcattgctatctgttatagactagtgatacaaactttaagaaaacaggataaaaagatacccattgcctgtgtctactgataaaattatcccaaaggtaggttggtgtgatagtttccgagtaagaccttaaggacacagccaaatcttaagtactgtgtgaccactcttgttgttatcacatagtcatacttggttgtaatatgtgatggttaacctgtagcttataaatttacttattattcttttactcatttactcagtcatttctttacaagaaaatgattgaatctgttttaggtgacagcacaatggacattaagaatttccatcaataatttatgaataagtttccagaacaaatttcctaataacacaatcagattggttttattcttttattttacgaataaaaaatgtatttttcagtatccttgagatttagaacatctgtgtcacttcagataacattttagtttcaagtttgtatggtagtgtttttatagataagatacgtctattttttcaaaattcatgattgcagtttaaatcatcatatgacgtgtgggtgggagcaaccaaagttatttttacagggactttattttttgatctttatttgagattgttttcatatctatctaaattattaggagtgtgtgtatcagaagtaattttttaatgtcttctaaggatggtcttccaggcttttaaactgaaaagcttaattcagatagtagcttttggctgagaaaaggaatccaaaatattaataaatttagatctcaaaaccactatttttattatttcattatttttcagaggccttaaaattctggataagagaatggaggaaaatactcagagtacttgattattttatttccttttattaaaaaattacttctatgtttttattgtctcttgagccttagttaagagtagtgtagaaatgcatgaacttcatcctaataaggataaaacttaaggaaaaccacaataaaccatgaaggtgtacacatcttataacacagataaagttttggtgtgctacctattcttgagagagtgagtgagtgtatgtgtttaaaggaaacaaaatgggagaaataagttttaaaaaaatcctcattttgttaatattcaaaagatggactgagcttccacttgggttttatcttgttttaattgtttttgtatcaaaacttgaaattcctctatttctattgggatataaaagccttccccttcagtgaagaaaacatttattttttatttgattcctaggatttagtaaactctagctgtctatttaaaatgtactgaggcacaacaagtattatactggaagacttgccaaactggcaaagctttaagttcatcagcattctatgtggttcagagctgtgatttttgcaaagtattttaccaacctcctcgatggctttgataaaggttagatttgatgtttttttttagatttatttttcttactccactaaactataaagaaaataattacttagaaactccattttaaataatcatttcctagaaattcttaaatatatacagaattttaaagaaaacatttcatctgatttagttagcatccacatatcattgaggaattaaagtgtgggacagtcattattaaaaaaaagagagaaaagccctctattagacattccacaatccatgttttaagcttatccaaaggtccaaatgtcagccattctgtatgttcatgttgatcatttgcgaacaagaaagcaggtttctaggtatcacttaggatgtgaactgcctctcaactttaaaccctgttagctttacttttttaagtccacaagtgatgaaactagtttctcagctaggcttgtactttcctcattatttctagtatttcaaatattctcaaacaaaagagttaccacttttctccatttattttcagttatggaaatgttccctctcttcaccactaagctccaaagcaaatgaaagacgatcacatgtcaggacagtagtaaaggcagcttataaatgggacataaatcagagatgtgttggtattttgagactcaagactgtccttttttaaaataaaaataaaaacattaccaggttcccaagccaatctggcttaaccaacagtgcactgaaatattagtgtttacctccaaggctagggagccaaggggaggaggagaattggaggaaggggagataatgggaagaggatggcgccttcctgagttggctagagggccaacctttgataacagtttgacgaaatcaatcttttttttttttttttttttgagacagagtctcactctgtcacccaggctggagtacagtggtgggatctcggctcactgcaagctctgcctcccaggttcatgccattctcctgccccagcctctcctgagtagctggaactacaggtgcccgccaccacgcccagctaattttttctatttttagtcatgcctggctaattttttgtatttttagtagagatggggtttcaccgtgttagccaggatggtctccatctccttacctcgcaatccgcccgcctcagcctcccaaagtgttgggattacaggcatgagccaccgtgcccggcctatagaaatcaatctttttgactcttctcacttttatctccccatgcccaaggtttgcctgttccataacactcactcccttcccccttgctaatcagaagccatctcctctcagtgtctgatctctgctcttcatacatgattacagtcatggggtagagagtgcttgctaaattatgcagttaatcctatggtgctttaattttcaggccttcaaaaaacacttgtacagtgatgtgcagatttttaaacagttgaacttccttgtactacagtttttgtattgacagccaaatttgtctttcattcttcagattgtgaataaagtgatttttacagggcttccagcaaagtttttcctttcatctaaggcttgtagaaccctagcttatatagctgcttacatgagaaatgcaaaatctgtattcaccatgactttagtaacaaaggtaaagttttttagtagtgccaaggcaagaggaacaatcttggtggtagtactaagttttgtcaatattgtggtttcctgattgtattgttggctttctctctgagcattgaggtatactagaagtagagcttctcaaacataatatcattacctcataagcattaacaaatcaggcccaaagagcgtaagtcctagaaatttgttttaaagcagccctagtcatggtgctggtgctaccgccttgttttaggagcctgcctcctgtcagtatgaaaccctcacctgaaaaatgccagcctggacaccaaacactgagccccttcaacaggcacattatttccccctgagatccataagggaatttagtttctactattgtagagttctgaaaagaggtaaaatagtagtcctttggtcatcctatttttgctttcaattttgatatttcagactgtaaaaggccttgggggatgatagtacatgtggtagcagtaatttttttgaagcaactgcactgacattcatttgagttttctctcattatcagattctgttccaaacaagtattctgtagatccaaatggattaccagtgtgctacagacttcttattatagaacagcattctattctacatcaaaaatagtttgtgtaagttagttttggttaccatctaaaatatttttaaatgttctttacataaaaatttatgttgtgttttaaaatccttaggggctttatctatttttctaagtcagttaactgtacttctaaaaaaagtattttgtatctacttttgtaacttcgtcagaataaaatatattgaaagcaaaaaaaacacaaacanaaaaaactttttggnngccncgggcccnaaaagtntttnaacccattgttgtgggcggggccattggtagcgacacgggcaaagggtgcccaggaaaccgggccagaagggcgggttcttccaataacg

SEQ ID NO: 25657 - DNA, 2357 bp, Homo sapiens
aattattagaaaaaaaagattccaacattacaataagagaacagaacactaacgcttggagctgatcctgctagcccagtggaggccaagtgccacagtgagaaaagccctctattagacattccacaatccatgttttaagcttatccaaaggtccaaatgtcagccattctgtatgttcatgttgatcatttgcgaacaagaaagcaggtttctaggtatcacttaggatgtgaactgcctctcaactttaaaccctgttagctttacttttttaagtccacaagtgatgaaactagtttctcagctaggcttgtactttcctcattatttctagtatttcaaatattctcaaacaaaagagttaccacttttctccatttattttcagttatggaaatgttccctctcttcaccactaagctccaaagcaaatgaaagacgatcacatgtcaggacagtagtaaaggcagcttataaatgggacataaatcagagatgtgttggtattttgagactcaagactgtccttttttaaaataaaaataaaaacattaccaggttcccaagccaatctggcttaaccaacagtgcactgaaatattagtgtttacctccaaggctagggagccaaggggaggaggagaattggaggaaggggagataatgggaagaggatggcgccttcctgagttggctagagggccaacctttgataacagtttgacgaaatcaatcttttttttttttttttttttgagacagagtctcactctgtcacccaggctggagtacagtggtgggatctcggctcactgcaagctctgcctcccaggttcatgccattctcctgccccagcctctcctgagtagctggaactacaggtgcccgccaccacgcccagctaattttttctatttttagtcatgcctggctaattttttgtatttttagtagagatggggtttcaccgtgttagccaggatggtctccatctccttacctcgcaatccgcccgcctcagcctcccaaagtgttgggattacaggcatgagccaccgtgcccggcctatagaaatcaatctttttgactcttctcacttttatctccccatgcccaaggtttgcctgttccataacactcactcccttcccccttgctaatcagaagccatctcctctcagtgtctgatctctgctcttcatacatgattacagtcatggggtagagagtgcttgctaaattatgcagttaatcctatggtgctttaattttcaggccttcaaaaaacacttgtacagtgatgtgcagatttttaaacagttgaacttccttgtactacagtttttgtattgacagccaaatttgtctttcattcttcagattgtgaataaagtgatttttacagggcttccagcaaagtttttcctttcatctaaggcttgtagaaccctagcttatatagctgcttacatgagaaatgcaaaatctgtattcaccatgactttagtaacaaaggtaaagttttttagtagtgccaaggcaagaggaacaatcttggtggtagtactaagttttgtcaatattgtggtttcctgattgtattgttggctttctctctgagcattgaggtatactagaagtagagcttctcaaacataatatcattacctcataagcattaacaaatcaggcccaaagagcgtaagtcctagaaatttgttttaaagcagccctagtcatggtgctggtgctaccgccttgttttaggagcctgcctcctgtcagtatgaaaccctcacctgaaaaatgccagcctggacaccaaacactgagccccttcaacaggcacattatttccccctgagatccataagggaatttagtttctactattgtagagttctgaaaagaggtaaaatagtagtcctttggtcatcctatttttgctttcaattttgatatttcagactgtaaaaggccttgggggatgatagtacatgtggtagcagtaatttttttgaagcaactgcactgacattcatttgagttttctctcattatcagattctgttccaaacaagtattctgtagatccaaatggattaccagtgtgctacagacttcttattatagaacagcattctattctacatcaaaaatagtttgtgtaagttagttttggttaccatctaaaatatttttaaatgttctttacataaaaatttatgttgtgttttaaaatccttaggggctttatctatttttctaagtcagttaactgtacttctaaaaaaagtattttgtatctacttttgtaacttcgtcagaataaaatatattgaaagcaaaaaa

SEQ ID NO: 25658 - DNA, 2038 bp, Homo sapiens
gtgaggtgatggatatgttaattagctggattgtggtaatcagagttaccacttttctccatttattttcagttatggaaatgttccctctcttcaccactaagctccaaagcaaatgaaagacgatcacatgtcaggacagtagtaaaggcagcttataaatgggacataaatcagagatgtgttggtattttgagactcaagactgtccttttttaaaataaaaataaaaacattaccaggttcccaagccaatctggcttaaccaacagtgcactgaaatattagtgtttacctccaaggctagggagccaaggggaggaggagaattggaggaaggggagataatgggaagaggatggcgccttcctgagttggctagagggccaacctttgataacagtttgacgaaatcaatcttttttttttttttttttttgagacagagtctcactctgtcacccaggctggagtacagtggtgggatctcggctcactgcaagctctgcctcccaggttcatgccattctcctgccccagcctctcctgagtagctggaactacaggtgcccgccaccacgcccagctaattttttctatttttagtcatgcctggctaattttttgtatttttagtagagatggggtttcaccgtgttagccaggatggtctccatctccttacctcgcaatccgcccgcctcagcctcccaaagtgttgggattacaggcatgagccaccgtgcccggcctatagaaatcaatctttttgactcttctcacttttatctccccatgcccaaggtttgcctgttccataacactcactcccttcccccttgctaatcagaagccatctcctctcagtgtctgatctctgctcttcatacatgattacagtcatggggtagagagtgcttgctaaattatgcagttaatcctatggtgctttaattttcaggccttcaaaaaacacttgtacagtgatgtgcagatttttaaacagttgaacttccttgtactacagtttttgtattgacagccaaatttgtctttcattcttcagattgtgaataaagtgatttttacagggcttccagcaaagtttttcctttcatctaaggcttgtagaaccctagcttatatagctgcttacatgagaaatgcaaaatctgtattcaccatgactttagtaacaaaggtaaagttttttagtagtgccaaggcaagaggaacaatcttggtggtagtactaagttttgtcaatattgtggtttcctgattgtattgttggctttctctctgagcattgaggtatactagaagtagagcttctcaaacataatatcattacctcataagcattaacaaatcaggcccaaagagcgtaagtcctagaaatttgttttaaagcagccctagtcatggtgctggtgctaccgccttgttttaggagcctgcctcctgtcagtatgaaaccctcacctgaaaaatgccagcctggacaccaaacactgagccccttcaacaggcacattatttccccctgagatccataagggaatttagtttctactattgtagagttctgaaaagaggtaaaatagtagtcctttggtcatcctatttttgctttcaattttgatatttcagactgtaaaaggccttgggggatgatagtacatgtggtagcagtaatttttttgaagcaactgcactgacattcatttgagttttctctcattatcagattctgttccaaacaagtattctgtagatccaaatggattaccagtgtgctacagacttcttattatagaacagcattctattctacatcaaaaatagtttgtgtaagttagttttggttaccatctaaaatatttttaaatgttctttacataaaaatttatgttgtgttttaaaatccttaggggctttatctatttttctaagtcagttaactgtacttctaaaaaaagtattttgtatctacttttgtaacttcgtcagaataaaatatattgaaagcaaaaaa

SEQ ID NO: 25659 - DNA, 1237 bp, Homo sapiens
actggaactcaggattaagaaactcactcccttcccccttgctaatcagaagccatctcctctcagtgtctgatctctgctcttcatacatgattacagtcatggggtagagagtgcttgctaaattatgcagttaatcctatggtgctttaattttcaggccttcaaaaaacacttgtacagtgatgtgcagatttttaaacagttgaacttccttgtactacagtttttgtattgacagccaaatttgtctttcattcttcagattgtgaataaagtgatttttacagggcttccagcaaagtttttcctttcatctaaggcttgtagaaccctagcttatatagctgcttacatgagaaatgcaaaatctgtattcaccatgactttagtaacaaaggtaaagttttttagtagtgccaaggcaagaggaacaatcttggtggtagtactaagttttgtcaatattgtggtttcctgattgtattgttggctttctctctgagcattgaggtatactagaagtagagcttctcaaacataatatcattacctcataagcattaacaaatcaggcccaaagagcgtaagtcctagaaatttgttttaaagcagccctagtcatggtgctggtgctaccgccttgttttaggagcctgcctcctgtcagtatgaaaccctcacctgaaaaatgccagcctggacaccaaacactgagccccttcaacaggcacattatttccccctgagatccataagggaatttagtttctactattgtagagttctgaaaagaggtaaaatagtagtcctttggtcatcctatttttgctttcaattttgatatttcagactgtaaaaggccttgggggatgatagtacatgtggtagcagtaatttttttgaagcaactgcactgacattcatttgagttttctctcattatcagattctgttccaaacaagtattctgtagatccaaatggattaccagtgtgctacagacttcttattatagaacagcattctattctacatcaaaaatagtttgtgtaagttagttttggttaccatctaaaatatttttaaatgttctttacataaaaatttatgttgtgttttaaaatccttaggggctttatctatttttctaagtcagttaactgtacttctaaaaaaagtattttgtatctacttttgtaacttcgtcagaataaaatatattgaaagcaaaaaa

SEQ ID NO: 25660 - DNA, 1281 bp, Homo sapiens
tggagacagagtcttgctctgtcgcccagactggagtgcagtggcacgatctcggctaactgcaacctttgcctcctgggttcaagcagttctcctgcctcagcctcctcagtagctgggattataggcacctgccaccacgcccggctaatttttatgtttactagaaatggggtttcaccatgttggctaggctgatctcgaactcctgacctcaaatgatccacccaccttgtcctcccaaaatgctgggattacaggcatgagccaccatgcccggccccaaacactttctttcatgaatggtcgacgcggccggtattgatttttacagggcttccagcaaagtttttcctttcatctaaggcttgtagaaccctagcttatatagctgcttacatgagaaatgcaaaatctgtattcaccatgactttagtaacaaaggtaaagttttttagtagtgccaaggcaagaggaacaatcttggtggtagtactaagttttgtcaatattgtggtttcctgattgtattgttggctttctctctgagcattgaggtatactagaagtagagcttctcaaacataatatcattacctcataagcattaacaaatcaggcccaaagagcgtaagtcctagaaatttgttttaaagcagccctagtcatggtgctggtgctaccgccttgttttaggagcctgcctcctgtcagtatgaaaccctcacctgaaaaatgccagcctggacaccaaacactgagccccttcaacaggcacattatttccccctgagatccataagggaatttagtttctactattgtagagttctgaaaagaggtaaaatagtagtcctttggtcatcctatttttgctttcaattttgatatttcagactgtaaaaggccttgggggatgatagtacatgtggtagcagtaatttttttgaagcaactgcactgacattcatttgagttttctctcattatcagattctgttccaaacaagtattctgtagatccaaatggattaccagtgtgctacagacttcttattatagaacagcattctattctacatcaaaaatagtttgtgtaagttagttttggttaccatctaaaatatttttaaatgttctttacataaaaatttatgttgtgttttaaaatccttaggggctttatctatttttctaagtcagttaactgtacttctaaaaaaagtattttgtatctacttttgtaacttcgtcagaataaaatatattgaaagcaaaaaa

SEQ ID NO: 25661 - DNA, 1133 bp, Homo sapiens
  misc_feature (1071)..(1071): n is a, c, g, or t
  misc_feature (1115)..(1115): n is a, c, g, or t
  misc_feature (1131)..(1131): n is a, c, g, or t
gcatttcgggtctgcgaggtggggtaggcgggcaaggcgggcgccgaggtttgcaaaggctcgcagcggccagaaacccggctccgagcggcggcggcccggcttccgctgcccgtgagctaaggacggtccgctccctctagccagctccgaatcctgatccaggcgggggccaggggcccctcgcctcccctctgaggaccgaagatgagcttcctcttcagcagccgctcttctaaaacattcaaaccaaagaagaatatccctgaaggatctcatcagtatgaactcttaaaacatgcagaagcaactctaggaagtgggaatctgagacaagctgttatgttgcctgagggagaggatctcaatgaatggattgctgtgaacactgtggatttctttaaccagatcaacatgttatatggaactattacagaattctgcactgaagcaagctgtccagtcatgtctgcaggtccgagatatgaatatcactgggcagatggtactaatattaaaaagccaatcaaatgttctgcaccaaaatacattgactatttgatgacttgggttcaagatcagcttgatgatgaaactctttttccttctaagattggtgtcccatttcccaaaaactttatgtctgtggcaaagactattctaaagcgtctgttcagggtttatgcccatatttatcaccagcactttgattctgtgatgcagctgcaagaggaggcccacctcaacacctcctttaagcactttattttctttgttcaggagtttaatctgattgataggcgtgagctggcacctcttcaagaattaatagagaaacttggatcaaaagacagataaatgtttcttctagaacacagttacccccttgcttcatctattgctagaactatctcattgctatctgttatagactagtgatacaaactttaagaaaacaggataaaaagatacccattgcctgtgtctactgataaaattatcccaaaggtaggttggtgtgatagtttccgagtaagaccttaaggacacagccaaatcttaagtactgtngcactctgtggaacacaagcaactggtgaaatggtggacctgantaaatactatatcttnct

SEQ ID NO: 25662 - DNA, 893 bp, Homo sapiens
gtcttgctctgtcacctgggctggagtgcagtgatgcgatttcagcttactgcaacctctgcctcccaggttcaagccattcttctgcctcagcctcccaagtagctgggactacaggtgtgcgccatcatgcttggctaatttttgtatttttagtagacgtgtggtttcaccatgttggtcaggctggtcttgaactcctgacctcaggtgatcccaaagtgctgggattacaggcatgagccaccatgcctggcccagagagtattttttattttatttttacaggctactttatatacctaaaattatgttgttctacctgttctacttccagtcttaaaaattcatatacttgcacttttaatcttacagcagcagccgctcttctaaaacattcaaaccaaagaagaatatccctgaaggatctcatcagtatgaactcttaaaacatgcagaagcaactctaggaagtgggaatctgagacaagctgttatgttgcctgagggagaggatctcaatgaatggattgctgtgaacactgtggatttctttaaccagatcaacatgttatatggaactattacagaattctgcactgaagcaagctgtccagtcatgtctgcaggtccgagatatgaatatcactgggcagatggtactaatattaaaaagccaatcaaatgttctgcaccaaaatactttgtgtaagttagttttggttaccatctaaaatatttttaaatgttctttacataaaaatttatgttgtgttttaaaatccttaggggctttatctatttttctaagtcagttaactgtacttctaaaaaaagtattttgtatctacttttgtaacttcgtcagaataaaatatattgaaagcaaaaaa

SEQ ID NO: 25663 - DNA, 4645 bp, Homo sapiens
gaaaagttgtcagtccttactgttcaggacgttggtcaggtgatgcctggagctaatgtatgtgttgtgaagttagaaggtaccccttatctttgtaaaactgatgaagtgggagaaatatgcgtcagttccagtgcaactggcacagcgtactatggattgcttggaatcacgaagaatgtgtttgaggcagttccggtcaccacaggaggagcacccatctttgacaggccattcaccaggacaggcctgctgggcttcatcgggcctgacaacctggtcttcatcgtgggcaaactggacgggctgatggtcactggagttcgcagacacaatgcagatgacgttgtggccaccgcactggccgtggagcccatgaagtttgtctacagaggcaggatcgctgtgttctctgtgaccgtgctgcacgacgaccggattgtcctggtggctgagcagcggccggatgcctcggaggaggacagcttccagtggatgagccgtgtgctgcaggccattgatagcatccaccaggtgggcgtgtactgtctggccctggttcctgccaacaccttgcccaaggctcctctcggagggattcacatttctgaaaccaaacagcgctttctggaagggacgctgcacccgtgtaatgtgctgatgtgccctcacacctgtgttaccaacctccccaaacctcgtcagaaacaaccagaggttggaccagcctcaatgatcgtggggaacctggttgctgggaagagaatcgctcaggcttccgggagagagctcgcccacctggaggacagcgaccaggcacggaagttcctgttcctggctgacgtgctgcagtggcgtgcccacaccactcctgaccacccgctgttcttgctgctgaacgccaagggcaccgtcacaagcactgcaacctgtgtccagctgcacaaaagggctgagagagtggccgcggctctgatggagaagggaagactgagtgttggggaccatgtggctctggtctacccaccaggggtggacctcattgccgcgttctatggctgcttgtactgtggctgcgtgcctgtcaccgtgcggcccccgcaccctcagaacctcggcaccacactgcccaccgtcaagatgatcgtggaggtcagcaagtctgcatgcgtcctcaccacgcaggctgtcacacggctgctcaggtccaaggaggctgctgctgccgtggacatcaggacctggcccaccatcctagacacagatgacatcccaaaaaagaagatagcaagcgttttcaggcccccctcccccgatgtcctcgcatacttggacttcagcgtgtcaaccactgggatattagcgggagtgaagatgtcgcacgcggccacaagcgccttatgccgctccataaagctgcagtgtgagctgtacccctcgcggcagatcgccatctgcctcgacccctactgtggccttggttttgccctgtggtgtctgtgcagtgtctactcgggacaccaatcagtgctggtgcccccgctggagctggagagcaacgtgtccctgtggctgtcggccgtcagccagtacaaggcccgcgtcaccttctgctcctactctgtgatggagatgtgcaccaagggcctaggcgcacagacgggtgtcctcaggatgaagggggtgaacctgtcatgtgtgcgcacgtgcatggtggtcgccgaggagcggcccaggattgcgctgacccagtccttctccaagctcttcaaggacctgggcctgccggcccgcgccgtaagcaccacgttcgggtgcagggtcaacgtggccatctgcctccagggcacagctggcccggaccccacaaccgtctacgtggacatgcgggcactgcgccatgacagggttcgtttggtagaacggggttctccgcacagcctgccattgatggagtctggaaagatcctccccggcgtgaaggtcatcatcgcacacaccgagaccaaaggacccttgggagactcacacctgggagagatctgggtaagcagcccccacaatgccaccgggtactacaccgtttacggggaggaggcgcttcatgctgaccacttcagtgcccggctgagttttggagacacacagaccatctgggcaaggaccggctaccttggcttccttcggcgaacagagctcactgatgccagtggagggcggcacgatgcactgtatgtggttgggtctctggatgaaactctggagctcagaggcatgcggtaccaccccatcgacattgagacctctgtcatccgagcacacaggagcatcgctgagtgtgccgtattcacctggaccaacctgctggtggtggtggtggagctggatgggctagagcaggatgccctggacctggtggccctggtgaccaacgtggtgctggaggagcactacctggtcgtgggagtggtggtcatcgtggacccaggggtgatccctatcaactctcggggtgagaagcagcgcatgcacctgcgggacggcttcctggctgaccagctggaccccatctatgtcgcctacaacatgtgagcgcagcacaccggcccaggtgccggagatgaatgagccccagcagtccaaggtgtgatgtgggaagacaccgcagagctcactcaccgggactcgcccttcctgtgctcttacagatccctctcaacaatccccgcatctccttttagaaagcacttcctgaattatttaaagaaatattttgaatctgccaagtacatttacaaaaacacggatgctggtattttaacagatggagagacaaggaaaggaaaggaaaggcctggcatgggcattgtgaggaatcacaggcaccgaggttgttctctgctgtactgcaagtttgcactttctttaggctaaaaatatagttcctgatttttaaaattcagttatttattcccacttcaaatgacaagttcatatatagaatttacgggagaaacttgagaccatttacggggagacatttgattctgggaagatagcagagtacaaaccagctgcctcacttctgtttcacagggaggctgatggaaaaaggaagcaagctggacccatcctccctgctcacagagggcactgtggtcacacacagtgcctcctctgccagttcctttattgaaagaggtgtgctggctggccacggtggcttacacctgtaatcccagcactttgggaggccgaggcgagcagatcacgatggtctccatctccttacctcgcaatccgcccgcctcagcctcccaaagtgttgggattacaggcatgagccaccgtgcccggcctatagaaatcaatctttttgactcttctcacttttatctccccatgcccaaggtttgcctgttccataacactcactcccttcccccttgctaatcagaagccatctcctctcagtgtctgatctctgctcttcatacatgattacagtcatggggtagagagtgcttgctaaattatgcagttaatcctatggtgctttaattttcaggccttcaaaaaacacttgtacagtgatgtgcagatttttaaacagttgaacttccttgtactacagtttttgtattgacagccaaatttgtctttcattcttcagattgtgaataaagtgatttttacagggcttccagcaaagtttttcctttcatctaaggcttgtagaaccctagcttatatagctgcttacatgagaaatgcaaaatctgtattcaccatgactttagtaacaaaggtaaagttttttagtagtgccaaggcaagaggaacaatcttggtggtagtactaagttttgtcaatattgtggtttcctgattgtattgttggctttctctctgagcattgaggtatactagaagtagagcttctcaaacataatatcattacctcataagcattaacaaatcaggcccaaagagcgtaagtcctagaaatttgttttaaagcagccctagtcatggtgctggtgctaccgccttgttttaggagcctgcctcctgtcagtatgaaaccctcacctgaaaaatgccagcctggacaccaaacactgagccccttcaacaggcacattatttccccctgagatccataagggaatttagtttctactattgtagagttctgaaaagaggtaaaatagtagtcctttggtcatcctatttttgctttcaattttgatatttcagactgtaaaaggccttgggggatgatagtacatgtggtagcagtaatttttttgaagcaactgcactgacattcatttgagttttctctcattatcagattctgttccaaacaagtattctgtagatccaaatggattaccagtgtgctacagacttcttattatagaacagcattctattctacatcaaaaatagtttgtgtaagttagttttggttaccatctaaaatatttttaaatgttctttacataaaaatttatgttgtgttttaaaatccttaggggctttatctatttttctaagtcagttaactgtacttctaaaaaaagtattttgtatctacttttgtaacttcgtcagaataaaatatattgaaagcaaaaaa

SEQ ID NO: 25664 - DNA, 1811 bp, Homo sapiens
gcatttcgggtctgcgaggtggggtaggcgggcaaggcgggcgccgaggtttgcaaaggctcgcagcggccagaaacccggctccgagcggcggcggcccggcttccgctgcccgtgagctaaggacggtccgctccctctagccagctccgaatcctgatccaggcgggggccaggggcccctcgcctcccctctgaggaccgaagatgagcttcctcttcagcagccgctcttctaaaacattcaaaccaaagaagaatatccctgaaggatctcatcagtatgaactcttaaaacatgcagaagcaactctaggaagtgggaatctgagacaagctgttatgttgcctgagggagaggatctcaatgaatggattgctgtgaacactgtggatttctttaaccagatcaacatgttatatggaactattacagaattctgcactgaagcaagctgtccagtcatgtctgcaggtccgagatatgaatatcactgggcagatggtactaatattaaaaagccaatcaaatgttctgcaccaaaatacattgactatttgatgacttgggttcaagatcagcttgatgatgaaactctttttccttctaagattggtgagttaacattgtcgaagtattctttctttttttaaaattttattttattaatataaatagagttgggggggtttgctgtgttgtccaggttggtctcaaactcctggcctcaagtgatcctcctgccttggcctcccacagtgctgggattacaggtttgagccaccgtatccagcctgtttctctttttgaatgataaatctgctctttttaacattgttatacttgtagagactgccaaattctcctccaaaaagtttgtaccaacatgtactccccccagccctgtttgtgtttgccagtgtttcttcaccaacactggttattactcattttttaatattttctaatttggttaaatttctgttttaatatgcatttaaaaaatgttgatgagattgagcattttagcctttttgtttgttttattgatcattgtgtgttttctgtttatatctttcatctatttctgtgtaaaggatattagcgctttgtcgtatgtgttgtatatctttttccccgggttaccttttgtctcattttgttcatggagtatttttgctgtacacaaccttactattttgtcctattatatcttttatgacttgattttaatataacaattagaaagcttttccctgcttcaagattataaaaatatttattcatgttttcttttttatttttttattttttgagacagagtctcactctgttgcccaggctggagtgcagcggcacaatcttggctcactgcaatctccacctcccaggttcaagcagttctcatgcctcagtccctgggtagctgggactacaggcacatgccaccatgcccagctaatttttgtatttttagtagagatggggtttcaccatgttggccaggctggtcttgaacgcctgacctaaagtgatctacctgccttggcatcccaaagtgttgggattacaggcatgagccaccacgcctggctgggaagttttttttccctgaatgctacattaatttttttccaaatggaaatactagtcagtttgtcccattaccatttattaaacacatttgccttttctcccctgattatcttatgtgcacaacaaattgccatatatttttgcatgttttagtctctttatctgttcctatagaaattccacacgttggtgactgtggctctgcatctgttag

SEQ ID NO: 25665 - DNA, 4834 bp, Homo sapiens
gcatttcgggtctgcgaggtggggtaggcgggcaaggcgggcgccgaggtttgcaaaggctcgcagcggccagaaacccggctccgagcggcggcggcccggcttccgctgcccgtgagctaaggacggtccgctccctctagccagctccgaatcctgatccaggcgggggccaggggcccctcgcctcccctctgaggaccgaagatgagcttcctcttcagcagccgctcttctaaaacattcaaaccaaagaagaatatccctgaaggatctcatcagtatgaactcttaaaacatgcagaagcaactctaggaagtgggaatctgagacaagctgttatgttgcctgagggagaggatctcaatgaatggattgctgtgaacactgtggatttctttaaccagatcaacatgttatatggaactattacagaattctgcactgaagcaagctgtccagtcatgtctgcaggtccgagatatgaatatcactgggcagatggtactaatattaaaaagccaatcaaatgttctgcaccaaaatacattgactatttgatgacttgggttcaagatcagcttgatgatgaaactctttttccttctaagattggtgtcccatttcccaaaaactttatgtctgtggcaaagactattctaaagcgtctgttcagggtttatgcccatatttatcaccagcactttgattctgtgatgcagctgcaagaggaggcccacctcaacacctcctttaagcactttattttctttgttcaggagtttaatctgattgataggcgtgagctggcacctcttcaagaattaatagagaaacttggatcaaaagacagataaatgtttcttctagaacacagttacccccttgcttcatctattgctagaactatctcattgctatctgttatagactagtgatacaaactttaagaaaacaggataaaaagatacccattgcctgtgtctactgataaaattatcccaaaggtaggttggtgtgatagtttccgagtaagaccttaaggacacagccaaatcttaagtactgtgtgaccactcttgttgttatcacatagtcatacttggttgtaatatgtgatggttaacctgtagcttataaatttacttattattcttttactcatttactcagtcatttctttacaagaaaatgattgaatctgttttaggtgacagcacaatggacattaagaatttccatcaataatttatgaataagtttccagaacaaatttcctaataacacaatcagattggttttattcttttattttacgaataaaaaatgtatttttcagtatccttgagatttagaacatctgtgtcacttcagataacattttagtttcaagtttgtatggtagtgtttttatagataagatacgtctattttttcaaaattcatgattgcagtttaaatcatcatatgacgtgtgggtgggagcaaccaaagttatttttacagggactttattttttgatctttatttgagattgttttcatatctatctaaattattaggagtgtgtgtatcagaagtaattttttaatgtcttctaaggatggtcttccaggcttttaaactgaaaagcttaattcagatagtagcttttggctgagaaaaggaatccaaaatattaataaatttagatctcaaaaccactatttttattatttcattatttttcagaggccttaaaattctggataagagaatggaggaaaatactcagagtacttgattattttatttccttttattaaaaaattacttctatgtttttattgtctcttgagccttagttaagagtagtgtagaaatgcatgaacttcatcctaataaggataaaacttaaggaaaaccacaataaaccatgaaggtgtacacatcttataacacagataaagttttggtgtgctacctattcttgagagagtgagtgagtgtatgtgtttaaaggaaacaaaatgggagaaataagttttaaaaaaatcctcattttgttaatattcaaaagatggactgagcttccacttgggttttatcttgttttaattgtttttgtatcaaaacttgaaattcctctatttctattgggatataaaagccttccccttcagtgaagaaaacatttattttttatttgattcctaggatttagtaaactctagctgtctatttaaaatgtactgaggcacaacaagtattatactggaagacttgccaaactggcaaagctttaagttcatcagcattctatgtggttcagagctgtgatttttgcaaagtattttaccaacctcctcgatggctttgataaaggttagatttgatgtttttttttagatttatttttcttactccactaaactataaagaaaataattacttagaaactccattttaaataatcatttcctagaaattcttaaatatatacagaattttaaagaaaacatttcatctgatttagttagcatccacatatcattgaggaattaaagtgtgggacagtcattattaaaaaaaagagagaaaagccctctattagacattccacaatccatgttttaagcttatccaaaggtccaaatgtcagccattctgtatgttcatgttgatcatttgcgaacaagaaagcaggtttctaggtatcacttaggatgtgaactgcctctcaactttaaaccctgttagctttacttttttaagtccacaagtgatgaaactagtttctcagctaggcttgtactttcctcattatttctagtatttcaaatattctcaaacaaaagagttaccacttttctccatttattttcagttatggaaatgttccctctcttcaccactaagctccaaagcaaatgaaagacgatcacatgtcaggacagtagtaaaggcagcttataaatgggacataaatcagagatgtgttggtattttgagactcaagactgtccttttttaaaataaaaataaaaacattaccaggttcccaagccaatctggcttaaccaacagtgcactgaaatattagtgtttacctccaaggctagggagccaaggggaggaggagaattggaggaaggggagataatgggaagaggatggcgccttcctgagttggctagagggccaacctttgataacagtttgacgaaatcaatcttttttttttttttttttttgagacagagtctcactctgtcacccaggctggagtacagtggtgggatctcggctcactgcaagctctgcctcccaggttcatgccattctcctgccccagcctctcctgagtagctggaactacaggtgcccgccaccacgcccagctaattttttctatttttagtcatgcctggctaattttttgtatttttagtagagatggggtttcaccgtgttagccaggatggtctccatctccttacctcgcaatccgcccgcctcagcctcccaaagtgttgggattacaggcatgagccaccgtgcccggcctatagaaatcaatctttttgactcttctcacttttatctccccatgcccaaggtttgcctgttccataacactcactcccttcccccttgctaatcagaagccatctcctctcagtgtctgatctctgctcttcatacatgattacagtcatggggtagagagtgcttgctaaattatgcagttaatcctatggtgctttaattttcaggccttcaaaaaacacttgtacagtgatgtgcagatttttaaacagttgaacttccttgtactacagtttttgtattgacagccaaatttgtctttcattcttcagattgtgaataaagtgatttttacagggcttccagcaaagtttttcctttcatctaaggcttgtagaaccctagcttatatagctgcttacatgagaaatgcaaaatctgtattcaccatgactttagtaacaaaggtaaagttttttagtagtgccaaggcaagaggaacaatcttggtggtagtactaagttttgtcaatattgtggtttcctgattgtattgttggctttctctctgagcattgaggtatactagaagtagagcttctcaaacataatatcattacctcataagcattaacaaatcaggcccaaagagcgtaagtcctagaaatttgttttaaagcagccctagtcatggtgctggtgctaccgccttgttttaggagcctgcctcctgtcagtatgaaaccctcacctgaaaaatgccagcctggacaccaaacactgagccccttcaacaggcacattatttccccctgagatccataagggaatttagtttctactattgtagagttctgaaaagaggtaaaatagtagtcctttggtcatcctatttttgctttcaattttgatatttcagactgtaaaaggccttgggggatgatagtacatgtggtagcagtaatttttttgaagcaactgcactgacattcatttgagttttctctcattatcagattctgttccaaacaagtattctgtagatccaaatggattaccagtgtgctacagacttcttattatagaacagcattctattctacatcaaaaatagtttgtgtaagttagttttggttaccatctaaaatatttttaaatgttctttacataaaaatttatgttgtgttttaaaatccttaggggctttatctatttttctaagtcagttaactgtacttctaaaaaaagtattttgtatctacttttgtaacttcgtcagaataaaatatattgaaagcaaaaaa

SEQ ID NO: 25666 - DNA, 4539 bp, Homo sapiens
gcatttcgggtctgcgaggtggggtaggcgggcaaggcgggcgccgaggtttgcaaaggctcgcagcggccagaaacccggctccgagcggcggcggcccggcttccgctgcccgtgagctaaggacggtccgctccctctagccagctccgaatcctgatccaggcgggggccaggggcccctcgcctcccctctgaggaccgaagatgagcttcctcttcagcagccgctcttctaaaacattcaaaccaaagaagaatatccctgaaggatctcatcagtatgaactcttaaaacatgcagaagcaactctaggaagtgggaatctgagacaagctgttatgttgcctgagggagaggatctcaatgaatggattgctgtgaacactgtggatttctttaaccagatcaacatgttatatggaactattacagaattctgcactgaagcaagctgtccagtcatgtctgcaggtccgagatatgaatatcactgggcagatggtactaatattaaaaagccaatcaaatgttctgcaccaaaatacattgactatttgatgacttgggttcaagatcagcttgatgatgaaactctttttccttctaagattggtgtcccatttcccaaaaactttatgtctgtggcaaagactattctaaagcgtctgttcagggtttatgcccatatttatcaccagcactttgattctgtgatgcagctgcaagaggaggcccacctcaacacctcctttaagcactttattttctttgttcaggagtttaatctgattgataggcgtgagctggcacctcttcaagaattaatagagaaacttggatcaaaagacagataaatgtttcttctagaacacagttacccccttgcttcatctattgctagaactatctcattgctatctgttatagactagtgatacaaactttaagaaaacaggataaaaagatacccattgcctgtgtctactgataaaattatcccaaaggtaggttggtgtgatagtttccgagtaagaccttaaggacacagccaaatcttaagtactgtgtgaccactcttgttgttatcacatagtcatacttggttgtaatatgtgatggttaacctgtagcttataaatttacttattattcttttactcatttactcagtcatttctttacaagaaaatgattgaatctgttttaggtgacagcacaatggacattaagaatttccatcaataatttatgaataagtttccagaacaaatttcctaataacacaatcagattggttttattcttttattttacgaataaaaaatgtatttttcagtatccttgagatttagaacatctgtgtcacttcagataacattttagtttcaagtttgtatggtagtgtttttatagataagatacgtctattttttcaaaattcatgattgcagtttaaatcatcatatgacgtgtgggtgggagcaaccaaagttatttttacagggactttattttttgatctttatttgagattgttttcatatctatctaaattattaggagtgtgtgtatcagaagtaattttttaatgtcttctaaggatggtcttccaggcttttaaactgaaaagcttaattcagatagtagcttttggctgagaaaaggaatccaaaatattaataaatttagatctcaaaaccactatttttattatttcattatttttcagaggccttaaaattctggataagagaatggaggaaaatactcagagtacttgattattttatttccttttattaaaaaattacttctatgtttttattgtctcttgagccttagttaagagtagtgtagaaatgcatgaacttcatcctaataaggataaaacttaaggaaaaccacaataaaccatgaaggtgtacacatcttataacacagataaagttttggtgtgctacctattcttgagagagtgagtgagtgtatgtgtttaaaggaaacaaaatgggagaaataagttttaaaaaaatcctcattttgttaatattcaaaagatggactgagcttccacttgggttttatcttgttttaattgtttttgtatcaaaacttgaaattcctctatttctattgggatataaaagccttccccttcagtgaagaaaacatttattttttatttgattcctaggatttagtaaactctagctgtctatttaaaatgtactgaggcacaacaagtattatactggaagacttgccaaactggcaaagctttaagttcatcagcattctatgtggttcagagctgtgatttttgcaaagtattttaccaacctcctcgatggctttgataaaggttagatttgatgtttttttttagatttatttttcttactccactaaactataaagaaaataattacttagaaactccattttaaataatcatttcctagaaattcttaaatatatacagaattttaaagaaaacatttcatctgatttagttagcatccacatatcattgaggaattaaagtgtgggacagtcattattaaaaaaaagagagaaaagccctctattagacattccacaatccatgttttaagcttatccaaaggtccaaatgtcagccattctgtatgttcatgttgatcatttgcgaacaagaaagcaggtttctaggtatcacttaggatgtgaactgcctctcaactttaaaccctgttagctttacttttttaagtccacaagtgatgaaactagtttctcagctaggcttgtactttcctcattatttctagtatttcaaatattctcaaacaaaagagttaccacttttctccatttattttcagttatggaaatgttccctctcttcaccactaagctccaaagcaaatgaaagacgatcacatgtcaggacagtagtaaaggcagcttataaatgggacataaatcagagatgtgttggtattttgagactcaagactgtccttttttaaaataaaaataaaaacattaccaggttcccaagccaatctggcttaaccaacagtgcactgaaatattagtgtttacctccaaggctagggagccaaggggaggaggagaattggaggaaggggagataatgggaagaggatggcgccttcctgagttggctagagggccaacctttgataacagtttgacgaaatcaatcttttttttttttttttttttgagacagagtctcactctgtcacccaggctggagtacagtggtgggatctcggctcactgcaagctctgcctcccaggttcatgccattctcctgccccagcctctcctgagtagctggaactacaggtgcccgccaccacgcccagctaattttttctatttttagtcatgcctggctaattttttgtatttttagtagagatggggtttcaccgtgttagccaggatggtctccatctccttacctcgcaatccgcccgcctcagcctcccaaagtgttgggattacaggcatgagccaccgtgcccggcctatagaaatcaatctttttgactcttctcacttttatctccccatgcccaaggtttgcctgttccataacactcactcccttcccccttgctaatcagaagccatctcctctcagtgtctgatctctgctcttcatacatgattacagtcatggggtagagagtgcttgctaaattatgcagttaatcctatggtgctttaattttcaggccttcaaaaaacacttgtacagtgatgtgcagatttttaaacagttgaacttccttgtactacagtttttgtattgacagccaaatttgtctttcattcttcagattgtgaataaagtgatttttacagggcttccagcaaagtttttcctttcatctaaggcttgtagaaccctagcttatatagctgcttacatgagaaatgcaaaatctgtattcaccatgactttagtaacaaaggtaaagttttttagtagtgccaaggcaagaggaacaatcttggtggtagtactaagttttgtcaatattgtggtttcctgattgtattgttggctttctctctgagcattgaggtatactagaagtagagcttctcaaacataatatcattacctcataagcattaacaaatcaggcccaaagagcgtaagtcctagaaatttgttttaaagcagccctagtcatggtgctggtgctaccgccttgttttaggagcctgcctcctgtcagtatgaaaccctcacctgaaaaatgccagcctggacaccaaacactgagccccttcaacaggcacattatttccccctgagatccataagggaatttagtttctactattgtagagttctgaaaagaggtaaaatagtagtcctttggtcatcctatttttgctttcaattttgatatttcagactgtaaaaggccttgggggatgatagtacatgtggtagcagtaatttttttgaagcaccagtacgacttccggtagcaccagcacgaat

SEQ ID NO: 25667 - DNA, 5011 bp, Homo sapiens
  misc_feature (28)..(28): n is a, c, g, or t
  misc_feature (38)..(38): n is a, c, g, or t
  misc_feature (4882)..(4882): n is a, c, g, or t
  misc_feature (4897)..(4898): n is a, c, g, or t
  misc_feature (4902)..(4902): n is a, c, g, or t
  misc_feature (4910)..(4910): n is a, c, g, or t
  misc_feature (4917)..(4917): n is a, c, g, or t
  misc_feature (4921)..(4921): n is a, c, g, or t
cagtactaaggaccgtatggtctgtatnactctagaanaacgaagactagccacacatacaaaagacaaacaaaacaaacaccaaaaaaacaaaaacacacagcggccagaaacccggctccgagcggcggcggcccggcttccgctgcccgtgagctaaggacggtccgctccctctagccagctccgaatcctgatccaggcgggggccaggggcccctcgcctcccctctgaggaccgaagatgagcttcctcttcagcagccgctcttctaaaacattcaaaccaaagaagaatatccctgaaggatctcatcagtatgaactcttaaaacatgcagaagcaactctaggaagtgggaatctgagacaagctgttatgttgcctgagggagaggatctcaatgaatggattgctgtgaacactgtggatttctttaaccagatcaacatgttatatggaactattacagaattctgcactgaagcaagctgtccagtcatgtctgcaggtccgagatatgaatatcactgggcagatggtactaatattaaaaagccaatcaaatgttctgcaccaaaatacattgactatttgatgacttgggttcaagatcagcttgatgatgaaactctttttccttctaagattggtgtcccatttcccaaaaactttatgtctgtggcaaagactattctaaagcgtctgttcagggtttatgcccatatttatcaccagcactttgattctgtgatgcagctgcaagaggaggcccacctcaacacctcctttaagcactttattttctttgttcaggagtttaatctgattgataggcgtgagctggcacctcttcaagaattaatagagaaacttggatcaaaagacagataaatgtttcttctagaacacagttacccccttgcttcatctattgctagaactatctcattgctatctgttatagactagtgatacaaactttaagaaaacaggataaaaagatacccattgcctgtgtctactgataaaattatcccaaaggtaggttggtgtgatagtttccgagtaagaccttaaggacacagccaaatcttaagtactgtgtgaccactcttgttgttatcacatagtcatacttggttgtaatatgtgatggttaacctgtagcttataaatttacttattattcttttactcatttactcagtcatttctttacaagaaaatgattgaatctgttttaggtgacagcacaatggacattaagaatttccatcaataatttatgaataagtttccagaacaaatttcctaataacacaatcagattggttttattcttttattttacgaataaaaaatgtatttttcagtatccttgagatttagaacatctgtgtcacttcagataacattttagtttcaagtttgtatggtagtgtttttatagataagatacgtctattttttcaaaattcatgattgcagtttaaatcatcatatgacgtgtgggtgggagcaaccaaagttatttttacagggactttattttttgatctttatttgagattgttttcatatctatctaaattattaggagtgtgtgtatcagaagtaattttttaatgtcttctaaggatggtcttccaggcttttaaactgaaaagcttaattcagatagtagcttttggctgagaaaaggaatccaaaatattaataaatttagatctcaaaaccactatttttattatttcattatttttcagaggccttaaaattctggataagagaatggaggaaaatactcagagtacttgattattttatttccttttattaaaaaattacttctatgtttttattgtctcttgagccttagttaagagtagtgtagaaatgcatgaacttcatcctaataaggataaaacttaaggaaaaccacaataaaccatgaaggtgtacacatcttataacacagataaagttttggtgtgctacctattcttgagagagtgagtgagtgtatgtgtttaaaggaaacaaaatgggagaaataagttttaaaaaaatcctcattttgttaatattcaaaagatggactgagcttccacttgggttttatcttgttttaattgtttttgtatcaaaacttgaaattcctctatttctattgggatataaaagccttccccttcagtgaagaaaacatttattttttatttgattcctaggatttagtaaactctagctgtctatttaaaatgtactgaggcacaacaagtattatactggaagacttgccaaactggcaaagctttaagttcatcagcattctatgtggttcagagctgtgatttttgcaaagtattttaccaacctcctcgatggctttgataaaggttagatttgatgtttttttttagatttatttttcttactccactaaactataaagaaaataattacttagaaactccattttaaataatcatttcctagaaattcttaaatatatacagaattttaaagaaaacatttcatctgatttagttagcatccacatatcattgaggaattaaagtgtgggacagtcattattaaaaaaaagagagaaaagccctctattagacattccacaatccatgttttaagcttatccaaaggtccaaatgtcagccattctgtatgttcatgttgatcatttgcgaacaagaaagcaggtttctaggtatcacttaggatgtgaactgcctctcaactttaaaccctgttagctttacttttttaagtccacaagtgatgaaactagtttctcagctaggcttgtactttcctcattatttctagtatttcaaatattctcaaacaaaagagttaccacttttctccatttattttcagttatggaaatgttccctctcttcaccactaagctccaaagcaaatgaaagacgatcacatgtcaggacagtagtaaaggcagcttataaatgggacataaatcagagatgtgttggtattttgagactcaagactgtccttttttaaaataaaaataaaaacattaccaggttcccaagccaatctggcttaaccaacagtgcactgaaatattagtgtttacctccaaggctagggagccaaggggaggaggagaattggaggaaggggagataatgggaagaggatggcgccttcctgagttggctagagggccaacctttgataacagtttgacgaaatcaatcttttttttttttttttttttgagacagagtctcactctgtcacccaggctggagtacagtggtgggatctcggctcactgcaagctctgcctcccaggttcatgccattctcctgccccagcctctcctgagtagctggaactacaggtgcccgccaccacgcccagctaattttttctatttttagtcatgcctggctaattttttgtatttttagtagagatggggtttcaccgtgttagccaggatggtctccatctccttacctcgcaatccgcccgcctcagcctcccaaagtgttgggattacaggcatgagccaccgtgcccggcctatagaaatcaatctttttgactcttctcacttttatctccccatgcccaaggtttgcctgttccataacactcactcccttcccccttgctaatcagaagccatctcctctcagtgtctgatctctgctcttcatacatgattacagtcatggggtagagagtgcttgctaaattatgcagttaatcctatggtgctttaattttcaggccttcaaaaaacacttgtacagtgatgtgcagatttttaaacagttgaacttccttgtactacagtttttgtattgacagccaaatttgtctttcattcttcagattgtgaataaagtgatttttacagggcttccagcaaagtttttcctttcatctaaggcttgtagaaccctagcttatatagctgcttacatgagaaatgcaaaatctgtattcaccatgactttagtaacaaaggtaaagttttttagtagtgccaaggcaagaggaacaatcttggtggtagtactaagttttgtcaatattgtggtttcctgattgtattgttggctttctctctgagcattgaggtatactagaagtagagcttctcaaacataatatcattacctcataagcattaacaaatcaggcccaaagagcgtaagtcctagaaatttgttttaaagcagccctagtcatggtgctggtgctaccgccttgttttaggagcctgcctcctgtcagtatgaaaccctcacctgaaaaatgccagcctggacaccaaacactgagccccttcaacaggcacattatttccccctgagatccataagggaatttagtttctactattgtagagttctgaaaagaggtaaaatagtagtcctttggtcatcctatttttgctttcaattttgatatttcagactgtaaaaggccttgggggatgatagtacatgtggtagcagtaatttttttgaagcaactgcactgacattcatttgagttttctctcattatcagattctgttccaaacaagtattctgtagatccaaatggattaccagtgtgctacagacttcttattatagaacagcattctattctacatcaaaaatagtttgtgtaagttagttttggttaccatctaaaatatttttaaatgttctttacataaaaatttatgttgtgttttaaaatccttaggggctttatctatttttctaagtcagttaactgtacttctaaaaaaagtattttgtatctacttttgtaacttcgtcagaataaaatatattgaaagcaaaaaaaacacaaacanaaaaaactttttggnngccncgggcccnaaaagtntttnaacccattgttgtgggcggggccattggtagcgacacgggcaaagggtgcccaggaaaccgggccagaagggcgggttcttccaataacg

SEQ ID NO: 25668 - DNA, 4953 bp, Homo sapiens
  misc_feature (4824)..(4824): n is a, c, g, or t
  misc_feature (4839)..(4840): n is a, c, g, or t
  misc_feature (4844)..(4844): n is a, c, g, or t
  misc_feature (4852)..(4852): n is a, c, g, or t
  misc_feature (4859)..(4859): n is a, c, g, or t
  misc_feature (4863)..(4863): n is a, c, g, or t
tccttgccgacttaactcgttgctcggttataggtccagtttcattattgtcggtgttaaatgccgccccaggagaatgtgcgttgccgcagtttgagaagcttgaagttaagatgctggccttggagtcggatcgttctgtccagttctgattctgcccacttactggctttgattttaaccaacttctcttgtcctcgcagcagccgctcttctaaaacattcaaaccaaagaagaatatccctgaaggatctcatcagtatgaactcttaaaacatgcagaagcaactctaggaagtgggaatctgagacaagctgttatgttgcctgagggagaggatctcaatgaatggattgctgtgaacactgtggatttctttaaccagatcaacatgttatatggaactattacagaattctgcactgaagcaagctgtccagtcatgtctgcaggtccgagatatgaatatcactgggcagatggtactaatattaaaaagccaatcaaatgttctgcaccaaaatacattgactatttgatgacttgggttcaagatcagcttgatgatgaaactctttttccttctaagattggtgtcccatttcccaaaaactttatgtctgtggcaaagactattctaaagcgtctgttcagggtttatgcccatatttatcaccagcactttgattctgtgatgcagctgcaagaggaggcccacctcaacacctcctttaagcactttattttctttgttcaggagtttaatctgattgataggcgtgagctggcacctcttcaagaattaatagagaaacttggatcaaaagacagataaatgtttcttctagaacacagttacccccttgcttcatctattgctagaactatctcattgctatctgttatagactagtgatacaaactttaagaaaacaggataaaaagatacccattgcctgtgtctactgataaaattatcccaaaggtaggttggtgtgatagtttccgagtaagaccttaaggacacagccaaatcttaagtactgtgtgaccactcttgttgttatcacatagtcatacttggttgtaatatgtgatggttaacctgtagcttataaatttacttattattcttttactcatttactcagtcatttctttacaagaaaatgattgaatctgttttaggtgacagcacaatggacattaagaatttccatcaataatttatgaataagtttccagaacaaatttcctaataacacaatcagattggttttattcttttattttacgaataaaaaatgtatttttcagtatccttgagatttagaacatctgtgtcacttcagataacattttagtttcaagtttgtatggtagtgtttttatagataagatacgtctattttttcaaaattcatgattgcagtttaaatcatcatatgacgtgtgggtgggagcaaccaaagttatttttacagggactttattttttgatctttatttgagattgttttcatatctatctaaattattaggagtgtgtgtatcagaagtaattttttaatgtcttctaaggatggtcttccaggcttttaaactgaaaagcttaattcagatagtagcttttggctgagaaaaggaatccaaaatattaataaatttagatctcaaaaccactatttttattatttcattatttttcagaggccttaaaattctggataagagaatggaggaaaatactcagagtacttgattattttatttccttttattaaaaaattacttctatgtttttattgtctcttgagccttagttaagagtagtgtagaaatgcatgaacttcatcctaataaggataaaacttaaggaaaaccacaataaaccatgaaggtgtacacatcttataacacagataaagttttggtgtgctacctattcttgagagagtgagtgagtgtatgtgtttaaaggaaacaaaatgggagaaataagttttaaaaaaatcctcattttgttaatattcaaaagatggactgagcttccacttgggttttatcttgttttaattgtttttgtatcaaaacttgaaattcctctatttctattgggatataaaagccttccccttcagtgaagaaaacatttattttttatttgattcctaggatttagtaaactctagctgtctatttaaaatgtactgaggcacaacaagtattatactggaagacttgccaaactggcaaagctttaagttcatcagcattctatgtggttcagagctgtgatttttgcaaagtattttaccaacctcctcgatggctttgataaaggttagatttgatgtttttttttagatttatttttcttactccactaaactataaagaaaataattacttagaaactccattttaaataatcatttcctagaaattcttaaatatatacagaattttaaagaaaacatttcatctgatttagttagcatccacatatcattgaggaattaaagtgtgggacagtcattattaaaaaaaagagagaaaagccctctattagacattccacaatccatgttttaagcttatccaaaggtccaaatgtcagccattctgtatgttcatgttgatcatttgcgaacaagaaagcaggtttctaggtatcacttaggatgtgaactgcctctcaactttaaaccctgttagctttacttttttaagtccacaagtgatgaaactagtttctcagctaggcttgtactttcctcattatttctagtatttcaaatattctcaaacaaaagagttaccacttttctccatttattttcagttatggaaatgttccctctcttcaccactaagctccaaagcaaatgaaagacgatcacatgtcaggacagtagtaaaggcagcttataaatgggacataaatcagagatgtgttggtattttgagactcaagactgtccttttttaaaataaaaataaaaacattaccaggttcccaagccaatctggcttaaccaacagtgcactgaaatattagtgtttacctccaaggctagggagccaaggggaggaggagaattggaggaaggggagataatgggaagaggatggcgccttcctgagttggctagagggccaacctttgataacagtttgacgaaatcaatcttttttttttttttttttttgagacagagtctcactctgtcacccaggctggagtacagtggtgggatctcggctcactgcaagctctgcctcccaggttcatgccattctcctgccccagcctctcctgagtagctggaactacaggtgcccgccaccacgcccagctaattttttctatttttagtcatgcctggctaattttttgtatttttagtagagatggggtttcaccgtgttagccaggatggtctccatctccttacctcgcaatccgcccgcctcagcctcccaaagtgttgggattacaggcatgagccaccgtgcccggcctatagaaatcaatctttttgactcttctcacttttatctccccatgcccaaggtttgcctgttccataacactcactcccttcccccttgctaatcagaagccatctcctctcagtgtctgatctctgctcttcatacatgattacagtcatggggtagagagtgcttgctaaattatgcagttaatcctatggtgctttaattttcaggccttcaaaaaacacttgtacagtgatgtgcagatttttaaacagttgaacttccttgtactacagtttttgtattgacagccaaatttgtctttcattcttcagattgtgaataaagtgatttttacagggcttccagcaaagtttttcctttcatctaaggcttgtagaaccctagcttatatagctgcttacatgagaaatgcaaaatctgtattcaccatgactttagtaacaaaggtaaagttttttagtagtgccaaggcaagaggaacaatcttggtggtagtactaagttttgtcaatattgtggtttcctgattgtattgttggctttctctctgagcattgaggtatactagaagtagagcttctcaaacataatatcattacctcataagcattaacaaatcaggcccaaagagcgtaagtcctagaaatttgttttaaagcagccctagtcatggtgctggtgctaccgccttgttttaggagcctgcctcctgtcagtatgaaaccctcacctgaaaaatgccagcctggacaccaaacactgagccccttcaacaggcacattatttccccctgagatccataagggaatttagtttctactattgtagagttctgaaaagaggtaaaatagtagtcctttggtcatcctatttttgctttcaattttgatatttcagactgtaaaaggccttgggggatgatagtacatgtggtagcagtaatttttttgaagcaactgcactgacattcatttgagttttctctcattatcagattctgttccaaacaagtattctgtagatccaaatggattaccagtgtgctacagacttcttattatagaacagcattctattctacatcaaaaatagtttgtgtaagttagttttggttaccatctaaaatatttttaaatgttctttacataaaaatttatgttgtgttttaaaatccttaggggctttatctatttttctaagtcagttaactgtacttctaaaaaaagtattttgtatctacttttgtaacttcgtcagaataaaatatattgaaagcaaaaaaaacacaaacanaaaaaactttttggnngccncgggcccnaaaagtntttnaacccattgttgtgggcggggccattggtagcgacacgggcaaagggtgcccaggaaaccgggccagaagggcgggttcttccaataacg

SEQ ID NO: 25669 - DNA, 5128 bp, Homo sapiens
  misc_feature (4999)..(4999): n is a, c, g, or t
  misc_feature (5014)..(5015): n is a, c, g, or t
  misc_feature (5019)..(5019): n is a, c, g, or t
  misc_feature (5027)..(5027): n is a, c, g, or t
  misc_feature (5034)..(5034): n is a, c, g, or t
  misc_feature (5038)..(5038): n is a, c, g, or t
gtcttgctctgtcacctgggctggagtgcagtgatgcgatttcagcttactgcaacctctgcctcccaggttcaagccattcttctgcctcagcctcccaagtagctgggactacaggtgtgcgccatcatgcttggctaatttttgtatttttagtagacgtgtggtttcaccatgttggtcaggctggtcttgaactcctgacctcaggtgatcccaaagtgctgggattacaggcatgagccaccatgcctggcccagagagtattttttattttatttttacaggctactttatatacctaaaattatgttgttctacctgttctacttccagtcttaaaaattcatatacttgcacttttaatcttacagcagcagccgctcttctaaaacattcaaaccaaagaagaatatccctgaaggatctcatcagtatgaactcttaaaacatgcagaagcaactctaggaagtgggaatctgagacaagctgttatgttgcctgagggagaggatctcaatgaatggattgctgtgaacactgtggatttctttaaccagatcaacatgttatatggaactattacagaattctgcactgaagcaagctgtccagtcatgtctgcaggtccgagatatgaatatcactgggcagatggtactaatattaaaaagccaatcaaatgttctgcaccaaaatacattgactatttgatgacttgggttcaagatcagcttgatgatgaaactctttttccttctaagattggtgtcccatttcccaaaaactttatgtctgtggcaaagactattctaaagcgtctgttcagggtttatgcccatatttatcaccagcactttgattctgtgatgcagctgcaagaggaggcccacctcaacacctcctttaagcactttattttctttgttcaggagtttaatctgattgataggcgtgagctggcacctcttcaagaattaatagagaaacttggatcaaaagacagataaatgtttcttctagaacacagttacccccttgcttcatctattgctagaactatctcattgctatctgttatagactagtgatacaaactttaagaaaacaggataaaaagatacccattgcctgtgtctactgataaaattatcccaaaggtaggttggtgtgatagtttccgagtaagaccttaaggacacagccaaatcttaagtactgtgtgaccactcttgttgttatcacatagtcatacttggttgtaatatgtgatggttaacctgtagcttataaatttacttattattcttttactcatttactcagtcatttctttacaagaaaatgattgaatctgttttaggtgacagcacaatggacattaagaatttccatcaataatttatgaataagtttccagaacaaatttcctaataacacaatcagattggttttattcttttattttacgaataaaaaatgtatttttcagtatccttgagatttagaacatctgtgtcacttcagataacattttagtttcaagtttgtatggtagtgtttttatagataagatacgtctattttttcaaaattcatgattgcagtttaaatcatcatatgacgtgtgggtgggagcaaccaaagttatttttacagggactttattttttgatctttatttgagattgttttcatatctatctaaattattaggagtgtgtgtatcagaagtaattttttaatgtcttctaaggatggtcttccaggcttttaaactgaaaagcttaattcagatagtagcttttggctgagaaaaggaatccaaaatattaataaatttagatctcaaaaccactatttttattatttcattatttttcagaggccttaaaattctggataagagaatggaggaaaatactcagagtacttgattattttatttccttttattaaaaaattacttctatgtttttattgtctcttgagccttagttaagagtagtgtagaaatgcatgaacttcatcctaataaggataaaacttaaggaaaaccacaataaaccatgaaggtgtacacatcttataacacagataaagttttggtgtgctacctattcttgagagagtgagtgagtgtatgtgtttaaaggaaacaaaatgggagaaataagttttaaaaaaatcctcattttgttaatattcaaaagatggactgagcttccacttgggttttatcttgttttaattgtttttgtatcaaaacttgaaattcctctatttctattgggatataaaagccttccccttcagtgaagaaaacatttattttttatttgattcctaggatttagtaaactctagctgtctatttaaaatgtactgaggcacaacaagtattatactggaagacttgccaaactggcaaagctttaagttcatcagcattctatgtggttcagagctgtgatttttgcaaagtattttaccaacctcctcgatggctttgataaaggttagatttgatgtttttttttagatttatttttcttactccactaaactataaagaaaataattacttagaaactccattttaaataatcatttcctagaaattcttaaatatatacagaattttaaagaaaacatttcatctgatttagttagcatccacatatcattgaggaattaaagtgtgggacagtcattattaaaaaaaagagagaaaagccctctattagacattccacaatccatgttttaagcttatccaaaggtccaaatgtcagccattctgtatgttcatgttgatcatttgcgaacaagaaagcaggtttctaggtatcacttaggatgtgaactgcctctcaactttaaaccctgttagctttacttttttaagtccacaagtgatgaaactagtttctcagctaggcttgtactttcctcattatttctagtatttcaaatattctcaaacaaaagagttaccacttttctccatttattttcagttatggaaatgttccctctcttcaccactaagctccaaagcaaatgaaagacgatcacatgtcaggacagtagtaaaggcagcttataaatgggacataaatcagagatgtgttggtattttgagactcaagactgtccttttttaaaataaaaataaaaacattaccaggttcccaagccaatctggcttaaccaacagtgcactgaaatattagtgtttacctccaaggctagggagccaaggggaggaggagaattggaggaaggggagataatgggaagaggatggcgccttcctgagttggctagagggccaacctttgataacagtttgacgaaatcaatcttttttttttttttttttttgagacagagtctcactctgtcacccaggctggagtacagtggtgggatctcggctcactgcaagctctgcctcccaggttcatgccattctcctgccccagcctctcctgagtagctggaactacaggtgcccgccaccacgcccagctaattttttctatttttagtcatgcctggctaattttttgtatttttagtagagatggggtttcaccgtgttagccaggatggtctccatctccttacctcgcaatccgcccgcctcagcctcccaaagtgttgggattacaggcatgagccaccgtgcccggcctatagaaatcaatctttttgactcttctcacttttatctccccatgcccaaggtttgcctgttccataacactcactcccttcccccttgctaatcagaagccatctcctctcagtgtctgatctctgctcttcatacatgattacagtcatggggtagagagtgcttgctaaattatgcagttaatcctatggtgctttaattttcaggccttcaaaaaacacttgtacagtgatgtgcagatttttaaacagttgaacttccttgtactacagtttttgtattgacagccaaatttgtctttcattcttcagattgtgaataaagtgatttttacagggcttccagcaaagtttttcctttcatctaaggcttgtagaaccctagcttatatagctgcttacatgagaaatgcaaaatctgtattcaccatgactttagtaacaaaggtaaagttttttagtagtgccaaggcaagaggaacaatcttggtggtagtactaagttttgtcaatattgtggtttcctgattgtattgttggctttctctctgagcattgaggtatactagaagtagagcttctcaaacataatatcattacctcataagcattaacaaatcaggcccaaagagcgtaagtcctagaaatttgttttaaagcagccctagtcatggtgctggtgctaccgccttgttttaggagcctgcctcctgtcagtatgaaaccctcacctgaaaaatgccagcctggacaccaaacactgagccccttcaacaggcacattatttccccctgagatccataagggaatttagtttctactattgtagagttctgaaaagaggtaaaatagtagtcctttggtcatcctatttttgctttcaattttgatatttcagactgtaaaaggccttgggggatgatagtacatgtggtagcagtaatttttttgaagcaactgcactgacattcatttgagttttctctcattatcagattctgttccaaacaagtattctgtagatccaaatggattaccagtgtgctacagacttcttattatagaacagcattctattctacatcaaaaatagtttgtgtaagttagttttggttaccatctaaaatatttttaaatgttctttacataaaaatttatgttgtgttttaaaatccttaggggctttatctatttttctaagtcagttaactgtacttctaaaaaaagtattttgtatctacttttgtaacttcgtcagaataaaatatattgaaagcaaaaaaaacacaaacanaaaaaactttttggnngccncgggcccnaaaagtntttnaacccattgttgtgggcggggccattggtagcgacacgggcaaagggtgcccaggaaaccgggccagaagggcgggttcttccaataacg

SEQ ID NO: 25670 - DNA, 4914 bp, Homo sapiens
  misc_feature (4785)..(4785): n is a, c, g, or t
  misc_feature (4800)..(4801): n is a, c, g, or t
  misc_feature (4805)..(4805): n is a, c, g, or t
  misc_feature (4813)..(4813): n is a, c, g, or t
  misc_feature (4820)..(4820): n is a, c, g, or t
  misc_feature (4824)..(4824): n is a, c, g, or t
gaggtggggtaggcgggcaaggcgggcgccgaggtttgcaaaggctcgcagcggccagaaacccggctccgagcggcggcggcccggcttccgctgcccgtgagctaaggacggtccgccccctcgcctcccctctgaggaccgaagatgagcttcctcttcagcagccgctcttctaaaacattcaaaccaaagaagaatatccctgaaggatctcatcagtatgaactcttaaaacatgcagaagcaactctaggaagtgggaatctgagacaagctgttatgttgcctgagggagaggatctcaatgaatggattgctgtgaacactgtggatttctttaaccagatcaacatgttatatggaactattacagaattctgcactgaagcaagctgtccagtcatgtctgcaggtccgagatatgaatatcactgggcagatggtactaatattaaaaagccaatcaaatgttctgcaccaaaatacattgactatttgatgacttgggttcaagatcagcttgatgatgaaactctttttccttctaagattggtgtcccatttcccaaaaactttatgtctgtggcaaagactattctaaagcgtctgttcagggtttatgcccatatttatcaccagcactttgattctgtgatgcagctgcaagaggaggcccacctcaacacctcctttaagcactttattttctttgttcaggagtttaatctgattgataggcgtgagctggcacctcttcaagaattaatagagaaacttggatcaaaagacagataaatgtttcttctagaacacagttacccccttgcttcatctattgctagaactatctcattgctatctgttatagactagtgatacaaactttaagaaaacaggataaaaagatacccattgcctgtgtctactgataaaattatcccaaaggtaggttggtgtgatagtttccgagtaagaccttaaggacacagccaaatcttaagtactgtgtgaccactcttgttgttatcacatagtcatacttggttgtaatatgtgatggttaacctgtagcttataaatttacttattattcttttactcatttactcagtcatttctttacaagaaaatgattgaatctgttttaggtgacagcacaatggacattaagaatttccatcaataatttatgaataagtttccagaacaaatttcctaataacacaatcagattggttttattcttttattttacgaataaaaaatgtatttttcagtatccttgagatttagaacatctgtgtcacttcagataacattttagtttcaagtttgtatggtagtgtttttatagataagatacgtctattttttcaaaattcatgattgcagtttaaatcatcatatgacgtgtgggtgggagcaaccaaagttatttttacagggactttattttttgatctttatttgagattgttttcatatctatctaaattattaggagtgtgtgtatcagaagtaattttttaatgtcttctaaggatggtcttccaggcttttaaactgaaaagcttaattcagatagtagcttttggctgagaaaaggaatccaaaatattaataaatttagatctcaaaaccactatttttattatttcattatttttcagaggccttaaaattctggataagagaatggaggaaaatactcagagtacttgattattttatttccttttattaaaaaattacttctatgtttttattgtctcttgagccttagttaagagtagtgtagaaatgcatgaacttcatcctaataaggataaaacttaaggaaaaccacaataaaccatgaaggtgtacacatcttataacacagataaagttttggtgtgctacctattcttgagagagtgagtgagtgtatgtgtttaaaggaaacaaaatgggagaaataagttttaaaaaaatcctcattttgttaatattcaaaagatggactgagcttccacttgggttttatcttgttttaattgtttttgtatcaaaacttgaaattcctctatttctattgggatataaaagccttccccttcagtgaagaaaacatttattttttatttgattcctaggatttagtaaactctagctgtctatttaaaatgtactgaggcacaacaagtattatactggaagacttgccaaactggcaaagctttaagttcatcagcattctatgtggttcagagctgtgatttttgcaaagtattttaccaacctcctcgatggctttgataaaggttagatttgatgtttttttttagatttatttttcttactccactaaactataaagaaaataattacttagaaactccattttaaataatcatttcctagaaattcttaaatatatacagaattttaaagaaaacatttcatctgatttagttagcatccacatatcattgaggaattaaagtgtgggacagtcattattaaaaaaaagagagaaaagccctctattagacattccacaatccatgttttaagcttatccaaaggtccaaatgtcagccattctgtatgttcatgttgatcatttgcgaacaagaaagcaggtttctaggtatcacttaggatgtgaactgcctctcaactttaaaccctgttagctttacttttttaagtccacaagtgatgaaactagtttctcagctaggcttgtactttcctcattatttctagtatttcaaatattctcaaacaaaagagttaccacttttctccatttattttcagttatggaaatgttccctctcttcaccactaagctccaaagcaaatgaaagacgatcacatgtcaggacagtagtaaaggcagcttataaatgggacataaatcagagatgtgttggtattttgagactcaagactgtccttttttaaaataaaaataaaaacattaccaggttcccaagccaatctggcttaaccaacagtgcactgaaatattagtgtttacctccaaggctagggagccaaggggaggaggagaattggaggaaggggagataatgggaagaggatggcgccttcctgagttggctagagggccaacctttgataacagtttgacgaaatcaatcttttttttttttttttttttgagacagagtctcactctgtcacccaggctggagtacagtggtgggatctcggctcactgcaagctctgcctcccaggttcatgccattctcctgccccagcctctcctgagtagctggaactacaggtgcccgccaccacgcccagctaattttttctatttttagtcatgcctggctaattttttgtatttttagtagagatggggtttcaccgtgttagccaggatggtctccatctccttacctcgcaatccgcccgcctcagcctcccaaagtgttgggattacaggcatgagccaccgtgcccggcctatagaaatcaatctttttgactcttctcacttttatctccccatgcccaaggtttgcctgttccataacactcactcccttcccccttgctaatcagaagccatctcctctcagtgtctgatctctgctcttcatacatgattacagtcatggggtagagagtgcttgctaaattatgcagttaatcctatggtgctttaattttcaggccttcaaaaaacacttgtacagtgatgtgcagatttttaaacagttgaacttccttgtactacagtttttgtattgacagccaaatttgtctttcattcttcagattgtgaataaagtgatttttacagggcttccagcaaagtttttcctttcatctaaggcttgtagaaccctagcttatatagctgcttacatgagaaatgcaaaatctgtattcaccatgactttagtaacaaaggtaaagttttttagtagtgccaaggcaagaggaacaatcttggtggtagtactaagttttgtcaatattgtggtttcctgattgtattgttggctttctctctgagcattgaggtatactagaagtagagcttctcaaacataatatcattacctcataagcattaacaaatcaggcccaaagagcgtaagtcctagaaatttgttttaaagcagccctagtcatggtgctggtgctaccgccttgttttaggagcctgcctcctgtcagtatgaaaccctcacctgaaaaatgccagcctggacaccaaacactgagccccttcaacaggcacattatttccccctgagatccataagggaatttagtttctactattgtagagttctgaaaagaggtaaaatagtagtcctttggtcatcctatttttgctttcaattttgatatttcagactgtaaaaggccttgggggatgatagtacatgtggtagcagtaatttttttgaagcaactgcactgacattcatttgagttttctctcattatcagattctgttccaaacaagtattctgtagatccaaatggattaccagtgtgctacagacttcttattatagaacagcattctattctacatcaaaaatagtttgtgtaagttagttttggttaccatctaaaatatttttaaatgttctttacataaaaatttatgttgtgttttaaaatccttaggggctttatctatttttctaagtcagttaactgtacttctaaaaaaagtattttgtatctacttttgtaacttcgtcagaataaaatatattgaaagcaaaaaaaacacaaacanaaaaaactttttggnngccncgggcccnaaaagtntttnaacccattgttgtgggcggggccattggtagcgacacgggcaaagggtgcccaggaaaccgggccagaagggcgggttcttccaataacg

SEQ ID NO: 25671 - DNA, 3770 bp, Homo sapiens
  misc_feature (3249)..(3249): n is a, c, g, or t
gcatttcgggtctgcgaggtggggtaggcgggcaaggcgggcgccgaggtttgcaaaggctcgcagcggccagaaacccggctccgagcggcggcggcccggcttccgctgcccgtgagctaaggacggtccgctccctctagccagctccgaatcctgatccaggcgggggccaggggcccctcgcctcccctctgaggaccgaagatgagcttcctcttcagcagccgctcttctaaaacattcaaaccaaagaagaatatccctgaaggatctcatcagtatgaactcttaaaacatgcagaagcaactctaggaagtgggaatctgagacaagctgttatgttgcctgagggagaggatctcaatgaatggattgctgtgaacactgtggatttctttaaccagatcaacatgttatatggaactattacagaattctgcactgaagcaagctgtccagtcatgtctgcaggtccgagatatgaatatcactgggcagatggtactaatattaaaaagccaatcaaatgttctgcaccaaaatacattgactatttgatgacttgggttcaagatcagcttgatgatgaaactctttttccttctaagattggtgtcccatttcccaaaaactttatgtctgtggcaaagactattctaaagcgtctgttcagggtttatgcccatatttatcaccagcactttgattctgtgatgcagctgcaagaggaggcccacctcaacacctcctttaagcactttattttctttgttcaggagtttaatctgattgataggcgtgagctggcacctcttcaagaattaatagagaaacttggatcaaaagacagataaatgtttcttctagaacacagttacccccttgcttcatctattgctagaactatctcattgctatctgttatagactagtgatacaaactttaagaaaacaggataaaaagatacccattgcctgtgtctactgataaaattatcccaaaggtaggttggtgtgatagtttccgagtaagaccttaaggacacagccaaatcttaagtactgtgtgaccactcttgttgttatcacatagtcatacttggttgtaatatgtgatggttaacctgtagcttataaatttacttattattcttttactcatttactcagtcatttctttacaagaaaatgattgaatctgttttaggtgacagcacaatggacattaagaatttccatcaataatttatgaataagtttccagaacaaatttcctaataacacaatcagattggttttattcttttattttacgaataaaaaatgtatttttcagtatccttgagatttagaacatctgtgtcacttcagataacattttagtttcaagtttgtatggtagtgtttttatagataagatacgtctattttttcaaaattcatgattgcagtttaaatcatcatatgacgtgtgggtgggagcaaccaaagttatttttacagggactttattttttgatctttatttgagattgttttcatatctatctaaattattaggagtgtgtgtatcagaagtaattttttaatgtcttctaaggatggtcttccaggcttttaaactgaaaagcttaattcagatagtagcttttggctgagaaaaggaatccaaaatattaataaatttagatctcaaaaccactatttttattatttcattatttttcagaggccttaaaattctggataagagaatggaggaaaatactcagagtacttgattattttatttccttttattaaaaaattacttctatgtttttattgtctcttgagccttagttaagagtagtgtagaaatgcatgaacttcatcctaataaggataaaacttaaggaaaaccacaataaaccatgaaggtgtacacatcttataacacagataaagttttggtgtgctacctattcttgagagagtgagtgagtgtatgtgtttaaaggaaacaaaatgggagaaataagttttaaaaaaatcctcattttgttaatattcaaaagatggactgagcttccacttgggttttatcttgttttaattgtttttgtatcaaaacttgaaattcctctatttctattgggatataaaagccttccccttcagtgaagaaaacatttattttttatttgattcctaggatttagtaaactctagctgtctatttaaaatgtactgaggcacaacaagtattatactggaagacttgccaaactggcaaagctttaagttcatcagcattctatgtggttcagagctgtgatttttgcaaagtattttaccaacctcctcgatggctttgataaaggttagatttgatgtttttttttagatttatttttcttactccactaaactataaagaaaataattacttagaaactccattttaaataatcatttcctagaaattcttaaatatatacagaattttaaagaaaacatttcatctgatttagttagcatccacatatcattgaggaattaaagtgtgggacagtcattattaaaaaaaagagagaaaagccctctattagacattccacaatccatgttttaagcttatccaaaggtccaaatgtcagccattctgtatgttcatgttgatcatttgcgaacaagaaagcaggtttctaggtatcacttaggatgtgaactgcctctcaactttaaaccctgttagctttacttttttaagtccacaagtgatgaaactagtttctcagctaggcttgtactttcctcattatttctagtatttcaaatattctcaaacaaaagagttaccacttttctccatttattttcagttatggaaatgttccctctcttcaccactaagctccaaagcaaatgaaagacgatcacatgtcaggacagtagtaaaggcagcttataaatgggacataaatcagagatgtgttggtattttgagactcaagactgtccttttttaaaataaaaataaaaacattaccaggttcccaagccaatctggcttaaccaacagtgcactgaaatattagtgtttacctccaaggctagggagccaaggggaggaggagaattggaggaaggggagataatgctaagaccgactccccgtaccccgaacaccctgctgcccttgaaaccaacacctggctccccttctcacactctaactcccattttttgcatcgacggccgcnaccacgcccccaatccaggtataaaggactccccccaacccgcttccctagactccaccctttttaccgtcatctgcacctattacaatcccctccctcccaccctcttccacatcttccctgcttcccccccgcctctccatgtcccctccacctacgcactcttttccctaccttctcatacaagctcctcatatcgaacttccctacctcctcaaccgtacttcactctctccctcacctttccatctctccccaccaccttaccttccccttttgattcaactcccacatctctcctttttttgtgtcccccccagcccccactcctcccaccatcccaaactcccgcaccccattcctcccttctctctcttatttcttacctccttcacgcactcctttcgccctccttcctctcttcccctcccccttcctccgccccctctcctccctccacctcctatttccttcctccttccaacttcctttaccttgtcctctctctccctttactaaat

SEQ ID NO: 25672 - DNA, 1708 bp, Homo sapiens
gcatttcgggtctgcgaggtggggtaggcgggcaaggcgggcgccgaggtttgcaaaggctcgcagcggccagaaacccggctccgagcggcggcggcccggcttccgctgcccgtgagctaaggacggtccgctccctctagccagctccgaatcctgatccaggcgggggccaggggcccctcgcctcccctctgaggaccgaagatgagcttcctcttcagcagccgctcttctaaaacattcaaaccaaagaagaatatccctgaaggatctcatcagtatgaactcttaaaacatgcagaagcaactctaggaagtgggaatctgagacaagctgttatgttgcctgagggagaggatctcaatgaatggattgctgtgaacactgtggatttctttaaccagatcaacatgttatatggaactattacagaattctgcactgaagcaagctgtccagtcatgtctgcaggtccgagatatgaatatcactgggcagatggtactaatattaaaaagccaatcaaatgttctgcaccaaaatacattgactatttgatgacttgggttcaagatcagcttgatgatgaaactctttttccttctaagattggtgtcccatttcccaaaaactttatgtctgtggcaaagactattctaaagcgtctgttcagggtttatgcccatatttatcaccagcactttgattctgtgatgcagctgcaagaggaggcccacctcaacacctcctttaagcactttattttctttgttcaggagtttaatctgattgataggcgtgagctggcacctcttcaagaattaatagagaaacttggatcaaaagacagataaatgtttcttctagaacacagttacccccttgcttcatctattgctagaactatctcattgctatctgttatagactagtgatacaaactttaagaaaacaggataaaaagatacccattgcctgtgtctactgataaaattatcccaaaggtaggttggtgtgatagtttccgagtaagaccttaaggacacagccaaatcttaagtactgtgtgaccactcttgttgttatcacatagtcatacttggttgtaatatgtgatggttaacctgtagcttataaatttacttattattcttttactcatttactcagtcatttctttacaagaaaatgattgaatctgttttaggtgacagcacaatggacattaagaatttccatcaataatttatgaataagtttccagaacaaatttcctaataacacaatcagattggttttattcttttattttacgaataaaaaatgtatttttcagtatccttgagatttagaacatctgtgtcacttcagataacattttagtttcaagtttgtatggtagtgtttttatagataagatacgtctattttttcaaaattcatgattgcagtttaaatcatcatatgacgtgtgggtgggagcaaccaaagttatttttacagggactttattttttgatctttatttgagattgttttcatatctatctaaattattaggagtgtgtgtatcagaagtaattttttaatgtcttctaaggatggtcttccaggcttttaaactgaaaagcttaattcagatagtagcttttggctgagaaaaggaatccaaaatattaataaatttagatctcaaaaccacta

SEQ ID NO: 25673 - DNA, 463 bp, Homo sapiens
caaataaaaataaataaataaaagctccttagggctgagaactactgctcctgtcctatgggtccccagctttattttaactcaaaatgagtttagaaaaatttatgaacccatttaaaaatatttattgagtatctcctgtgtgcaaggcactgtgttatgttaagtggctgaagggaaattagactggggaaaaagacgaggtcatggcctaggtttcaaactaatataaaagacataacgaataagaaaggatgccaccttcttccaaccctcatccctcttccttttgacagttgcagatgttgctaattcattttggcaccctttttctctgacccaaatatagtcttataaaccttttcaacccacggctctaggcaagtatcaccttttgctcttttggcaccagatctcttgaacactatttactggttttggaaagattatacatgtatgtctg

SEQ ID NO: 25674 - DNA, 379 bp, Homo sapiens
gggagaagggttctgtgctcctgagattagttcagatggtctaaccattgttctatatgtgcattttagttaatattgtgtattaaaggataagtcttaatgctcaaagtatgttaaaaatagatgtagtaaatcagtccctgtgtgaatgtcccttgttagctttaggaggcctgtctctggagtgaccttattagtcacccttgagctagacatctgtacttagtaggggatgtgagagagaagagaaggtaaggaaggcccttctagtcctcataactgacgatggctagatatacagctcaaacggttagtagtctgtcatgtgcaagtatattcacacacgtccatggtcacataaactgccagtctccctgac

SEQ ID NO: 25675 - DNA, 426 bp, Homo sapiens
ataatgggaatatagtgagaattaaatgaaatattatgaaattattcaaaggaagacacccagttactatgtttcaccccatccactgcttttcaagacagaaagatctctaagattttttaagaggcgtagcacatattagctctcaataatattgttttaagaaaattaggctgggtgcggtggctcacgcctgtaattccagcactttgggaggccgaggcaggaggatcacgaggtcaggagttcgagaccagcctggccaacatggtgaaaccctgactgtactaaaaatacgaaaaattagctgggcgtggtggcatgtgcctaaaatcccagctacttcagaggctgaggcaggagaatcacttgaacctgagaggcggaggttgcagtgagccgagatcatgccattgcactccagcc

SEQ ID NO: 25676 - DNA, 295 bp, Homo sapiens
ggaagggaaataaagaggcccgggggaatgggctgggacagggaaggaaaatcaggaaaaggggggaagagcagagaacagactaaggagcatctggaggtattagggattcgagagagaggatcctcagaaacagtgcacagtgccaccggagttggctattaacgttttgttccattatttaaccattccgtcaaccacttgggggggttctgtaaggatctgcagattgcatagcccctgaaactggatgaagtcaagctgcatcccatagccacacacttttttttttttt

SEQ ID NO: 25677 - DNA, 318 bp, Homo sapiens
gcggccgcctactactactactactactaaattcgcggccgcgtagacccattacctgtttcaaactctggtttgatggggagtgtttttccttcagaactctaggaagaagacaccaggaggggataaataagagtaatggtggctgggcgtggtggctcacacctgtaatcccagcactttgggaggtggatcatgaggtcaggagttcgagaccagcctggccaacatagtgaaaccctgtctctactaaaaatacaaaaattatccaggcatggtggcatgtgcctgtaatcccagctacttgggaggctgagg

SEQ ID NO: 25678 - DNA, 184 bp, Homo sapiens
gagtgattatgcctccgtggacatttgacaaatgtctggaaacgctgcagctggcatctggtgggtgcatagaggtcaggggtgctgctaagtgtcttagaatgcacgggctagaccctacagccaagaactctctggcgcaaaatgtcaacagtgccgcagttgagaaaccctgcattataca

SEQ ID NO: 25679 - DNA, 246 bp, Homo sapiens
ttctgaattaagagatttaaacaattgtagttaatactgtcatcctgggttacatttcatgtggtcacattccataacccggagcttatgggaaaaatttagggcatctgaagttccctctaaagcacttggtgcccagaaattagcccttggtttgctttggttcagagttgacctctgttagatgttgggtggtggtcactgaaactgttttcggctgtatcctgtttagagaataaaagggct

SEQ ID NO: 25680 - DNA, 881 bp, Homo sapiens
catgattaggataaaatgtaaagctttgaagcatctaattcagagtgttcaccaaagatcatcacttgacccacatccccactctgcatttatctgtatttatttcaaaatgtttatgtggatgtagcctacttattcttacataaatatttttgccattctgtattaagatttctggcttctgaaagaaaagccctggtttctccccagttgcagttagaaaagcattgtgttaggaagccattatgtatgtctctctcatcctatacataaatgaggctctctattacttcagtagtctctgctcagacaaacagcagtttacctaaggtttccaaaaagtacatgattttttcattgtttaatttggagtaatatagtttctaaatcctatcttctaggcttatatgacggtacttcttgagttagtttaaaggtgacaccattcagagactaatgccatataaattgaacagtaattgggcctctatctaaaagggcacattcattgtttctgtctggtttcatatagtagctgactgctttactgtgccttatgcagctttgattgtaatgtgctgttgggagccaacaggccgtgctatttatttggcctaatgccaagtctgactccttgactcctcaagaagttgctaccagcccagagggggcaaaatcaatgagccatagggcatgctttttattaaagaggagtcaaaagagcgaaaagaaaccacatcagctgctgtcaatactgagctagtgccagaaaccccaaggctactactgttgcagaacaactgccaagcactataaatctgagatttactgtgacgtaaagtttccttaagagcttaatttctgaagctactgtattactt

SEQ ID NO: 25681 - DNA, 1195 bp, Homo sapiens
tgacgtttgttgagtgcttgttatgaatgtggcattattctagctcttgtaaggttaccaattttttaaaaaacaaaagtaatgcaagactgctgatgaaaatttggaatatgagaaaagcataaagaagaaaatacatatctttaagcacaccacccactgttaacattctgatctatgtacttctaatattttctccattttcatatgtacacatacatttatttacatgcatatataaatatcaaagtgtatatatataattttctctgccatttaaatttttactgtgtaacaatcatggattgtaaaaaaagtgaataaaatgtacgcagtcagtttaaagactaacaaaatatgcattaaatcaccagccaggttaagaagaaatactattacttataccctggcatctccctcccacctttacatagccaaatccagaaaagatccgttttcctaaccttgttcgcctattttattatttaaattgcagcaggagggaagcatgtctactttatccaatttcacacagacgctggaagacgtcttccgaaggatttttattacttatatggacaattggcgccagaacacaacagctgagcaagaggccctccaagccaaagttgatgctgagaacttctactatgtcatcctgtacctcatggtgatgattggaatgttctctttcatcatcgtggccatcctggtgagcactgtgaaatccaagagacgggaacactccaatgacccctaccaccagtacattgtagaggactggcaggaaaagtacaagagccaaatcttgaatctagaagaatcgaaggccaccatccatgagaacattggtgcggctgggttcaaaatgtccccctgataagggagaaaggcaccaagctaacatctgacgtccagacatgaagagatgccagtgccacgaggcaaatccaaattgtctttgcttagaagaaagtgagttccttgctctctgttgagaattttcatggagattatgtggttggccaataaagatagatgacatttcaatctcagtgatttatgcttgcttgttggagcaatattttgtgctgaagacctcttttactttccgggcaagtgaatgtcattttaatcaatatcaatgatgaaaataaagccaaatttgaagtaaagtgtctgggcagtggctgtg

SEQ ID NO: 25682 - DNA, 827 bp, Homo sapiens
gtaaggtgaaggtgcccagcaggctgaggcttgtgtgcaacccagaagagagctcgctaacgccagcaagaaggttcagaacagcctggctttggaaaggaatttcatcctgcccacacactgcatagcaggagggaagcatgtctactttatccaatttcacacagacgctggaagacgtcttccgaaggatttttattacttatatggacaattggcgccagaacacaacagctgagcaagaggccctccaagccaaagttgatgctgagaacttctactatgtcatcctgtacctcatggtgatgattggaatgttctctttcatcatcgtggccatcctggtgagcactgtgaaatccaagagacgggaacactccaatgacccctaccaccagtacattgtagaggactggcaggaaaagtacaagagccaaatcttgaatctagaagaatcgaaggccaccatccatgagaacattggtgcggctgggttcaaaatgtccccctgataagggagaaaggcaccaagctaacatctgacgtccagacatgaagagatgccagtgccacgaggcaaatccaaattgtctttgcttagaagaaagtgagttccttgctctctgttgagaattttcatggagattatgtggttggccaataaagatagatgacatttcaatctcagtgatttatgcttgcttgttggagcaatattttgtgctgaagacctcttttactttccgggcaagtgaatgtcattttaatcaatatcaatgatgaaaataaagccaaatttgaagtaaagtgtctgggcagtggctgtg

SEQ ID NO: 25683 - DNA, 382 bp, Homo sapiens
ctcccgtaaaagctcaaagcatgctggaaagaattagagttgttttaaaaatggaaaaatacggccaggtgcagtggctcatgcctgtaatcccaacattttggaaggctgaggcgggtgtatcatgaggccaggagttcaggaccagcctggccaatatggtgaaaccccatctctactaaaaatataaacattagccgggcgtggtggtgggtgcctgtagtcccagttacttgggagacttaggcagaagaatcgcttgaacctgagagtcagaggttgcagtgagctgagattgtgttactgcactgcagcctgggcgacagagcgagactccatctcagaaaaaaaaagggggggaaaattacttatcagcttatcc

SEQ ID NO: 25684 - DNA, 356 bp, Homo sapiens
gattgcatgaagacattactccagagagagagctcacactgggtcccacaaacccctgagtcctcagcagctgcagtgtggcatcatctggagagctcagcctccatcagactgtgtcttgccttggggttcaacagcctctacatctccacatccctgaagccccagtgacattccccaccacagctgctgtggctgctgctgctggtgccaaggtgggagccactgccagtgaccctatcacccccagcagaggggtgggcacacattttcatgcaccctgaggacaaattccactgcctgtaactgtagctgcaagggccaaggtgctagcaaatcatgagtcaccctcatcc

SEQ ID NO: 25685 - DNA, 401 bp, Homo sapiens
ccaacatcattgctgggtgtgtttgtgagagtgtttctggatgagattagcaggtgatttggaagactgaggaaagcagattgtcctccccattgtggtttaggatgtcactaaagcagtgtgtgtgtgtgtgtgtgtgtgtgtgtgtgtgtatttattttattggttcttttgttcctctggagaacgctgactaataaagtatcaactccaatattttactgaatgtgggacatttgttcattaccattattataaaattagtcaaagaaataaaaatacatgtagttggaaatacaacagtcaaaatctaatattaattatgttttaagaataattcattaacagatatcataccaagtaaatatttatggagtaactccattacttgtattgtgact

SEQ ID NO: 25686 - DNA, 269 bp, Homo sapiens
tggaaggaagaagagatgagataagggaaatgaactcataatagccccagttaaaatacttacagtaaaatatcattagtactacttgatgttggtgaaaggctctagactcaagtcagaaggcccaatttgttgctgtgatttcttgaacaaattatgtaattgtgttgagattcagttttcttttctatcattgggtattaataacttctatgtgatgtcagagttatgatgtgaagttaaaataactaataaatgggtaaaccctg

SEQ ID NO: 25687 - DNA, 473 bp, Homo sapiens
agatagcatcgctgcctagcccaatagcaaaagatagactcgggcactgggaatttaccggctgctttaggcctaatacctcgtcaagttgcaccatttgataaaatcagaggaattaattaaaaaccatattagaaaccttcatataattgctgatttcctgcttatgctctaagcacatgccaaggtagcaaaatgtacagattgaaactggatttcttgtccttttaccattaatgtaaaacatgtctatatttcctgctaggtcacccattggccttataaactttttttataaccaggaaagatactccaagggagaaagagtatccctgtaaggaaatagggtttcttccaaggcaaggaagaaaataatatttccttagaggagtacaacaggacaagggcacaggaaggtgaggagactctgcctcttcaaaggaaattagcagaatgcatggaaaagaagcaaa

SEQ ID NO: 25688 - DNA, 174 bp, Homo sapiens
tttttcttttagaaaagaattacaaaaatatagatgtgtcatgctttgtcattcgggctgaagggtggtggcatgatcactcactgcagcctcaaactcctgggctcaagcgatcctctgaagtagcattcaaatgatttttcaacttttcaaaagcatctttccctgggcatt

SEQ ID NO: 25689 - DNA, 426 bp, Homo sapiens
gcacacacgctcctgagttaagcctttgtcaatgaaatgaacacccacttaaaaggaataacctgtccaggcacgatggaacattgagtaaccccttattctaaattcctggtccctgtaagactccttccccatgcccttgcccttttctgaccttcccctaaagtccttgaggcttaagcgggcatagtctgcagcaaacactggggaagctgagtccagacttcagagcacaggctttggatctaggccagctggatttgaacctcacatttgtgatcagctggcatgactgtttccaaaaagtccattttaatcctctacgtgaccctctgtaaaatgggatactgaatggtgagctagcacgattttacagagagtgaattttttttgtgtgtgtgtgaggcagtcttactctgttgccca

SEQ ID NO: 25690 - DNA, 595 bp, Homo sapiens
gggaaggccttcaggcagagggcttccctcatccgccactggaaaattcacactggagaaaggccttaggatgggagataattccgtttccttgttcaacataataactgacatcagagagaagctccaagcatagcctttatgtgtagccgacagccagaagtagaactttatacactcaaacactcaccctggggaggttcttccgagtgccagctatatgggaagccttctggagctatgctgaattttctagactcttgctggaatttcgtcaaggcagtgcctgttagaagccatctgtctttgtgctggaagagtcctgccttgtgccaaagtaaccccaatgtgtttcaaaagacagacctctgtactattcccttccctggagggaatcatcagtagcctgaggccatcaaggattctcactttttttctgccccactactggtttaagcatgagcatgacccagttttagccagaaaaatgggagctttgttctgctgaccactggcagaggtttcccttcatggatatagttgatctcacatggcacttgggacgaatttttctagccttcaagacacctgacct

SEQ ID NO: 25691 - DNA, 300 bp, Homo sapiens
tgtaggcctaatcttttggtctatatgttaagattttttgtgtaattgaggtcaccctaagcagtgggcatttgttgtgataatctctaatgtgtctgggagcaacatgaattacgtcccttgttcccagaagatacttcatattcccaaggcttcttgaggagaatttgaactcagtggacatgtcaagatctctgaagtctatttttcagtaggcagttgatattggctgtcctccagaggggacaagttttattcctatgaaggggaagatgccggccattaatggaggccactcat

SEQ ID NO: 25692 - DNA, 731 bp, Homo sapiens
atatagttgatctcacatggcacttgggacgaatttttctagccttcaagacacctgacctgaaattggctgcctcatattctggttttgcaacaaatgccttaatttttagactatctgaaatcttgaggattctgttcgctttgtgggttgggttgagaacagaattgagctaagccagtatgaagggaagaacagcttttgtgagagctccaactatctgtatctctgaagtgatagtaggatggcaaagactagctcttatgctagtgtcaagctaacttacttgactgcttcagctctcctaggaaagaatgccagtctttgtaggcctaatcttttggtctatatgttaagattttttgtgtaattgaggtcaccctaagcagtgggcatttgttgtgataatctctaatgtgtctgggagcaacatgaattacgtcccttgttcccagaagatacttcatattcccaaggcttcttgaggagaatttgaactcagtggacatgtcaagatctctgaagtctatttttcagtaggcagttgatattggctgtcctccagaaggcccaggtaggaatcatagttggtgcagaaacccagattaataaaggaatgagaaaactgcagcaaactatagggaatatgacccttctaaaggtacatccacatgtgtttccattactctggctccattatgagggtttacagaaatatttccatacctgtg

SEQ ID NO: 25693 - DNA, 559 bp, Homo sapiens
ataaatccatcctggtccaccagcctttcttccctaacacactctgaattgacagtggtgttgaagcatgcacagattgactgatcctgaaagaggcctgccttctgttttagttaaggctggagaaatgtccttggccatttttaagagcaagtttattcccattcccacaccttatttatccttgtcatgataatttgaggaaacctgtgattcttatctttctattgagtctaatttaaacctaaaccaacttgtggtctaactttggtttattcaagagcagcattgcccagtagaactttctgtgatggtggaaatgtaagtgtctgtgctgcttctgcagtaactactagctacgtgtgatagtaagcccttaaaatatggctagtacaactgggtgttttatttaattaaattataactcgatgaagccgggcatggtggctcacgcctgtagtcccagcactttgggaggccgagacaggaggatcgcttgagcccaggagttcgagaccaacctggggcacatagcgagacctcatctctatttatatta

SEQ ID NO: 25694 - DNA, 511 bp, Homo sapiens
ataaatccatcctggtccaccagcctttcttccctaacacactctgaattgacagtggtgttgaagcatgcacagattgactgatcctgaaagaggcctgccttctgttttagttaaggctggagaaatgtccttggccatttttaagagcaagtttattcccattcccacaccttatttatccttgtcatgataatttgaggaaacctgtgattcttatctttctattgagtctaatttaaacctaaaccaacttgtggtctaactttggtttattcaagagcagcattgcccagtagaactttctgtgatggtggaaatgtaagtgtctgtgctgcttctgcagtaactactagctacgtgtgatagtaagcccttaaaatatggctagtacaactgggtgttttatttaattaaattataacccaaagtgctgggattataggtgtgagccactgtggccggccgttttggacctcttaaaacaacgctctcgtgtgtgtgtatacac

SEQ ID NO: 25695 - DNA, 395 bp, Homo sapiens
atctcaagatgtggcatggtagaatgctaacagacaaataggtccagggagctcaaaatccatttccaccatttattatcaataactctgggactttttgttctggttacttattctctgtgagcttttgttgtgagttattgtgagagttaaaagatataaatgaaacactaaaatagggattggtacatagttagtacttaatatatgtgagctgtcttctctcccgtttcttaaatttctcaagccatgtttacatacacaaacaagtatatttatccatacatatctgggtaatcattcaataatttattcattaaaaaaaggtattgacctcctacttattaggtgccagccctgttctggattctggagttggaacaaacaaaaaaata

SEQ ID NO: 25696 - DNA, 350 bp, Homo sapiens
tatggtttgggtgaggctgctgttagacatactgttcgctaaagttaaggaaattggatatatcagattgattggcctcattaatagagatatttcataaattcactatgaagccgaagtctgggagagtgttggtgggttttatggtttgcagtatatttttatttcaatggacctttcaggaatattaaatgaattttgactactgtaatatatatatatatgttgtgattagggttatgaactactgcaataatatgaaacctgaatccagcatgcaaattaaaatgtttgctttctgatatttgtgagggaatattctgaaaaagctgattgtctgggaaattagc

SEQ ID NO: 25697 - DNA, 503 bp, Homo sapiens
gagactcatgtactcagatgctgaaacaagcaggaaactctggtgaatatcatttacttgtgtccatcttctaggtagatctgtttcctcctctctgatcctatactattttgtgtatctaaaactaataatgatatttattgtatgcttactacattgccaggtattattctgtatattttatatacatggtaatttaattttcagaacagttcttcaagatagttattatttttcctcttttacagatgaaaaaaatgtaggcactcataaacttaagtatattttctgagataatattgctagtaagtgatggagccaagacttggacacggatctttaagacactaaagcctgcgctgttttcccctatatcatgctactgcttttcacattttattgtaattgtttcttctcctaaccagactgtggaaaagcagactgttgaatgaaatatggaaaaaatgaaacatatatttggaaatatagcatacactaaagta

SEQ ID NO: 25698 - DNA, 567 bp, Homo sapiens
gtacttccaatagtaaactttttttttttaatagagtctgaacttgagatcaaatgctatttaatggtggtaggaaggcaggatgtaaatgtgttaagtgtcagccattgaaccaagcatgttgtatactataccttgttttatattatttaatcccaactacccccattggtagaaatttttatactcattttacatatgaggaaattaaggcttcaaagaaattaacttgcctgagttacacagtaaaaggcaaggctgggatttgaagccaggtctgagtgacatctgatcccatatacttgccctgtcacagtgctggactgttatgtaaaggacataaagattctgtgttaaggccaggcgcgatggctcacgcctgtaatcccagcactttgggaggccggaggaggcagatcacctgaggtcaggagttcgggaccagcgtggccaacatgatgaaaccctgtctctacaaaaaatacaaaaattagctgggcatggtggcaggcgcctgtaatgccagctacttgggaggctgaggcaggagaatcgcttgaacccagg

SEQ ID NO: 25699 - DNA, 236 bp, Homo sapiens
gtgctgagattacaggcacgagacactgctccccgccacaaggatttcttaatcgggacacaaacataaaaaatatatatatagagagagattggtttatattaaaactaagaacttttgttcatcaaaacataccattaagagaatgaaaagacagtcacagagtgggagaagatattcttaatacacacatctgacaaatgactcattcagattacataagaactcctgcaaat

SEQ ID NO: 25700 - DNA, 495 bp, Homo sapiens
ggcactctcttcaattttgcagtcgtttttacagatgttaaaagacctggctatcgagttaaggaagttggtagcaccaagtctggcagaaaggggactgatgattccatgaccctgccgtcgcagaagttccaggtagattacttggacatagcaattacccctccgcatcgggcaccacctccttcagggcacatgagaccacattaaattctatttactatttcttgtgtttattttttggtcagttatgtaaaataaacttactctttttcctccccagattattgtcattaagcctttgaattctaagcaaattataatccatcatctatttaggaattagatttggatgtgctattgtataattactaatacaaagtccatatgtttccagcctttttgtaaaatatgaagaaatgctcttagcattctatgtaaaactgtactgttaaatatatgtgtgtaataaaaaaagcaacagaaaaacagaca

SEQ ID NO: 25701 - DNA, 711 bp, Homo sapiens
agccgttatcctcaggaagccctgagcgctgagaggcactgttacagaaccgaactggggtccactcgctaggcctacctaggtgcctggaatttcccttcgaggaacgcaggagttttctttattttcatgcttgggaaggctcattaggcccctaagagagggtcccttccccatctcaggactaaaatgcaatgaagatgttgctcagaggcagctggagagggatgggtctgtggaggatgccccgcagagtgaagtcgagatgatgcagccaccagggccggaggggagggacattccactttttaaatcagctttctgaagcatgatctccatataatcacctagaagcgtacagcacaatgatcttgacagatgccagcatccttggaaccactgccaccaccaacgtctcaaaccattccatcaaacccagaacactcctggtgccctgaagcgtctcccttcagtggcagaaccagcagagattcagtggtcacaaggctggtctggaactcctgggtgcaagcgatccttccacctcggcctcccaaagtgctgggattagaggcataagccaccgcgcccagccaggaatggattttctcacagttctcgatggcggaagtctgagatcaaggtcttggcagggctaggtctctctgaggcctttctccccagcttataggtcgccgcctcctctctctg

SEQ ID NO: 25702 - DNA, 635 bp, Homo sapiens
agccgttatcctcaggaagccctgagcgctgagaggcactgttacagaaccgaactggggtccactcgctaggcctacctaggtgcctggaatttcccttcgaggaacgcaggagttttctttattttcatgcttgggaaggctcattaggcccctaagagagggtcccttccccatctcaggactaaaatgcaatgaagatgttgctcagaggcagctggagagggatgggtctgtggaggatgccccgcagagtgaagtcgagatgatgcagccaccagggccggaggggagggacattccactttttaaatcagctttctgaagcatgatctccatataatcacctagaagcgtacagcacaatgatcttgacagatgccagcatccttggaaccactgccaccaccaacgtctcaaaccattccatcaaacccagaacactcctggtgccctgaagcgtctcccttcagtggcagaaccagcagagattcagtggtcacaaggtgagtgaggcggcctgggtctggctcctggccattaattttaaataatttgcatttaactttgaaccaccacacctggccatattggatagtgcaggaggaataaactcactggcacatccttctggg

SEQ ID NO: 25703 - DNA, 497 bp, Homo sapiens
tcaacccagaaagaacccactgttcagccacagcagcctgagtgggcttttctagtgaccccactctgtatggccgctcgagatctaaagggcattagctggtataggccacctgttaactactcgggccagctttaccctggcccaggactggagttctcagctctggcagcatatttgaatcaccaaggagcttttaaaattcccaacatggaggtctggcgcagtggctcatgcctgtaatcccagcactttgggaggccgagataggcagatcacctgaggtcaggagttggagaccagtctggccaacatggtgaaacctcatctctactgaaaatacaaaaaattcggcaggcatggtggcgggcgcctgttatcccagctactcaggaggctgaggcagaagaattgctgatatcctgtaggcagaggttgcagtgagccaagatcatgccactgcactccagcctgggtgacagagggagactctatct

SEQ ID NO: 25704 - DNA, 384 bp, Homo sapiens
aggatgttgcttgagacgggataccatttagcctgtgcaagcaacagtaaaaaggttacagatgaagtgcctaaacccaagacggagggtggtactttaagactatatagggtgcagtggctccccagcactttgggaggccgaggtatgtaggatgattgagctcaagagtccaagaccagcctgggcaacatagcaagattccatttccactaaaaatacaaatagaaatcaggcaggtgtggtggagtgtgcctgttgttccagctactcaggaggctggggcgggaggatcgcttgagcctgggggatctagtctgtagtgagccatgattccaccactgcactccagcctgggtggctgcaagacttcacctcaaaaaa

SEQ ID NO: 25705 - DNA, 569 bp, Homo sapiens
gtgggctcaggcccagagtgccagctttgccctatcccatagcctggagccaccacaggaggggcactccactctcttgggctcctggagcctcagaggcagagccagccgggagtgcaggagggagaactttcctgtggacgtcctgtgttctccagacgcagagaaccctcatcaaccgagggggaggtcacttccgaatccacagatggcgtgtgagtgcatggcgagcgcctccaggacacacttactgttcccttgctctggccagacgccagccggaccctgtgtgtgcgcgccgtgctgctctttgcagctgcctgcaaggggttcctgcgaagaccagcaccttggggaagagcctgcggctgaacttgaactcgcagctacctgagtcagacctgtgctttttcacctctacggaagatgtcagagcgtttccctagcaatgttttagaagttacttctgtctggaaaaaaatggaaaaaatggcaaattatgttatgtataatttgataattttaaagaattaatgatgtaattattactcaaacccaaaaaaaaaaaa

SEQ ID NO: 25706 - DNA, 622 bp, Homo sapiens
gagattcggtccaaaaaaagacttcagaggagaccctgcctcctggtgctctgtacattcttcccctaaactgggctcaacttccttgttttatgtaaaagttgggcagatggaattaagccctcagagcattcaacttacttcataattttcagagccagccgggagtgcaggagggagaactttcctgtggacgtcctgtgttctccagacgcagagaaccctcatcaaccgagggggaggtcacttccgaatccacagatggcgtgtgagtgcatggcgagcgcctccaggacacacttactgttcccttgctctggccagacgccagccggaccctgtgtgtgcgcgccgtgctgctctttgcagctgcctgcaaggggttcctgcgaagaccagcaccttggggaagagcctgcggctgaacttgaactcgcagctacctgagtcagacctgtgctttttcacctctacggaagatgtcagagcgtttccctagcaatgttttagaagttacttctgtctggaaaaaaatggaaaaaatggcaaattatgttatgtataatttgataattttaaagaattaatgatgtaattattactcaaacccaaaaaaaaaaaa

SEQ ID NO: 25707 - DNA, 355 bp, Homo sapiens
ttagatctatctggggtactatgggagactctgaggtgaataagataaggatttaaagtctagaacaagggccagcaaacttctgtaaagtggcagatagtacctaaaataaaagcactaaaataggctttgtgggccatgcagcccctattgcaaatactcaactctgccactgtagcatgcaggcagccatagacagtacacaaattaatgtgtactgttccaaaaaagccctttatttataaaaactggtagttggctggattcctggtctagaaccagtgataggatatacccaaatatctacatactcaacctaactgttcaggcttttatttcttgcctgaactgttat

SEQ ID NO: 25708 - DNA, 258 bp, Homo sapiens
gcagaaaaagagtaaaggggagaaaagaacagatgtgacaaatagaaagcaaataacaaggtgacagactctaacctaaccataccagtaagcacattaaatatcaatgggctaaactcccctattaagaagcagaggggccatgcatggtggctcactcctgtaatcccagcacttttagaggctggtagaggaggatcccttgagtccaggagttcaagaccagcctgggcaacagagggagaactcatctctcca

SEQ ID NO: 25709 - DNA, 717 bp, Homo sapiens
taatggactcaaataagcagtctcagttattttaacagcagtaaactcaggattcttagatttaataatatccatttgggtactgattgctggcatattctgctaccattcagatttctacctggcttgagggaagaactattattttacatgttgcctcccatgtcctttctcaaacatagttattttgatctcacctatgttgcttttaagagggactagtttggggcctgcagaattagaagctttacccttatggttttcaactgagtataataaacatcttttaaagaaaccaaacaacaatagcaaagctatagccccagtggaggcattaaaggggagttggcacccatttagaaatcccagctgtgtttgttctgattataatccaggctactgtctacccatttagttctcttgggaggtgatacagttaaaatcccagcatctgtagaaatagcaagtttatccactcagttatatacactgagctttctgttttaataaagagaggtggggtacaatgatcagattaaggagtatgggcaatttttaccttgagcagaaggaagcagtcctccagtgtgttttagaatcctattcattgctgacactgggagaagactgctgacaatatgggtaagctcaccttgatcttttggaggggagcctcctccaaccatttagaacagtacagtgggaggaaaacaaaac

SEQ ID NO: 25710 - DNA, 491 bp, Homo sapiens
actggtttgtcagaactgaagatgctctaattcattcatatttttaagtaaaaagtgagaaatgaaaaaaagaagctggttttagaaaagagcatatgatttcagtttcgtaaaagtcttcaacaaaaaacaagaataaagttcttaagacaaggttaggggttacaaaaagttaaattatagtgacaatttctgactaggccaggctcagactcgtttaacaaagagctggtaccatctttttccctgaaatacttatctgctctggtcagacagtgtctttactaccctaccctttccccccaactctccgcaacatatatgtaattttaagctctatgcccatgcctgttgtttccacagttccttgcaaaatgctatacaagtccactaggtacttaacaagcacaagataataggtagagtcaaagctattactgttatctgtaataacccaaataagaaaaccagcaaaggccgggtgcagtggc

SEQ ID NO: 25711 - DNA, 416 bp, Homo sapiens
aaagaaacaaatgtgttggccctgaatttgcagaggagcaaaattctgccatccttctctctattgccagccttactctgaactagttgttagtgtatccattgaaaactggatttaaaaagctagaaagattaaaatgagtgatgaatgaagccaaacaaggtatccaatttttcttcattatttatatctttctggacatgttttatcataactaaataaagccacaggtgactcttaaagtatctgcaagagctgggcatggtggcacatgcctacagtcccagttacacaggaggctgagaaaggaagattgcttgagcccaggaattcagggctgtagtgcgctacgattgtgcctgtgagtagacactgtactccagcctgggcaacataaggagaatcttgtctcttga

SEQ ID NO: 25712 - DNA, 387 bp, Homo sapiens
gcagggcggacgctttaaacctcgatctccccactcagtgtgcagggcggacgctttaaacctcgatctttctactcagagggtggatgatagaaagatttgaatgagtgaatgaaagtagagacttgaaaagtcagcacaaaagcaacaaaatgcagcaactccactcggaatccctgggtggaaagctctggttgacttcctgcggactcaggctggtgagatcctacagctgggaacggcccatatgggtcagtccctgtgatgcctccagtgtggcgggaaggtggcttggccaccatggatgactcgcgcctgccttcacgaccgccgggacctgtgcggggggggaagagggcggctgcaggggaggccgcacgtggcaca

SEQ ID NO: 25713 - DNA, 476 bp, Homo sapiens
tagttgaaagatcactgtctgctgtgtagaggatggattggaagagtcacagaggcaggaataagaggttaagggcctgcaccagggctgtagcagagagtttaagaagtctgggagattgagtcaccttgacctactgattcattggaaggtggaatgcaatcatggtgtcagtcctctaagataggacctttaaagtgtagggatagtggtttggttttacacgtgttacacatgttgaatttgaggttcttgttggcggtcaaggcagagaagtccagactggaggtggaagtacaggcctagttctttaggacctactctgggctggagcatcagttgcggccgggcccttgtggtagtaggagctttgggttgaacataagttttcagcaggagtgcgtggagtgaaaagagagatggggttggatttttggtcaactccaactttaagagattcagaggatgtgattcct

SEQ ID NO: 25714 - DNA, 652 bp, Homo sapiens
tgtgaagtctgggtttccatcgaacccagacttcgttcagaatctttaatttcaccaccgcatcgggagcacatcctgttttctggagcacagctgagctctggggtgtatgtctcttttgattgctattgcattttgaattttttgttgtgtttgagactcgccgtcttgccccccatcccagccatcattctcttcctctcttaccaccacgccccaccaatcaataagttaattaagatgtgtcatgaaagggcccttcctgccacggctggggctgtgtgggtgctggggacatgcccaggcctcgctagatcccggctgaaaaggagaagctggggttgttttaaaaggcttcaggtgctctgcgtgtataacctgtcatttcactattatccctaatcactcctccaaacaccttcttaaaggatgctgcacatggctaaggaaaccacatcatatcacaaggagagtgttaaaagggagaggacaggtgtggcctgaacaggtgtacatcatttatgcactaggcgtggtcctgaaatggaaggtacatttttcagaattgaatgatagttgaaatgatttgtttctccgggaaatgtgaaagaacaccacagtgcttgttttgagtgattcaagtaatatataa

SEQ ID NO: 25715 - DNA, 301 bp, Homo sapiens
gggaaattagcagtttttgttttatttacctattagattgagataaaggaaccacactcttcgatagatcaaactagaacctgagaagtaacctatgatgattcttcttcctcaaaaactctaattacccaagccagtggcaaacaagggagtaattcaattgattgctgttttagttattggaatattgagtcttataatgcaacacagcttatagacaaatgaagttaaaatattcctttgaatgcattgtgatctctccattgaactggtcttcctgtttcaacctttgtttccctac

SEQ ID NO: 25716 - DNA, 155 bp, Homo sapiens
cacccttctactttctgtttctatgaatttgcctacctaagaacctatttaagtggatcatgcaatatttgtccttttgtgactggcttacttcacttagcataatgtcttcaggattccctcagaacaaggacctctaaggacaaaaataagtg

SEQ ID NO: 25717 - DNA, 357 bp, Homo sapiens
gtatcgtcccttccatgattcaccagaaagacgttaccagaccctaccacttacccaaagttactctttgggtctggggtttccacactatagtcacttctgtggtcgccagaaagatgttacaggaccccatcacttaaccaaagtaaacctttgagtcaagggtttccacactatggttctttccatggtcaccagaaagatgttacaggaaaggggtcccaatccagaccccgagagagggttcttggatctcacgcaagaaagaattcagtgcaagttcatgaagtgaaagcaaatttattaagaaagtaaaggaataaaaaaagggctacccatagacaaagcagccctgag

SEQ ID NO: 25718 - DNA, 292 bp, Homo sapiens
gccatatctatgtattcacatacatagtattcttttcttacatctatcctagaatatgtatgtataacaccataatacaagtcaactgtctcttatctgcaaccacaaatccataaagctctgaaaaccagaagtttgttttatgattggtaccaaaatttattttgtgcaaaacctggcttgaacagacatgaggcttgctagctgatatgccccactagatgtaagaaaagaatactatgtatgtgaatacatagatatggccccaacacagactggtgaagagtcgacg

SEQ ID NO: 25719 - DNA, 336 bp, Homo sapiens
gtagtctacaccttcagttccaagtaactcagatttgcctgtgggggatgaggcaaggaaaaggctaaagatagataactttaaatatacagagagattactttttttttccctttccctttccctccttctctgtctctctcttcccatgtcatctttgctgcttcgtatgttagcttcattctataacagattttctcagtgtggtggagaatatggccattgagggctccagatttgtatcttctgcaaatctacagaactacagtagaaacaaggacttttctctgtcagtgtccatgtgtcaatttagggaagaactcaggtactgtttgg

SEQ ID NO: 25720 - DNA, 360 bp, Homo sapiens
ccctcccggttcccgctctcgtttttgtttttggtcgggtaaggcgatgctgtagaggctggcgatctccagtcttcacgaatccgcacgtctctccattatccaccgcgcccgcccactgggccccggggcggccggcggccgggtctctcgggctccgcgtgtcgcccgagccgccgccggagcgagggtccctgccccctggggagcggtctccagccgcttcgaagccgccttcttccccctccgtgagtcagaaacaaaggcgggggggcggggggagcgcccgagctgcggctccgcgattcgccctttattctgaactcgcaacgtcagcggcccgcggatggagctgcgggg

SEQ ID NO: 25721 - DNA, 1545 bp, Homo sapiens
ctggtctggcccggaattttggcatggaggccggccttgagtgaaaccggagctacaaagaaggggagagtccgggagcgggagggcgcgagggaggagcggcggcgccggggcagctccgacgccctcccgcggggaaggagcccccgcggtgccgccgaggccccgacgcggggccgcccctcggctcgccgccccgcgcccgcgcccgctgggaatgatgaagaagaacaattccgccaagcggggacctcaggatggaaaccagcagcctgcaccgcccgagaaggtcggctgggtccggaaattctgcgggaaagggattttcagggagatttggaaaaaccgctatgtggtgctgaaaggggaccagctctacatctctgagaaggaggtaaaagatgagaaaaatattcaagaggtatttgacctgagtgactatgagaagtgtgaagagctccggaagtccaagagcaggagcaagaaaaatcatagcaagtttactcttgcccactccaaacagcccggtaacacggcacccaacctgatcttcctggcagtgagtccagaagagaaggaatcgtggatcaatgccctcaactctgccatcacccgagccaagaaccgtatcttggatgaggtcaccgttgaggaggacagctatcttgcccatcccactcgagacagggcaaaaatccagcactcccgccgccccccaacaaggggacacctaatggctgtggcttccacctctacctcggatgggatgctgaccttggacttgatccaagaggaagacccttcccctgaggaaccaacctcttgtgctgagagctttcgggttgacctggacaagtctgtggcccagctggcagggagccggcggagagcggactcagaccgcatccagccctccgcagaccgggcaagcagtctctcccgaccttgggaaaaaacagacaaaggggccacctacaccccccaggcacccaagaagttgacgcccacagagaaaggccgctgcgcctccctggaggagatcctatctcagcgggatgctgcctctgcccgcaccctccagctgcgggctgaggaacccccaacccctgccctccccaacccggggcagctgtcccggatccaggacctggtagcaaggaaactggaggagactcaggagcttctggcagaggttcagggactgggagatgggaagcgaaaggccaaggacccccctcggtctccgccggattctgagtcagagcagctgctgctggagacggaacggctgctgggagaggcatcatcgaattggagccaggcaaagagggtgctgcaggaggtcagggagctgagagacctgtacagacagatggacctgcagaccccggactcccacctcagacagaccaccccgcacagtcagtaccggaagagcctgatgtgagggcagggtggggtctggaacttgtcgggttggacagactcttatctccgtgttgctggataaagcttttttatttacctcaatcaaaaaaagaaaac

SEQ ID NO: 25722 - DNA, 2111 bp, Homo sapiens
cgggggagcggccgcgctgggccgggcgggcgggtggcgggggtgcgctcggggacccgggccgcgtgggcgccgggatggagggcgccaaggggcggggagcgggcgtgcgtgtgtgtgcgagtgcgaatgcgagggaggccggccttgagtgaaaccggagctacaaagaaggggagagtccgggagcgggagggcgcgagggaggagcggcggcgccggggcagctccgacgccctcccgcggggaaggagcccccgcggtgccgccgaggccccgacgcggggccgcccctcggctcgccgccccgcgcccgcgcccgctgggaatgatgaagaagaacaattccgccaagcggggacctcaggatggaaaccagcagcctgcaccgcccgagaaggtcggctgggtccggaaattctgcgggaaagggattttcagggagatttggaaaaaccgctatgtggtgctgaaaggggaccagctctacatctctgagaaggaggtaaaagatgagaaaaatattcaagaggtatttgacctgagtgactatgagaagtgtgaagagctccggaagtccaagagcaggagcaagaaaaatcatagcaagtttactcttgcccactccaaacagcccggtaacacggcacccaacctgatcttcctggcagtgagtccagaagagaaggaatcgtggatcaatgccctcaactctgccatcacccgagccaagaaccgtatcttggatgaggtcaccgttgaggaggacagctatcttgcccatcccactcgagacagggcaaaaatccagcactcccgccgccccccaacaaggggacacctaatggctgtggcttccacctctacctcggatgggatgctgaccttggacttgatccaagaggaagacccttcccctgaggaaccaacctcttgtgctgagagctttcgggttgacctggacaagtctgtggcccagctggcagggagccggcggagagcggactcagaccgcatccagccctccgcagaccgggcaagcagtctctcccgaccttgggaaaaaacagacaaaggggccacctacaccccccaggcacccaagaagttgacgcccacagagaaaggccgctgcgcctccctggaggagatcctatctcagcgggatgctgcctctgcccgcaccctccagctgcgggctgaggaacccccaacccctgccctccccaacccggggcagctgtcccggatccaggacctggtagcaaggaaactggaggagactcaggagcttctggcagaggttcagggactgggagatgggaagcgaaaggccaaggacccccctcggtctccgccggattctgagtcagagcagctgctgctggagacggaacggctgctgggagaggcatcatcgaattggagccaggcaaagagggtgctgcaggaggtcagggagctgagagacctgtacagacagatggacctgcagaccccggactcccacctcagacagaccaccccgcacagtcagtaccggaagagcctgatgtgagggcagggtggggtctggaacttgtcgggttggacagactcttatctccgtgttgctggataaagcttttttatttacctcaatcaaaaaaagaaaacaaaaatgaactcattgctcttgctgatgcctgaccccactacaacccttattgccccacctactttccatatgcccctcgtatgcccctcaggtttgaggaagtgaccccgcagcagtagcaggaagtttttacccagccagagagagagaaggcacggtaaagacacagtctgaccactccacacaccgcccgcccccaagacggcacagggagtccactgctgctcccaaggatacagtgggcttctaagcttagagcgggagggggatgaggatgttttctgttatgtcccaccccaggccttcagtttgagggtgaagtttcagctgcccaactctagttgtagggatgtggaggccagtgtcacctgtccgtgcacatggaagtgaaatttatcccagccctgaggaggatttgtggaattaaaatctccccagccagacactggcttct

SEQ ID NO: 25723 - DNA, 1703 bp, Homo sapiens
caggcttcctctgtttcccaagatgatctaaactaacagtctgggtggaggggctaaataattttatcctcctcacctcaccccaaccctcccctaggtaaaagatgagaaaaatattcaagaggtatttgacctgagtgactatgagaagtgtgaagagctccggaagtccaagagcaggagcaagaaaaatcatagcaagtttactcttgcccactccaaacagcccggtaacacggcacccaacctgatcttcctggcagtgagtccagaagagaaggaatcgtggatcaatgccctcaactctgccatcacccgagccaagaaccgtatcttggatgaggtcaccgttgaggaggacagctatcttgcccatcccactcgagacagggcaaaaatccagcactcccgccgccccccaacaaggggacacctaatggctgtggcttccacctctacctcggatgggatgctgaccttggacttgatccaagaggaagacccttcccctgaggaaccaacctcttgtgctgagagctttcgggttgacctggacaagtctgtggcccagctggcagggagccggcggagagcggactcagaccgcatccagccctccgcagaccgggcaagcagtctctcccgaccttgggaaaaaacagacaaaggggccacctacaccccccaggcacccaagaagttgacgcccacagagaaaggccgctgcgcctccctggaggagatcctatctcagcgggatgctgcctctgcccgcaccctccagctgcgggctgaggaacccccaacccctgccctccccaacccggggcagctgtcccggatccaggacctggtagcaaggaaactggaggagactcaggagcttctggcagaggttcagggactgggagatgggaagcgaaaggccaaggacccccctcggtctccgccggattctgagtcagagcagctgctgctggagacggaacggctgctgggagaggcatcatcgaattggagccaggcaaagagggtgctgcaggaggtcagggagctgagagacctgtacagacagatggacctgcagaccccggactcccacctcagacagaccaccccgcacagtcagtaccggaagagcctgatgtgagggcagggtggggtctggaacttgtcgggttggacagactcttatctccgtgttgctggataaagcttttttatttacctcaatcaaaaaaagaaaacaaaaatgaactcattgctcttgctgatgcctgaccccactacaacccttattgccccacctactttccatatgcccctcgtatgcccctcaggtttgaggaagtgaccccgcagcagtagcaggaagtttttacccagccagagagagagaaggcacggtaaagacacagtctgaccactccacacaccgcccgcccccaagacggcacagggagtccactgctgctcccaaggatacagtgggcttctaagcttagagcgggagggggatgaggatgttttctgttatgtcccaccccaggccttcagtttgagggtgaagtttcagctgcccaactctagttgtagggatgtggaggccagtgtcacctgtccgtgcacatggaagtgaaatttatcccagccctgaggaggatttgtggaattaaaatctccccagccagacactggcttct

SEQ ID NO: 25724 - DNA, 2480 bp, Homo sapiens
cgggggagcggccgcgctgggccgggcgggcgggtggcgggggtgcgctcggggacccgggccgcgtgggcgccgggatggagggcgccaaggggcggggagcgggcgtgcgtgtgtgtgcgagtgcgaatgcgagggaggccggccttgagtgaaaccggagctacaaagaaggggagagtccgggagcgggagggcgcgagggaggagcggcggcgccggggcagctccgacgccctcccgcggggaaggagcccccgcggtgccgccgaggccccgacgcggggccgcccctcggctcgccgccccgcgcccgcgcccgctgggaatgatgaagaagaacaattccgccaagcggggacctcaggatggaaaccagcagcctgcaccgcccgagaaggtcggctgggtccggaaattctgcgggaaagggattttcagggagatttggaaaaaccgctatgtggtgctgaaaggggaccagctctacatctctgagaaggaggtaaaagatgagaaaaatattcaagaggtatttgacctgagtgactatgagaagtgtgaagagctccggaagtccaagagcaggagcaagaaaaatcatagcaagtttactcttgcccactccaaacagcccggtaacacggcacccaacctgatcttcctggcagtgagtccagaagagaaggaatcgtggatcaatgccctcaactctgccatcacccgagccaagaaccgtatcttggatgaggtcagggggctcactgtggggagagggaggaacgctggggcagagggaacagctgtgacccactgaagggggaggattgtgcaggccccgtttactcgctcctccaccagctctacttctttaccgcccttttaaaagccctgatctctttctaccttctctccaagtctcatctgacacctcctcttccccgcttcatgatgggggagccagccttgggtcagcttaaagagcccccttcgtgtccagtaaatccccttgcccattcagaagcagtgaatggagtgggcacatgttcaggcctcgggatgctgggttgggacagcgagtcgtgaaagagcactcatgattcacagtacatctcttcaggtcaccgttgaggaggacagctatcttgcccatcccactcgagacagggcaaaaatccagcactcccgccgccccccaacaaggggacacctaatggctgtggcttccacctctacctcggatgggatgctgaccttggacttgatccaagaggaagacccttcccctgaggaaccaacctcttgtgctgagagctttcgggttgacctggacaagtctgtggcccagctggcagggagccggcggagagcggactcagaccgcatccagccctccgcagaccgggcaagcagtctctcccgaccttgggaaaaaacagacaaaggggccacctacaccccccaggcacccaagaagttgacgcccacagagaaaggccgctgcgcctccctggaggagatcctatctcagcgggatgctgcctctgcccgcaccctccagctgcgggctgaggaacccccaacccctgccctccccaacccggggcagctgtcccggatccaggacctggtagcaaggaaactggaggagactcaggagcttctggcagaggttcagggactgggagatgggaagcgaaaggccaaggacccccctcggtctccgccggattctgagtcagagcagctgctgctggagacggaacggctgctgggagaggcatcatcgaattggagccaggcaaagagggtgctgcaggaggtcagggagctgagagacctgtacagacagatggacctgcagaccccggactcccacctcagacagaccaccccgcacagtcagtaccggaagagcctgatgtgagggcagggtggggtctggaacttgtcgggttggacagactcttatctccgtgttgctggataaagcttttttatttacctcaatcaaaaaaagaaaacaaaaatgaactcattgctcttgctgatgcctgaccccactacaacccttattgccccacctactttccatatgcccctcgtatgcccctcaggtttgaggaagtgaccccgcagcagtagcaggaagtttttacccagccagagagagagaaggcacggtaaagacacagtctgaccactccacacaccgcccgcccccaagacggcacagggagtccactgctgctcccaaggatacagtgggcttctaagcttagagcgggagggggatgaggatgttttctgttatgtcccaccccaggccttcagtttgagggtgaagtttcagctgcccaactctagttgtagggatgtggaggccagtgtcacctgtccgtgcacatggaagtgaaatttatcccagccctgaggaggatttgtggaattaaaatctccccagccagacactggcttct

SEQ ID NO: 25725 - DNA, 1859 bp, Homo sapiens
ctggtctggcccggaattttggcatggaggccggccttgagtgaaaccggagctacaaagaaggggagagtccgggagcgggagggcgcgagggaggagcggcggcgccggggcagctccgacgccctcccgcggggaaggagcccccgcggtgccgccgaggccccgacgcggggccgcccctcggctcgccgccccgcgcccgcgcccgctgggaatgatgaagaagaacaattccgccaagcggggacctcaggatggaaaccagcagcctgcaccgcccgagaaggtcggctgggtccggaaattctgcgggaaagggattttcagggagatttggaaaaaccgctatgtggtgctgaaaggggaccagctctacatctctgagaaggaggcacccaacctgatcttcctggcagtgagtccagaagagaaggaatcgtggatcaatgccctcaactctgccatcacccgagccaagaaccgtatcttggatgaggtcaccgttgaggaggacagctatcttgcccatcccactcgagacagggcaaaaatccagcactcccgccgccccccaacaaggggacacctaatggctgtggcttccacctctacctcggatgggatgctgaccttggacttgatccaagaggaagacccttcccctgaggaaccaacctcttgtgctgagagctttcgggttgacctggacaagtctgtggcccagctggcagggagccggcggagagcggactcagaccgcatccagccctccgcagaccgggcaagcagtctctcccgaccttgggaaaaaacagacaaaggggccacctacaccccccaggcacccaagaagttgacgcccacagagaaaggccgctgcgcctccctggaggagatcctatctcagcgggatgctgcctctgcccgcaccctccagctgcgggctgaggaacccccaacccctgccctccccaacccggggcagctgtcccggatccaggacctggtagcaaggaaactggaggagactcaggagcttctggcagaggttcagggactgggagatgggaagcgaaaggccaaggacccccctcggtctccgccggattctgagtcagagcagctgctgctggagacggaacggctgctgggagaggcatcatcgaattggagccaggcaaagagggtgctgcaggaggtcagggagctgagagacctgtacagacagatggacctgcagaccccggactcccacctcagacagaccaccccgcacagtcagtaccggaagagcctgatgtgagggcagggtggggtctggaacttgtcgggttggacagactcttatctccgtgttgctggataaagcttttttatttacctcaatcaaaaaaagaaaacaaaaatgaactcattgctcttgctgatgcctgaccccactacaacccttattgccccacctactttccatatgcccctcgtatgcccctcaggtttgaggaagtgaccccgcagcagtagcaggaagtttttacccagccagagagagagaaggcacggtaaagacacagtctgaccactccacacaccgcccgcccccaagacggcacagggagtccactgctgctcccaaggatacagtgggcttctaagcttagagcgggagggggatgaggatgttttctgttatgtcccaccccaggccttcagtttgagggtgaagtttcagctgcccaactctagttgtagggatgtggaggccagtgtcacctgtccgtgcacatggaagtgaaatttatcccagccctgaggaggatttgtggaattaaaatctccccagccagacactggcttct

SEQ ID NO: 25726 - DNA, 1926 bp, Homo sapiens
cgggggagcggccgcgctgggccgggcgggcgggtggcgggggtgcgctcggggacccgggccgcgtgggcgccgggatggagggcgccaaggggcggggagcgggcgtgcgtgtgtgtgcgagtgcgaatgcgagggaggccggccttgagtgaaaccggagctacaaagaaggggagagtccgggagcgggagggcgcgagggaggagcggcggcgccggggcagctccgacgccctcccgcggggaaggagcccccgcggtgccgccgaggccccgacgcggggccgcccctcggctcgccgccccgcgcccgcgcccgctgggaatgatgaagaagaacaattccgccaagcggggacctcaggatggaaaccagcagcctgcaccgcccgagaaggtcggctgggtccggaaattctgcgggaaagggattttcagggagatttggaaaaaccgctatgtggtgctgaaaggggaccagctctacatctctgagaaggaggtaaaagatgagaaaaatattcaagaggtatttgacctgagtgactatgagaagtgtgaagagctccggaagtccaagagcaggagcaagaaaaatcatagcaagtttactcttgcccactccaaacagcccggtaacacggcacccaacctgatcttcctggcagtgagtccagaagagaaggaatcgtggatcaatgccctcaactctgccatcacccgagccaagaaccgtatcttggatgaggtcaccgttgaggaggacagctatcttgcccatcccactcgagacagggcaaaaatccagcactcccgccgccccccaacaaggggacacctaatggctgtggcttccacctctacctcggatgggatgctgaccttggacttgatccaagaggaagacccttcccctgaggaaccaacctcttgtgctgagagctttcgggttgacctggacaagtctgtggcccagctggcagggagccggcggagagcggactcagaccgcatccagccctccgcagaccgggcaagcagtctctcccgaccttgggaaaaaacagacaaaggggccacctacaccccccaggcacccaagaagttgacgcccacagagaaaggccgctgcgcctccctggaggagatcctatctcagcgggatgctgcctctgcccgcaccctccagctgcgggctgaggaacccccaacccctgccctccccaacccggggcagctgtcccggatccaggacctggtagcaaggaaactggaggagactcaggagcttctggcagaggttcagggactgggagatgggaagcgaaaggccaaggacccccctcggtctccgccggattctgagtcagagcagctgctgctggagacggaacggctgctgggagaggcatcatcgaattggagccaggcaaagagggtgctgcaggaggtcagggagctgagagacctgtacagacagatggacctgcagaccccggactcccacctcagacagaccaccccgcacaatattaaagccatgacagcaaacagcccctttctcctaaggttcctgatttgaagtggcaaaacaaggcagtggcatagtctcctgtcctatgtccttggcatgcagcctccacccagctctggctgcagagggccgcactccgcttgtaccgcaattcatgcacagtccagacttatacagcagccggcaaccctaagggcaggatgattccgagacacaccaaatctgtatgttgatgtgttgtcccaaatttatttctccagcctaaatttccctctctggcacttagagctaagtgtcaacttgacatctttacctgggtatctaacatgcatcttaaatgtactataaatgtaataaatgactaaataatgatcctcagtgaaccagcc

SEQ ID NO: 25727 - DNA, 2072 bp, Homo sapiens
caggcttcctctgtttcccaagatgatctaaactaacagtctgggtggaggggctaaataattttatcctcctcacctcaccccaaccctcccctaggtaaaagatgagaaaaatattcaagaggtatttgacctgagtgactatgagaagtgtgaagagctccggaagtccaagagcaggagcaagaaaaatcatagcaagtttactcttgcccactccaaacagcccggtaacacggcacccaacctgatcttcctggcagtgagtccagaagagaaggaatcgtggatcaatgccctcaactctgccatcacccgagccaagaaccgtatcttggatgaggtcagggggctcactgtggggagagggaggaacgctggggcagagggaacagctgtgacccactgaagggggaggattgtgcaggccccgtttactcgctcctccaccagctctacttctttaccgcccttttaaaagccctgatctctttctaccttctctccaagtctcatctgacacctcctcttccccgcttcatgatgggggagccagccttgggtcagcttaaagagcccccttcgtgtccagtaaatccccttgcccattcagaagcagtgaatggagtgggcacatgttcaggcctcgggatgctgggttgggacagcgagtcgtgaaagagcactcatgattcacagtacatctcttcaggtcaccgttgaggaggacagctatcttgcccatcccactcgagacagggcaaaaatccagcactcccgccgccccccaacaaggggacacctaatggctgtggcttccacctctacctcggatgggatgctgaccttggacttgatccaagaggaagacccttcccctgaggaaccaacctcttgtgctgagagctttcgggttgacctggacaagtctgtggcccagctggcagggagccggcggagagcggactcagaccgcatccagccctccgcagaccgggcaagcagtctctcccgaccttgggaaaaaacagacaaaggggccacctacaccccccaggcacccaagaagttgacgcccacagagaaaggccgctgcgcctccctggaggagatcctatctcagcgggatgctgcctctgcccgcaccctccagctgcgggctgaggaacccccaacccctgccctccccaacccggggcagctgtcccggatccaggacctggtagcaaggaaactggaggagactcaggagcttctggcagaggttcagggactgggagatgggaagcgaaaggccaaggacccccctcggtctccgccggattctgagtcagagcagctgctgctggagacggaacggctgctgggagaggcatcatcgaattggagccaggcaaagagggtgctgcaggaggtcagggagctgagagacctgtacagacagatggacctgcagaccccggactcccacctcagacagaccaccccgcacagtcagtaccggaagagcctgatgtgagggcagggtggggtctggaacttgtcgggttggacagactcttatctccgtgttgctggataaagcttttttatttacctcaatcaaaaaaagaaaacaaaaatgaactcattgctcttgctgatgcctgaccccactacaacccttattgccccacctactttccatatgcccctcgtatgcccctcaggtttgaggaagtgaccccgcagcagtagcaggaagtttttacccagccagagagagagaaggcacggtaaagacacagtctgaccactccacacaccgcccgcccccaagacggcacagggagtccactgctgctcccaaggatacagtgggcttctaagcttagagcgggagggggatgaggatgttttctgttatgtcccaccccaggccttcagtttgagggtgaagtttcagctgcccaactctagttgtagggatgtggaggccagtgtcacctgtccgtgcacatggaagtgaaatttatcccagccctgaggaggatttgtggaattaaaatctccccagccagacactggcttct

SEQ ID NO: 25728 - DNA, 1899 bp, Homo sapiens
ccctcccggttcccgctctcgtttttgtttttggtcgggtaaggcgatgctgtagaggctggcgatctccagtcttcacgaatccgcacgtctctccattatccaccgcgcccgcccactgggccccggggcggccggcggccgggtctctcgggctccgcgtgtcgcccgagccgccgccggagcgagggtccctgccccctggggagcggtctccagccgcttcgaagccgccttcttccccctccggacctcaggatggaaaccagcagcctgcaccgcccgagaaggtcggctgggtccggaaattctgcgggaaagggattttcagggagatttggaaaaaccgctatgtggtgctgaaaggggaccagctctacatctctgagaaggaggtaaaagatgagaaaaatattcaagaggtatttgacctgagtgactatgagaagtgtgaagagctccggaagtccaagagcaggagcaagaaaaatcatagcaagtttactcttgcccactccaaacagcccggtaacacggcacccaacctgatcttcctggcagtgagtccagaagagaaggaatcgtggatcaatgccctcaactctgccatcacccgagccaagaaccgtatcttggatgaggcttccacctctacctcggatgggatgctgaccttggacttgatccaagaggaagacccttcccctgaggaaccaacctcttgtgctgagagctttcgggttgacctggacaagtctgtggcccagctggcagggagccggcggagagcggactcagaccgcatccagccctccgcagaccgggcaagcagtctctcccgaccttgggaaaaaacagacaaaggggccacctacaccccccaggcacccaagaagttgacgcccacagagaaaggccgctgcgcctccctggaggagatcctatctcagcgggatgctgcctctgcccgcaccctccagctgcgggctgaggaacccccaacccctgccctccccaacccggggcagctgtcccggatccaggacctggtagcaaggaaactggaggagactcaggagcttctggcagaggttcagggactgggagatgggaagcgaaaggccaaggacccccctcggtctccgccggattctgagtcagagcagctgctgctggagacggaacggctgctgggagaggcatcatcgaattggagccaggcaaagagggtgctgcaggaggtcagggagctgagagacctgtacagacagatggacctgcagaccccggactcccacctcagacagaccaccccgcacagtcagtaccggaagagcctgatgtgagggcagggtggggtctggaacttgtcgggttggacagactcttatctccgtgttgctggataaagcttttttatttacctcaatcaaaaaaagaaaacaaaaatgaactcattgctcttgctgatgcctgaccccactacaacccttattgccccacctactttccatatgcccctcgtatgcccctcaggtttgaggaagtgaccccgcagcagtagcaggaagtttttacccagccagagagagagaaggcacggtaaagacacagtctgaccactccacacaccgcccgcccccaagacggcacagggagtccactgctgctcccaaggatacagtgggcttctaagcttagagcgggagggggatgaggatgttttctgttatgtcccaccccaggccttcagtttgagggtgaagtttcagctgcccaactctagttgtagggatgtggaggccagtgtcacctgtccgtgcacatggaagtgaaatttatcccagccctgaggaggatttgtggaattaaaatctccccagccagacactggcttct

SEQ ID NO: 25729 - DNA, 257 bp, Homo sapiens
ggacctcaggatggaaaccagcagcctgcaccgcccgagaaggtcggctgggtccggaaattctgcgggaaagggattttcagggagatttggaaaaaccgctatgtggtgctgaaaggggaccagctctacatctctgagaaggaggtgggtgcctcttgcctctaactctccgttttctcatagcccccactttgtcactccccaagggctcgcctagcttactccacccccgttttgttccaaaggcaagttca

SEQ ID NO: 25730 - DNA, 1656 bp, Homo sapiens
cgggggagcggccgcgctgggccgggcgggcgggtggcgggggtgcgctcggggacccgggccgcgtgggcgccgggatggagggcgccaaggggcggggagcgggcgtgcgtgtgtgtgcgagtgcgaatgcgagggaggccggccttgagtgaaaccggagctacaaagaaggggagagtccgggagcgggagggcgcgagggaggagcggcggcgccggggcagctccgacgccctcccgcggggaaggagcccccgcggtgccgccgaggccccgacgcggggccgcccctcggctcgccgccccgcgcccgcgcccgctgggaatgatgaagaagaacaattccgccaagcggggacctcaggatggaaaccagcagcctgcaccgcccgagaaggtcggctgggtccggaaattctgcgggaaagggattttcagggagatttggaaaaaccgctatgtggtgctgaaaggggaccagctctacatctctgagaaggaggtaaaagatgagaaaaatattcaagaggtatttgacctgagtgactatgagaagtgtgaagagctccggaagtccaagagcaggagcaagaaaaatcatagcaagtttactcttgcccactccaaacagcccggtaacacggcacccaacctgatcttcctggcagtgagtccagaagagaaggaatcgtggatcaatgccctcaactctgccatcacccgagccaagaaccgtatcttggatgaggtcaccgttgaggaggacagctatcttgcccatcccactcgagacagggcaaaaatccagcactcccgccgccccccaacaaggggacacctaatggctgtggcttccacctctacctcggatgggatgctgaccttggacttgatccaagaggaagacccttcccctgaggaaccaacctcttgtgctgagagctttcgggttgacctggacaagtctgtggcccagctggcagggagccggcggagagcggactcagaccgcatccagccctccgcagaccgggcaagcagtctctcccgaccttgggaaaaaacagacaaaggggccacctacaccccccaggcacccaagaagttgacgcccacagagaaaggccgctgcgcctccctggaggagatcctatctcagcgggatgctgcctctgcccgcaccctccagctgcgggctgaggaacccccaacccctgccctccccaacccggggcagctgtcccggatccaggacctggtagcaaggaaactggaggagactcaggagcttctggcagaggttcagggactgggagatgggaagcgaaaggccaaggacccccctcggtctccgccggattctgagtcagagcagctgctgctggagacggaacggctgctgggagaggcatcatcgaattggagccaggcaaagagggtgctgcaggaggtcagggagctgagagacctgtacagacagatggacctgcagaccccggactcccacctcagacagaccaccccgcacagtcagtaccggaagagcctgatgtgagggcagggtggggtctggaacttgtcgggttggacagactcttatctccgtgttgctggataaagcttttttatttacctcaatcaaaaaaagaaaac

SEQ ID NO: 25731 - DNA, 722 bp, Homo sapiens
agtccccgcgcggcgaggacggggcggcgggggcgcagggcctggagggaacctgggagcctctccgcgcccggccggcgcccctgccacttgcagccccggttgtttattcgggagcgggggaggggagcggggggagttcctcggagtgaaaacctttccgaagtgggagcgaacctggggcggccccccgccccccggccgcagccttcggaggagactgggccgccgaggcggtcgtgagagacggacggagaggaagcgccggctggaatctcctaaccgcccgcttctcatcttgtcctggggcagggacctcaggatggaaaccagcagcctgcaccgcccgagaaggtcggctgggtccggaaattctgcgggaaagggattttcagggagatttggaaaaaccgctatgtggtgctgaaaggggaccagctctacatctctgagaaggaggaaactctagttacgaatcagggagaacttcctacacatcaaagagaaaaacataatagtgaaagggtaagaggaataagacatccattgcttgtttgtatttgcccaaagagcagagtctgggggcaaaagcgtagttgatccttgcttttaggtacagagacagaggaaaggatggaatgacctcagcctaggatatctggtgtcctatgagtcaggaccatctgactggtcatggagccagctgtctcctgctgggaagg

SEQ ID NO: 25732 - DNA, 1758 bp, Homo sapiens
cgggggagcggccgcgctgggccgggcgggcgggtggcgggggtgcgctcggggacccgggccgcgtgggcgccgggatggagggcgccaaggggcggggagcgggcgtgcgtgtgtgtgcgagtgcgaatgcgagggaggccggccttgagtgaaaccggagctacaaagaaggggagagtccgggagcgggagggcgcgagggaggagcggcggcgccggggcagctccgacgccctcccgcggggaaggagcccccgcggtgccgccgaggccccgacgcggggccgcccctcggctcgccgccccgcgcccgcgcccgctgggaatgatgaagaagaacaattccgccaagcggggacctcaggatggaaaccagcagcctgcaccgcccgagaaggtcggctgggtccggaaattctgcgggaaagggattttcagggagatttggaaaaaccgctatgtggtgctgaaaggggaccagctctacatctctgagaaggaggtaaaagatgagaaaaatattcaagaggtatttgacctgagtgactatgagaagtgtgaagagctccggaagtccaagagcaggagcaagaaaaatcatagcaagtttactcttgcccactccaaacagcccggtaacacggcacccaacctgatcttcctggcagtgagtccagaagagaaggaatcgtggatcaatgccctcaactctgccatcacccgagccaagaaccgtatcttggatgaggtcaccgttgaggaggacagctatcttgcccatcccactcgagacagggcaaaaatccagcactcccgccgccccccaacaaggggacacctaatggctgtggcttccacctctacctcggatgggatgctgaccttggacttgatccaagaggaagacccttcccctgaggaaccaacctcttgtgctgagagctttcgggttgacctggacaagtctgtggcccagctggcagggagccggcggagagcggactcagaccgcatccagccctccgcagaccgggcaagcagtctctcccgaccttgggaaaaaacagacaaaggggccacctacaccccccaggcacccaagaagttgacgcccacagagaaaggccgctgcgcctccctggaggagatcctatctcagcgggatgctgcctctgcccgcaccctccagctgcgggctgaggaacccccaacccctgccctccccaacccggggcagctgtcccggatccaggacctggtagcaaggaaactggaggagactcaggagcttctggcagaggttcagggactgggagatgggaagcgaaaggccaaggacccccctcggtctccgccggattctgagtcagagcagctgctgctggagacggaacggctgctgggagaggcatcatcgaattggagccaggcaaagagggtgctgcaggaggtcagggagctgagagacctgtacagacagatggacctgcagaccccggactcccacctcagacagaccaccccgcacagtcagtaccggaagagcctgatgtgagggcagggtggggtctggaacttgtcgggttggacagactcttatctccgtgttgctggataaagcttttttatttacctcaatcaaaaaaagaaaaccgtaatgaccatccctgtactctgtaatatctagaataaaaaaatttaaggggggtcccggaccccatttcgccccttagcgagtccgtttacaatttactg

SEQ ID NO: 25733 - DNA, 2065 bp, Homo sapiens
agtccccgcgcggcgaggacggggcggcgggggcgcagggcctggagggaacctgggagcctctccgcgcccggccggcgcccctgccacttgcagccccggttgtttattcgggagcgggggaggggagcggggggagttcctcggagtgaaaacctttccgaagtgggagcgaacctggggcggccccccgccccccggccgcagccttcggaggagactgggccgccgaggcggtcgtgagagacggacggagaggaagcgccggctggaatctcctaaccgcccgcttctcatcttgtcctggggcagggacctcaggatggaaaccagcagcctgcaccgcccgagaaggtcggctgggtccggaaattctgcgggaaagggattttcagggagatttggaaaaaccgctatgtggtgctgaaaggggaccagctctacatctctgagaaggaggtaaaagatgagaaaaatattcaagaggtatttgacctgagtgactatgagaagtgtgaagagctccggaagtccaagagcaggagcaagaaaaatcatagcaagtttactcttgcccactccaaacagcccggtaacacggcacccaacctgatcttcctggcagtgagtccagaagagaaggaatcgtggatcaatgccctcaactctgccatcacccgagccaagaaccgtatcttggatgaggtcaccgttgaggaggacagctatcttgcccatcccactcgagacagggcaaaaatccagcactcccgccgccccccaacaaggggacacctaatggctgtggcttccacctctacctcggatgggatgctgaccttggacttgatccaagaggaagacccttcccctgaggaaccaacctcttgtgctgagagctttcgggttgacctggacaagtctgtggcccagctggcagggagccggcggagagcggactcagaccgcatccagccctccgcagaccgggcaagcagtctctcccgaccttgggaaaaaacagacaaaggggccacctacaccccccaggcacccaagaagttgacgcccacagagaaaggccgctgcgcctccctggaggagatcctatctcagcgggatgctgcctctgcccgcaccctccagctgcgggctgaggaacccccaacccctgccctccccaacccggggcagctgtcccggatccaggacctggtagcaaggaaactggaggagactcaggagcttctggcagaggttcagggactgggagatgggaagcgaaaggccaaggacccccctcggtctccgccggattctgagtcagagcagctgctgctggagacggaacggctgctgggagaggcatcatcgaattggagccaggcaaagagggtgctgcaggaggtcagggagctgagagacctgtacagacagatggacctgcagaccccggactcccacctcagacagaccaccccgcacagtcagtaccggaagagcctgatgtgagggcagggtggggtctggaacttgtcgggttggacagactcttatctccgtgttgctggataaagcttttttatttacctcaatcaaaaaaagaaaacaaaaatgaactcattgctcttgctgatgcctgaccccactacaacccttattgccccacctactttccatatgcccctcgtatgcccctcaggtttgaggaagtgaccccgcagcagtagcaggaagtttttacccagccagagagagagaaggcacggtaaagacacagtctgaccactccacacaccgcccgcccccaagacggcacagggagtccactgctgctcccaaggatacagtgggcttctaagcttagagcgggagggggatgaggatgttttctgttatgtcccaccccaggccttcagtttgagggtgaagtttcagctgcccaactctagttgtagggatgtggaggccagtgtcacctgtccgtgcacatggaagtgaaatttatcccagccctgaggaggatttgtggaattaaaatctccccagccagacactggcttct

SEQ ID NO: 25734 - DNA, 2132 bp, Homo sapiens
tttggaggagaaaggatcacaatgaactcctgaaacatacaacgtgctagtttctttcatgcctctgagctcttaagtcttcagagagagaggcaggcaggtataatgcagagaacacaggctttggagttagaacctgagttggaacctcactgtaatcagctacctgtgtggttccctgaagttgcatgtctccaactgtaaaatgaggcagaatcatgcctgccttgaagggctgctgtgaggaatgactaaaacaacatatttggtattgaatactcatcatttttagtattctggaaataagagaacaaattttattataaggcaagggggctgaagtgtgggactcagaggatgcagatggaggaggacagtcgtgccatggggagcatcctgtgtgcatcagatgcagtttaattgctgagagtccacaataccaaggaagagggcgcccctcaggaagcttatggtagagtggagaatacaggaaacaagtaacaaactaaatcacagaagaagaaacattcaagtcactatcaaaggaataagaaacagcacattcagtaggagggttcagtcaagagcagagggctttgccaggcgtggtggtgcacgcatgtaatcccagctactcgggaggctgaggcaggagaatggcgtgaacccgggaggcggagcttgcagtgagctcaaatcgtgccactgcactccagcctgggtgacagagcaagactctgtctctaaaaaaaagtacttctcattcaaggaaggcttgtagaggaaaatgaccacagcttgcatcttttaggcagtcattccgaaaatccctcctgatgacaggttccccactcattccccccttcctccacaggcttccacctctacctcggatgggatgctgaccttggacttgatccaagaggaagacccttcccctgaggaaccaacctcttgtgctgagagctttcgggttgacctggacaagtctgtggcccagctggcagggagccggcggagagcggactcagaccgcatccagccctccgcagaccgggcaagcagtctctcccgaccttgggaaaaaacagacaaaggggccacctacaccccccaggcacccaagaagttgacgcccacagagaaaggccgctgcgcctccctggaggagatcctatctcagcgggatgctgcctctgcccgcaccctccagctgcgggctgaggaacccccaacccctgccctccccaacccggggcagctgtcccggatccaggacctggtagcaaggaaactggaggagactcaggagcttctggcagaggttcagggactgggagatgggaagcgaaaggccaaggacccccctcggtctccgccggattctgagtcagagcagctgctgctggagacggaacggctgctgggagaggcatcatcgaattggagccaggcaaagagggtgctgcaggaggtcagggagctgagagacctgtacagacagatggacctgcagaccccggactcccacctcagacagaccaccccgcacagtcagtaccggaagagcctgatgtgagggcagggtggggtctggaacttgtcgggttggacagactcttatctccgtgttgctggataaagcttttttatttacctcaatcaaaaaaagaaaacaaaaatgaactcattgctcttgctgatgcctgaccccactacaacccttattgccccacctactttccatatgcccctcgtatgcccctcaggtttgaggaagtgaccccgcagcagtagcaggaagtttttacccagccagagagagagaaggcacggtaaagacacagtctgaccactccacacaccgcccgcccccaagacggcacagggagtccactgctgctcccaaggatacagtgggcttctaagcttagagcgggagggggatgaggatgttttctgttatgtcccaccccaggccttcagtttgagggtgaagtttcagctgcccaactctagttgtagggatgtggaggccagtgtcacctgtccgtgcacatggaagtgaaatttatcccagccctgaggaggatttgtggaattaaaatctccccagccagacactggcttct

SEQ ID NO: 25735 - DNA, 995 bp, Homo sapiens
tccctgctgctcttgcagcaggtactctcccagggtagggggacctgggaatgcctcagccacaggccacaggtcttatttcctgcctctccccagatcactgcctctcccagcagcagcagcagcgggagcagcagggaaagacatgtctttccctgctgctctgactcaggagcttctggcagaggttcagggactgggagatgggaagcgaaaggccaaggacccccctcggtctccgccggattctgagtcagagcagctgctgctggagacggaacggctgctgggagaggcatcatcgaattggagccaggcaaagagggtgctgcaggaggtcagggagctgagagacctgtacagacagatggacctgcagaccccggactcccacctcagacagaccaccccgcacagtcagtaccggaagagcctgatgtgagggcagggtggggtctggaacttgtcgggttggacagactcttatctccgtgttgctggataaagcttttttatttacctcaatcaaaaaaagaaaacaaaaatgaactcattgctcttgctgatgcctgaccccactacaacccttattgccccacctactttccatatgcccctcgtatgcccctcaggtttgaggaagtgaccccgcagcagtagcaggaagtttttacccagccagagagagagaaggcacggtaaagacacagtctgaccactccacacaccgcccgcccccaagacggcacagggagtccactgctgctcccaaggatacagtgggcttctaagcttagagcgggagggggatgaggatgttttctgttatgtcccaccccaggccttcagtttgagggtgaagtttcagctgcccaactctagttgtagggatgtggaggccagtgtcacctgtccgtgcacatggaagtgaaatttatcccagccctgaggaggatttgtggaattaaaatctccccagccagacactggcttct

SEQ ID NO: 25736 - DNA, 897 bp, Homo sapiens
  misc_feature (44)..(44): n is a, c, g, or t
gtgtaaattttctaatgtgatgtaaaataaagagagaaagaagnaaaaaggttaggcaacagcatgactttctgcaaaggcactgataatagctatgaggaataaatattgcagatggattaaatcaaagaatcgaatttcaaagccaaattagtcgtgaaaaggagggagaagcagaaatgaagaaaaaagaaccacagaagtaaaatcagcagcattgaaaagaaaatcatctgctgtttgaataaagacccaagatctttcattgttggatccccaaagccagtgcctggggtgagcagcaagtcccaagatcaagaaatcagaaggaactaatactttaactaattagtagtaatgaaaatttactagacatcaatgacaaatttacaaggcaaatttatttccaaagtacattcatatatatcacaggtaaaatgaggttttcacaaacaccattttaaacatagggtttatttgcaggagctatttttgtggcttagggaacaaatggttcattgaaacagaactttgctggtctggtttcaaagaattctattatataaaagattctgtagaacagatgggatcaaaagtccctgaacacagaacaggaatatcaggtaatgaaaatgttcttttggtataggattatggtttatgctttgaaagtattagtatgcaaggaactcaggcaagagcataaaagaggaagtaggaataatactttatgtttgaataggctttagactttccaaatacttacatcctactgaagcttggtagcaagtattatccttggtttattgatgaaaacatgcttccaagaaagatgctttacaagcgacaaaaactcaaaggggattacacagtaaaaggtatctgtctctctgtctg

SEQ ID NO: 25737 - DNA, 892 bp, Homo sapiens
  misc_feature (36)..(36): n is a, c, g, or t
gcggtacggtccttgcagatctcgaagagaaaggancctcgggcgaccttgcaacagcatgactttctgcaaaggcactgataatagctatgaggaataaatattgcagatggattaaatcaaagaatcgaatttcaaagccaaattagtcgtgaaaaggagggagaagcagaaatgaagaaaaaagaaccacagaagtaaaatcagcagcattgaaaagaaaatcatctgctgtttgaataaagacccaagatctttcattgttggatccccaaagccagtgcctggggtgagcagcaagtcccaagatcaagaaatcagaaggaactaatactttaactaattagtagtaatgaaaatttactagacatcaatgacaaatttacaaggcaaatttatttccaaagtacattcatatatatcacaggtaaaatgaggttttcacaaacaccattttaaacatagggtttatttgcaggagctatttttgtggcttagggaacaaatggttcattgaaacagaactttgctggtctggtttcaaagaattctattatataaaagattctgtagaacagatgggatcaaaagtccctgaacacagaacaggaatatcaggtaatgaaaatgttcttttggtataggattatggtttatgctttgaaagtattagtatgcaaggaactcaggcaagagcataaaagaggaagtaggaataatactttatgtttgaataggctttagactttccaaatacttacatcctactgaagcttggtagcaagtattatccttggtttattgatgaaaacatgcttccaagaaagatgctttacaagcgacaaaaactcaaaggggattacacagtaaaaggtatctgtctctctgtctg

SEQ ID NO: 25738 - DNA, 277 bp, Homo sapiens
gttgtattatttttttttctttgtgatgaatgtgaaaaggagacttcagcacacgcaacagcatgactttctgcaaaggcactgataatagctatgaggaataaatattgcagatggattaaatcaaagaatcgaatttcaaagccaaattagtcgtgaaaaggagggagaagcagaaatgaagaaaaaagaaccacagaagtaaaatcagcagcattgaaaagaaaatcatctgctgtttgaataaagacccaagatctttcattgttggatcccc

SEQ ID NO: 25739 - DNA, 864 bp, Homo sapiens
  misc_feature (44)..(44): n is a, c, g, or t
gtgtaaattttctaatgtgatgtaaaataaagagagaaagaagnaaaaaggttaggcaacagcatgactttctgcaaaggcactgataatagctatgaggaataaatattgcagatggattaaatcaaagaatcgaatttcaaagccaaattagtcgtgaaaaggagggagaagcagaaatgaagaaaaaagaaccacagaagtaaaatcagcagcattgaaaagaaaatcatctgctgtttgaataaagacccaagatctttcattgttggatccccaaagccagtgcctggggtgagcagcaagtcccaagatcaagaaatcagaaggaactaatactttaactaattagtagtaatgaaaatttactagacatcaatgacaaatttacaaggcaaatttatttccaaagtacattcatatatatcacaggatcacttcaccgaggaactgaacacgagcatttaacttgtgtgactagttatggcctggtctggatttccttctggttctcaagatgtcttacatgaaaaaagctctgtggcacattacatttgggagctgctgattaaagacatataagctcttttgctgaccatttttccagaaccttgactggaatgttaatatccattgtaaatctctaagtgggtaccagtgttctgcaaagcactctgggaaatgtttccctttcctttatcttttttagccagtcccaatgtattataacttgagtgaaacagagctgtcctatacgccactctcagcatactgagacatccaaaggaaatccaagtctggctgaaaaaatcacccaccttgaaaaacaacgtatgttgatcaagacagatgcctcttggagag

SEQ ID NO: 25740 - DNA, 788 bp, Homo sapiens
aaaaaaaaacacacacatacaagtgagacacgataactgaagaaaaatgaaacaaaacagaggcaaaaggaaaattaaatcgaaattatgcaaagtctaattacgctgtttaacctccaaggcattttcccatggaaataaccgcgtgattccaggcaagtgacttaccctgtctatgcctcagtttccctatctgtaaaatgaggctaatagggagtacccaccctttagggctgttgtgatcattaaaatgcatgaatatatggaaagtacttggaatagtacctggcacacaataggcattactgaatgtttattgacttttaatttgacaaaaaaatagtgtcacgttaccctcgattttctttggtttattcctaatggtacgtcatccatgtcagtagacacagacctacatcatcgctgttaccgacggcagttactgattccattgtgtaggatgtgccattgttttagacaatcccctatcatgggcacttaggtgatttccagtttttcacactcataaatcatgctgggatgaacattgttgcacacatacctgctcatattatctttattctcctagaggtggagaggtatgaatcactttctttcaacaaatagtgattgcatgcatgcttaccagaggccacatgttgtgcagggcagagacgtaacggggtcaggaacaggtagaatcaggtcatgggtatatggttcactgtaaaattcttccaatatgtccatacatttgaaattttttataataaaatactggggaaaaa

SEQ ID NO: 25741 - DNA, 777 bp, Homo sapiens
aaacagccacaggcagtatttgcagctcctcagagcgatgccctatcgatttttaagtgtcactgttaataacaacaacaactggcagtgatacaacatttttcttccaaaacaatcagagcattttatagagacaatttcatctatctctccatggctccagcaggagcaggagaatattccccacttcaagtaaagggcaggagaggccaaggggtttggccaaggtcactgtacaagtcagtgggatgccggtgctcctggtctctgcggccctctgcatccctggatggcatctccctaggacagaacttccctagcatagttcttttcagatgtttagcaaagttaaccttttaacaaaacacccatgggtggagggtggcatcaagcactattccaaaaagcatcctcttggcgggaagcccttagacatgaccactccttggcttagtcttcctcttcctgtgtgccatcaagaatcacacctaccagttgggcgtggtggctcatgcctgtaatcccagcactttgggaggctgaggcaggcagatcacctaaggttaggagttcgaggccagcctgggcaacatggtgaaacaccatctctgctaaaaatacaaaaattagccaggcatggcggcttgcacctattagtcccagcaactcaggggggctgaggcacgagaatcacttgaacccagaaggcagagggtgcagtgagccaagatcatgccactgcactccattctgggtgacagagtgagacactgtctc

SEQ ID NO: 25742 - DNA, 621 bp, Homo sapiens
cagcctcccaaagtgttgggattacaggcatgagccactgcacccagcctttcctcttttcttttccagtccatcaggcctcctgtggcctcaaagagccatgcctcccatgcccaccccacaccctgcaagacgcctttccagaatgcccactccttgcttgtgccttgtcctttaagatccttcccacgccttctagaagtcctctgccaactgcctcccaccttacggggcccttatgctttggcagaacacccagaggccagcacagccctgtgggttctgcttcttgggttggacccccacattccacatacccgggctcagccacacgtgtgggtgcccccatgaatggaacgccaagctgggtcccaggaggcgcccctgtggctgggaggcttgaggtacaaatgtggagtgaggccgccatgtccccacccacaggctgaccttggccttctctctctgcccagatggacttgcccaagccatgcaccatcccagctctgtaccctggtggtgtctgggaggggactttacacagaagcacagccctcctgagcctattgtggctgttcaagggcctgtaattggtcccaaagtcattatattttcttaata

SEQ ID NO: 25743 - DNA, 671 bp, Homo sapiens
gcttgaaccagggaggtggaggttgtagtgagccgagatcacgccactgcactccagcctgggcaaccgaacaagaactctgtctccaaaaaaacaaataaataaataaaattaaataaaaatttaaaaaggatgaattgtcccaaatttctgtctttcgaaagctaataatctattgggaaagataaataaaaggacacttatgcatactaatgtaagatgttaatgacgggaaactaggtataggttatgtgagaactccctgtactatcttcacaatttttctttttctttcttttttttttttttaattaatttattttgtaggtcagggatctctctgtgttgcccacactggtctcgaactcctgggctcaagcaatcctcctgcctcggactcccaaagtgctgggattacagatatgagccaccacacctagcccacaatttttctataaatctaataatattctaaaacaaaaagtttattttttgctgggcacggtggcacatgcatatattcccagttattcaggaggcaggtgcaggtaaggcaagaggatcatgcaaacccaggagtttgaggctgtagtgcactatgatcatgcctatgaatagccactgcaccccagcctgggcagcctagtgagaccccgtctctaaaaaaaaaa

SEQ ID NO: 25744 - DNA, 574 bp, Homo sapiens
ctggtctcgaactcctgacctcaggtgatccaccctcctcagcctcccacagtgcagggattacaggcgtgagccactgcgcctggccataatttttaaatggtgaaatagcatagcttttccaggaaacacttacaatttatgtgtatcattatcttctgaagagtaatacgttagcaggtttcttgaaatataaacttgtatattgataattgctctgtttgaagacacacaggacattttaaacattcactatttgtagttagctttcaaaataactagttctgatttgttatttataaactcctggaatgattaacttccagaagagtggctttgcaggaaagctgttagggaaatacatggcttgcattcttttgaattttttatataacacagcatttaaagcagttacctgctatgttattgcatttgccactgagtgtcatgatgcagtcagtgttccagctttgaaattagtgactttcagtgtaatgtaatgaagagagtagtaagaggaagggtttaactgagagagtaaaagacattagagaaccttccattttagtttctt

SEQ ID NO: 25745 - DNA, 342 bp, Homo sapiens
ggaaacattttgcagcatatctacttgctctgaactgaatggaagggccccagagctgcagcagtaaggttaatttattcacggattattaattattaattattatatgtgactctgtagtaacccaccatttataaaaaattgctttctgtttaaatttaggttagatacattgataaataacaattagagaacatattttacacatccaaccttaagggttcttattgttctttaaaactgattattataagatgtttggagcaagatttggcctaaaggccaattaatttgaaatacctcactaaaccaaagaagagttgatttagaaatggccaattt

SEQ ID NO: 25746 - DNA, 379 bp, Homo sapiens
cagggaggggcagtggaccaggaggaggggctgacggaacagcagaggcttctggggcttctatcctgccctaccctcccggttctgggagagtggtctggaccagaaagaataaaacagagaaaaattcttaatataatgaccttcaagaagagcaactacattttaccttgaaaactgcagaactgaaagcacagtctgtatagacaatgcaaatgatatgcaaacacgaatgcaaatggaccaggggccctgccacctcggaagcattcttaggccccatgtgcctccagtgggaggcagaggaaaacagacagagggcaattaggaaggtctccaggaactgcaggaggcttttttgcggggaggaggacaccat

SEQ ID NO: 25747 - DNA, 1010 bp, Homo sapiens
gaattttgagttgtgattagaacgtactactgaaatgttggcaggcctttgaggtgtggcagtgataaatttaaatagtttgtagattttgttactaggaattatatccacaaatgctttgactgcagatgagtagttgtcagttcaggaatataaagaactgctagagcttgtatgttaagtttatgactatttgtcaatagaaaggaaattaacttacttgtgtcttagggctggagagaattttgaaataatagtgtaaagcacactatggaatacagttcaaaagtagaaaataatatttgcttggaacaggttgctgggaattctgccctctttcaacttcagctttaaacccaaacgttgccatgtttaaaccaaggacagctgcacatcttacagcactcccaagttctatagagatttctggttgaagagagctctgactgactaggtggggtagaaaggtatatagaacttaggagtagatagtgaaaacctctgtatacatcgaggggaatcctttgtacatctatggacctctcaagagctctctctttttctctctctcaatctgtatggttgccttccttctaatattgtaccttggcttccacaaacactgaactttgtttcctaaactcaaggtgaccagtatgctctgagttccccttccctacactgtggactggcaattctagacagcaaactggggtcatcacagggcctttccactttatttccatatgtactgcattcactgttttccaatttctgaataccactgtttcatgtatttttgtccagtatttaagtggtttaaagtagaaaagtaattctggtccctgatgctccatcatggatgaaagcagaaatccctgtacccacttatagtctaatggaatacatcttccaatcataaaaccacatttcaaaaggataaaatatagttgagattttgctcatggttctaaaggggaacagaggacagaattatattgtacaatatg

SEQ ID NO: 25748 - DNA, 417 bp, Homo sapiens
taataacagtaccaacaaacattagaactagtttttttatgtttagtaggtttatcagttacctaataaatacattaaaatagcatactatgtatcagttaggaattgtaataaaaatcaagacatgtactctccacaaatttatttaaatttaatgaattatgagtcggggggcaagataaaatagctgtgaaatgtaattagaagaatatacaaacaacaaacaataacgtttcaaacctagaacgatgcaaggaaacatgcactatttgatattatgaagtcctgtgaagtccaaagatgagttacagaaagtgacttcaggggcccatggcacatgctttctgtgtgtatgtgcctgtgtgttaagtggtttcttcattgcccatttttgtattttccaccgcaccgggaaag

SEQ ID NO: 25749 - DNA, 259 bp, Homo sapiens
ccaacatcgtgccatccagcctgggcgacaagagcaaaactccatctcaaaaaaaaaattcatcaactcaaataatactcgattagaccacgtgtgtttcttttcttcttcttcttcttcttttttttttttaagatggaggttcactatgtcacccaagctggagtggagtggctcgatctcagctcactgcaactcccaagtagctgggattacagtcatgcaccaccacacccaggtaatttttgtatttttagta

SEQ ID NO: 25750 - DNA, 268 bp, Homo sapiens
ataactaaagtaaaatgctgatggagatcatttaagactgtctctatgctgttgattgcatgcttgtggctcataatcagaatgatgcaaagtaattgttagactgacttgccaaggctacattttgtgtcgttgccactgtcagcactttggtcccgctgtgctgcctgaagaacgcttgcctggcacctgttgggcactaatacacaactttccactgaatgtcatgggtaacttttgttctcatatcctcgcttgctatcttcac

SEQ ID NO: 25751 - DNA, 203 bp, Homo sapiens
tctgggggccagaagtccaaaataggtctattaaggctaaagtcaaggtgtcagcaggactgcatcccttctggaggttctggagagaatgtgttcccttgcctttcccagttgctaaagccacccctattctttggctcatggcccctaactgcatcttcaaagccagaagcaaagcatattcgaatctccctctgtgacct

SEQ ID NO: 25752 - DNA, 803 bp, Homo sapiens
ttacaggtgcccaccaccacaactggctaattttttgtatttttaatggagatggggtttcactatgttggccaaggttaaactcctgaccttgtggtgatccgcccgccttggcctcccaaagtgctgagattacaggtgtgagccaccgcgcctggcccttacatgctatttaaaagatttctttacactttcaaggtcaaattttgatatacagaatgggggaggggagctgaaggggccgttgtgccagagttcctaaaactggctgtcagtcagaatttctggggagagttggggtacgggtgtttgcccaggatgtaatttccaaggcccaccccagatatactgaattagaatccacagaggtgaggtctcagcatctgcattttaattacattccctaggttagtctgatgtagcttgtcagagaaccagcatttgggagccattgactccagtggcttctcatcacaattagaataaaataaaaaactccttgcctgagcctacaggaccttgtgtaatcttgccctagctttatctctaatctcttttccttgtttgtgcttctcttccccttgcttactatgcttcagcatggtagtcttctttcttttcctaaaacaagccgagtgcattcccaccattgggcctttgcacttgctgtttcctctgcctggaataccctgtccctagatattcaaatagatgattcattctgctcttagatcaaatgtctctttctcagggatgcctcttgacactcccagtctgaagtcccttacaccccatcattgtct

SEQ ID NO: 25753 - DNA, 457 bp, Homo sapiens
gattttaccccctaggggatacctggcagtgcctggagacattgagtggggctggcctctacgggatggacagtgaggttgctgctagctgctagacatcttacaggatggctcccacaacagagatccagcccaaatgtctgtagtgcagaggtggagaagcaccgatgttacctggtgctctgggacattttgcagttctccattctttttttttttttttttttttaaagggagtctcactgtgccactcaggctggtgtgcagtggcacaatctctactcactacaaccttcgtcttccaattcaagtgatactcccacctcagctacttaggaagctgaggcaggagaatcgcttgaacctgggaggcggaggttgcggtgagccgagatagcaccatggcactccagcctgggcaacaagagcgaaactccctctcaaaaaaaaatttttg

SEQ ID NO: 25754 - DNA, 462 bp, Homo sapiens
tgtcctatcgtcttaggttaagttccttggaaacagattctgggacagttatttgtgaacagaaagtttactggaaggaagcaaaattaagcagaggaagaaactaaactgtgatatagtcacaactatggtctcggctatgaagctgtgattgcctttcagatttgtcctgaattaaggaaaagcacttcaggtcattctgctagagatgcttgggaacaataccttgaaaaacatgaatccagtggacccatttgaggaggcccgctgtcaactctaaagccattgtaccactccatagcttggactgccgagcaactaaccatgaagtatgaagagaatctcaaagcaggttttcttgaaaaatgaaatgtgaacgaaaacttatctattccatttagtcacttcttattgatagagaagtttccatctgaatatctgaattaaacattcattaacaga

SEQ ID NO: 25755 - DNA, 406 bp, Homo sapiens
tgcctgtcattcaaaagcagctaccttttctaaggcagcgtcaaggagggcactggaggtactcaacacagtaatgattactttaccaagtccaaggcaattgtcaaatgtggcaaagaaaaacacttcattgggtttttcttagaaatgatttttcatccaatttcaatcaagatcttaatggaaattttgaaaattactcatgaggttatttaataaatccatccccattatttaaagaaagccatgtaaagacaacaaaatatgggccaagcacttgttcttgaacattattgctgagaaaaaaatatgcatttgtaaaatggggggggcagtattttgtttctgaagtgagatcaaatgtagaaaatattgcatatgtatagtaaaatgactgaaacactga

SEQ ID NO: 25756 - DNA, 979 bp, Homo sapiens
gatgacctgccttcttcatgactcaacccatgatttcaaaatgaaattggggaaatagtaggttaatgctttatcaaagaaaaatcaatttggtctgataggggactcaacggattagagatcacagactgaggttctagtcccagctttaccacaagcagccttgacctgccctcaacctgggtcccagtgcctcaatgaccctaggcttccatccctgatataggctttcagaagtcagtggaaagattattcatagtgcctaagaaatgcctgtttccaatatttgaccttgtggatctcaggctttggagagcctaataccaacacaccagcctgcagattttgtctttcccaaactgtgttccaggaatgggctcaaaacttcagggctgacgctgtcctcaccccagactattagagtcctgtgtgctcacagagaacatgaagaagagcaatgtgtagaagacttaactttctcataactgcagcagggactgaaaattgacctccatccaaatgaaaaataatgttgaggatgattctaaagctaaacctaggcttggtgggaaaaaaaaaaaaattgtgattaattggtgatctctgccacaagtgtggggctcagagtgtcagcacatgtacctcatgtttaccaagtctagaagagatttctctgaaaaggtaatgagctgtcttgaaaaatggggagttcaccatcactcaaagtgctcaagggaagactgggtgattactcatcttgactgttgctaagaaaatctgtgtcaactttggaggaaggtgtttggaatagatatgttgaggggctcttctaactcttacatgctaaagttgtttgagtaagatctacttacagcctgccatcgtaatgtgtggcttgtggtttgggcgatttcctatacttgcttctaaaatgaaacaacgtgtcctaaagtaaagtaaagtgcacttgaattagcaa

SEQ ID NO: 25757 - DNA, 925 bp, Homo sapiens
gatgacctgccttcttcatgactcaacccatgatttcaaaatgaaattggggaaatagtaggttaatgctttatcaaagaaaaatcaatttggtctgataggggactcaacggattagagatcacagactgaggttctagtcccagctttaccacaagcagccttgacctgccctcaacctgggtcccagtgcctcaatgaccctaggcttccatccctgatataggctttcagaagtcagtggaaagattattcatagtgcctaagaaatgcctgtttccaatatttgaccttgtggatctcaggctttggagagcctaataccaacacaccagcctgcagattttgtctttcccaaactgtgttccaggaatgggctcaaaacttcagggctgacgctgtcctcaccccagactattagagtcctgtgtgctcacagagaacatgaagaagagcaatgtgtagaagacttaactttctcataactgcagcagggactgaaaattgacctccatccaaatgaaaaataatgttgaggatgattctaaagctaaacctaggcttggtgggaaaaaaaaaaaaattgtgattaattggtgatctctgccacaagtgtggggctcagagtgtcagcacatgtacctcatgtttaccaagtctagaagagatttctctgaaaaggtaatgagctgtcttgaaaaatggggagttcaccatcactcaaagtgctcaagggaagactgggtgattactcatcttgactgttgctaagcttctaactcttacatgctaaagttgtttgagtaagatctacttacagcctgccatcgtaatgtgtggcttgtggtttgggcgatttcctatacttgcttctaaaatgaaacaacgtgtcctaaagtaaagtaaagtgcacttgaattagcaa

SEQ ID NO: 25758 - DNA, 570 bp, Homo sapiens
gatgacctgccttcttcatgactcaacccatgatttcaaaatgaaattggggaaatagtaggttaatgctttatcaaagaaaaatcaatttggtctgataggggactcaacggattagagatcacagactgaggttctagtcccagctttaccacaagcagccttgacctgccctcaacctgggtcccagtgcctcaatgaccctaggcttccatccctgatataggctttcagaagtcagtggaaagattattcatagtgcctaagaaatgcctgtttccaatatttgaccttgtggatctcaggctttggagagcctaataccaacacaccagcctgcagattttgtctttcccaaactgtgttccaggaatgggctcaaaacttcagggctgacgctgtcctcaccccagactattagagtcctgtgtgctcacagagaacatgaagaagagcaatgtgtagaagacttaactttctcataactgcagcaggggttggaggtcgccctccatctaattgccaccccatgatccccttgattataaagataaacaaaggaaaaaaggg

SEQ ID NO: 25759 - DNA, 496 bp, Homo sapiens
cagcttgcccactgcgcaggcgtgccccgaaagaccagcttgaacaatgaagaggacctcggcgttaggtgggaccgcaaccaacaaggactacagttcccagcgggcagagcgccaactccaagtgaaggtccggttgctgggcatgctaggagttgtagtgtcggccgcctttacaatctaggctgtttggaagatttagagcttctatttcttgaagatttattcgaccgttttaaaaaatctcgcaactgaagcagggttcagagtttactatctgcgtccttgagtagcctggggatcaactgctgcatattagcaaatttcgaagcgtcaaggccttcagtgagccctttctgtcatttgggtggtccaggcagctgaagagtgggatggaggcgggactaaaccaggctgggctggaggaaaagggcggggcctgcaagcctgtctcttggcagcaggctctggcagccaaaccgtccaagctagcgcc

SEQ ID NO: 25760 - DNA, 215 bp, Homo sapiens
ggtcgacgttacagggcaaaaaataaggggagccagtgagaggggaggcacgctggggtcttccttggtaacctgtcattacttgccctgtaacttcctcctgatctctcaagccccctttctcagttcccaggaactctgcccctatgggaggcaccacccacatgttgtcattgcccacaggatgtggcttttctctctgcaggaaaggcaga

SEQ ID NO: 25761 - DNA, 1594 bp, Homo sapiens
acgaagcccagtaattccttaagtaaaagaggaatgtgaagacttcttaaggggccgggcgcggtggttcacgcctgtaatccaagcactttggaaggccgaggatgaatcacctgaggacagaagttcaagaccagcctggtcaacatggtgaaaccccgtctctactaaatatacaaaaattagccgggcgtggtggcgggggcctgtaatcccagctactcgggaggccgaggcaggagaatcgcttgaacccgggagccggaaattgcagtgagccgagatcgcgccattgcgctccagcctgggcaacaacagcgaaacttcgtctcaaaaaaaaaaattattcgtaattggtaacattaacaaggaattatgactgggggggtcaggaaacctggattctggtccaagttctacctttatagttgtcaaatatatatatttgtttatttatacacatacatatgtcatatatgattaataattgtatatatttatggtgtacaacatgatgttttgaaatatatgtacattggccaccacacccggcccaatagatctcctcaattttaccttaccttgatgtatgattttaggcaagtcagttttcctcaccagagtttgataaatcaggggcaaggaggaagttaaacaagcagatgactgcagagggtccttccagttctaacatcaacggaagctaactacattccccactcaaatcatctctgcacatacagcccgcaggaagccctttgaaatgtatttaaccacctttctcgctctcagaatgatctcaacaagaacagctttgctttccttggagctctgcatcaatctaggaaggctgctttgtctcttcactacttgagcaggatggagagatatgagcgggaaagacagataagaaatctgagaaagccccacaaggtgggttgatagtgtgaagaacatgggctgaagcatccaaatcttggttcagctacttacagggtaaccttgagaaagttacttaaacttgtcagctcggacgggcgtggtggctcacgcctgtaatcccagcacattgggaggccgaggtggacggatcacgaggtcagatcgagaccaccctggctaacacggtgaaaccctgtctctactaaaaatacaaaaaaattagctgggcgcctgtagtcccagctactagggaggctgaggcaggagaatggcgtgaacccgggaggcggagcttgcagtgagccgagatcgagcctctgcactccagcctgggccacagagcaaaagaaaaacaaacttgtcagctccatttgctgtaagaattatatgagtaacatggaaatgcctgactagaccctgttcccgtttttacccttagcccgttcaaatcttcataaggataattagtagcagtttgagttctgggattcacactccaaactactgttttactcacccagctacccttttctgaaatactactgaaaaccatacctgtatcagtttacctccattgttttacttgaagtgaattcctggaccatcagacattagaccaaggcaaaaaaaataaaaataatcaatcaaccct

SEQ ID NO: 25762 - DNA, 1775 bp, Homo sapiens
  misc_feature (27)..(27): n is a, c, g, or t
  misc_feature (1389)..(1389): n is a, c, g, or t
ttcgtcccgggcggtgcgttccactgntctggggccggcgccgcgcccagtcccgcttcgggccgcaagccccaccgctcccctccccgggcaggggcgccgcgcagcccgctcccgccgccacctcctcccctgccgccctcctagccggcaggaattgcgcgaccacagcgccgctcgcgtcgcccgcatcagctcagcccgctgccgctcggccctcggcaccgctccgggtccggccgccgcgcggccagggctccccctgcccagcgctcccaggccccgccacgcgtcgccgcgcccagctccagtctcccctccccggggtctcgccagccccttcctgcagccgccgcctccgaaggagcgggtccgccgcgggtaaccatgcctagcaaaaccaagtacaaccttgtggacgatgggcacgacctgcggatccccttgcacaacgaggacgccttccagcacggcatctgctttgaggccaagtacgtaggaagcctggacgtgccaaggcccaacagcagggtggagatcgtggctgccatgcgccggatacggtatgagtttaaagccaagaacatcaagaagaagaaagtgagcattatggtttcagtggatggagtgaaagtgattctgaagaagaagaaaaagcttcttttattgcagaaaaaggaatggacgtgggatgagagcaagatgctggtgatgcaggaccccatctacaggatcttctatgtctctcatgattcccaagacttgaagatcttcagctatatcgctcgagatggtgccagcaatatcttcaggtgtaacgtctttaaatccaagaagaagagccaagctatgagaatcgttcggacggtggggcaggcctttgaggtctgccacaagctgagcctgcagcacacgcagcagaatgcagatggccaggaagatggagagagcgagaggaacagcaacagctcaggagacccaggccgccagctcactggagccgagagggcctccacggccactgcagaggagactgacatcgatgcggtggaggtcccacttccagggaatgatgtcctggaattcagccgaggtgtgactgatctagatgctgtagggaaggaaggaggctctcacacaggctccaaggtttcgcacccccaggagcccatgctgacagcctcacccaggatgctgctcccttcttcttcctcgaagcctccaggcctgggcacagagacaccgctgtccactcaccaccagatgcagctcctccagcagctcctccagcagcagcagcagcagacacaagtggctgtggcccaggtacacttgctgaaggaccagttggctgctgaggctgcggcgcggctggaggcccaggctcgngtgcatcagcttttgctgcagaacaaggacatgctccagcacatctccctgctggtcaagcaggtgcaagagctggaactgaagctgtcaggacagaacgccatgggctcccaggacagcttgctggagatcaccttccgctccggagccctgcccgtgctctgtgaccccacgacccctaagccagaggacctgcattcgccgccgctgggcgcgggcttggctgactttgcccaccctgcgggcagccccttagttgaccacggcatgtttgagaatttgaacacagccctcactccaaagctccaggccagccgctccttcccccacttgtccaagcccgtggcccccggctctgcccctctgggctctggtgagcctggggg

SEQ ID NO: 25763 - DNA, 2891 bp, Homo sapiens
  misc_feature (27)..(27): n is a, c, g, or t
  misc_feature (1389)..(1389): n is a, c, g, or t
ttcgtcccgggcggtgcgttccactgntctggggccggcgccgcgcccagtcccgcttcgggccgcaagccccaccgctcccctccccgggcaggggcgccgcgcagcccgctcccgccgccacctcctcccctgccgccctcctagccggcaggaattgcgcgaccacagcgccgctcgcgtcgcccgcatcagctcagcccgctgccgctcggccctcggcaccgctccgggtccggccgccgcgcggccagggctccccctgcccagcgctcccaggccccgccacgcgtcgccgcgcccagctccagtctcccctccccggggtctcgccagccccttcctgcagccgccgcctccgaaggagcgggtccgccgcgggtaaccatgcctagcaaaaccaagtacaaccttgtggacgatgggcacgacctgcggatccccttgcacaacgaggacgccttccagcacggcatctgctttgaggccaagtacgtaggaagcctggacgtgccaaggcccaacagcagggtggagatcgtggctgccatgcgccggatacggtatgagtttaaagccaagaacatcaagaagaagaaagtgagcattatggtttcagtggatggagtgaaagtgattctgaagaagaagaaaaagcttcttttattgcagaaaaaggaatggacgtgggatgagagcaagatgctggtgatgcaggaccccatctacaggatcttctatgtctctcatgattcccaagacttgaagatcttcagctatatcgctcgagatggtgccagcaatatcttcaggtgtaacgtctttaaatccaagaagaagagccaagctatgagaatcgttcggacggtggggcaggcctttgaggtctgccacaagctgagcctgcagcacacgcagcagaatgcagatggccaggaagatggagagagcgagaggaacagcaacagctcaggagacccaggccgccagctcactggagccgagagggcctccacggccactgcagaggagactgacatcgatgcggtggaggtcccacttccagggaatgatgtcctggaattcagccgaggtgtgactgatctagatgctgtagggaaggaaggaggctctcacacaggctccaaggtttcgcacccccaggagcccatgctgacagcctcacccaggatgctgctcccttcttcttcctcgaagcctccaggcctgggcacagagacaccgctgtccactcaccaccagatgcagctcctccagcagctcctccagcagcagcagcagcagacacaagtggctgtggcccaggtacacttgctgaaggaccagttggctgctgaggctgcggcgcggctggaggcccaggctcgngtgcatcagcttttgctgcagaacaaggacatgctccagcacatctccctgctggtcaagcaggtgcaagagctggaactgaagctgtcaggacagaacgccatgggctcccaggacagcttgctggagatcaccttccgctccggagccctgcccgtgctctgtgaccccacgacccctaagccagaggacctgcattcgccgccgctgggcgcgggcttggctgactttgcccaccctgcgggcagccccttaggtaggcgcgactgcttggtgaagctggagtgctttcgctttcttccgcccgaggacaccccgcccccagcgcagggcgaggcgctcctgggcggtctggagctcatcaagttccgagagtcaggcatcgcctcggagtacgagtccaacacggacgagagcgaggagcgcgactcgtggtcccaggaggagctgccgcgcctgctgaatgtcctgcagaggcaggaactgggcgacggcctggatgatgagatcgccgtgtaggtgccgagggcgaggagatggaggcggcggcgtggctggaggggccgtgtctggctgctgcccgggtaggggatgcccagtgaatgtgcactgccgaggagaatgccagccagggcccgggagagtgtgaggtttcaggaaagtattgagattctgctttggagggtaaagtggggaagaaatcggattcccagaggtgaatcagctcctctcctacttgtgactagagggtggtggaggtaaggccttccagagcccatggcttcaggagagggtctctctccaggactgccaggctgctggaggacctgcccctacctgctgcatcgtcaggctcccacgctttgtccgtgatgcccccctaccccctcactctccccgtctccatggtcccgaccaggaagggaagccatcggtaccttctcaggtactttgtttctggatatcacgatgctgcgagttgcctaaccctccccctacctttatgagaggaattccttctccaggcccttgctgagattgtagagattgagtgctctggaccgcaaaagccaggctagtccttgtagggtgagcatggaattggaatgtgtcacagtggataagcttttagaggaactgaatccaaacattttctccagccggacattgaatgttgctacaaagggagccttgaagctttaacatggttcaggcccttggtgtgagagcccagggggaggacagcttgtctgctgctccaaatcacttagatctgattcctgttttgaaagtcctgccctgccttcctcctgcctgtagcccagcccatctaaatggaagctgggaattgcccctcacctcccctgtgtcctgtccagctgaagcttttgcagcactttacctctctgaaagccccagaggaccagagcccccagccttacctctcaacctgtcccctccactgggcagtggtggtcagtttttactgcaaaaaaaaaaaa

SEQ ID NO: 25764 - DNA, 820 bp, Homo sapiens
gtactcagaaggctgaggtaggattgttagaggccagcctgggcaccacagggagaccccatctctaaaatttagccaggaaccatggctcatgcctgtagccccaggaatttgggaggctgagtggggaggatcgcttgaggtcaggagtttgagaccagcctgggcaacatagggagacctaaaaaaattaattgggcatctgtagtcccagctactcaggcggctgagctgagaggatggcttgagtccgagagattgagggtgcagtgagctgtgatcataccactgcactccagcctgggcggcagtgagacactatctgaaaaaagtttaaaaattttaaaaaagaaggaactgcccctgaggtaagaaccaagggagggcctcccagaggtcaggtggaaaaagttttaggaaggaggaagtagtcaacagggttacctgttgcaaagtacttaagtaatatgaggcctgatagtggtaaacttgactaccgttggatttcactagtgggaaaggaagtctaattaaaatgcactcaagagactaacagtcgcaggcatgaaatacaatacaggtacatggttttttattatgtgtgcatctgcttcagtaataggtgtgaattactcatttggatcattaggagtttcaaaatctagttaaatgactagatttttgttgatgtaaattctgtcattctgaactgcagggattgtcagtaacttaactgcaaactaaactggtgataattatggtaaaattgcaagacgagcaataaatctcaaccaacttgagagaacactgataaaaaaaa

SEQ ID NO: 25765 - DNA, 421 bp, Homo sapiens
cgtctcaaaaaaaagttttgtaattttgtaaaatggttacatggcaccaaagcgaaaactacaaaaaaggtgcattctgagacgtcagagggaaatgtgtcaggctccccgtccgcagcgccgtgcggtcgttcagaaatttgcattcccataagcattgtgggagcaccgtctcccgagacttgccagcacagtgtggtgtgaaggttggacgtgccactgtgatgtgtgagaaacacatcagtcctctgtatcgggggtccacgccgtggatccagccaaccgtaggttggaaatgttcaggtaaaaatgcactgaacacgcgcggacattttttattgacacagcgttcacgttgtattggtcatgagtcaccgagagctgatttcaggtatgagggagggtgtgcttaggctctgtg

SEQ ID NO: 25766 - DNA, 1283 bp, Homo sapiens
caaataatgatgtctctttttaaagatggagggagtgctaaagttgctgaaagtaggatcagatttcaagaagcctctatgagagatctgcttcccatcacactgtttctccatgtcctggacatagttcattcaactcttacatcttgatgtacatagactggtatctctaggtgataaaaagataagacaggaatttgtgagaaacagataaatatataagtataaaacagtataatagaagattaatagaggtttaaacaaagtgttgtggtgctgtgtagacaaaggaatatgtgaaaggtaattcaagagcaatattaaaggaagccttgaagaattaaatattgacagactgagatgaggaaaaatgtgttatagtctgagggaattgttggtttttccagggacctataagtaatagtccagtagtgggggtgagatgggatcataatgaaagttaaaatggaaaatatagcttggggtgagctaatggctgaccttgaatgccatgttaagagtttgaacttttattctataaacaggaactattgaaggcttctgagaagagtagggacatgattagagttgtaattttagatggtaactgacagcagtaggagagttttacaagagagaaatcagatgtgtagatttttgagagaatcatatgtgtagattcatgtcaccatcacaataatcaagatacagaactcttccaccactaaaaaactccttcatgcaatccctctatagctacacatccccttccctgaacattggcaacctctaatctgttcaccatctgtgtattttattatttcaagaatgttatataaatggaattatgcagtatgtaactttttgtggttggcttttttcccttgaggtccgtccaagttgtcgtatgtatcagtacatcctttttatttctgtgtggtattccgcattatggatgtaccacaatttaaccattcatctgttaaaggatatctggagccgggcgcggtggctcacacctgtaatcccaacagtttgggaggccaaggcgagtggatcatttgaggtcaggagttcaagaccagcctggccaatatggtgaaaccccatctgtactaaaaatacaaaaattagccaggcagtagtggcacacacctgtaatcccagctactcgggagacaaaagcaggagaatcgcttgagcctgggagacggaggttgcggtgagccaagatcataccactgcaccccagtctgggtgacagaatgagaccctatctcaaa

SEQ ID NO: 25767 - DNA, 480 bp, Homo sapiens
ggccctgtgatgactgtgaagattgtttgcttatcatgctccaatgaccccttcttgactgtatttctgatgaaatatagagggttatacaaaagagagaggaggaggagaaggaggaggtgggagaagagaagaaggaactggatggcgaaggaagctgtgtttgggattaaaatagttgctgctggccaggcacagtggctcacacctataatcccagcactttgggaggccaaagcatgcagataacagggtcaggagtttgagtccaggctggccaatacagtgtaactccgtctctactaaaaaaaaaaaaaaaatacaagaattagctgggcttggtggcgggtgcctgtaatcccagctacttgggaggctgaggcaggagaattgcttgaacctgggaggccgaggttgcagtgagccaagatgacgccactgtactccagcctgggcgacagagtgagatgctgtctccca

SEQ ID NO: 25768 - DNA, 189 bp, Homo sapiens
ttttcgtatttattcttacctcaaggctagaatgtaagtactgttaatactattcccatcttacaaatgaagaaattgaggcatggtggggttaaataacatctcaaaggttcacttaatcaggaaatggtaaaaccattatttgaaccagttatattttatggtgcatctgttattaatttctccatc

SEQ ID NO: 25769 - DNA, 488 bp, Homo sapiens
tccccttgcaagtttaaactcctaagggtctggcagaaccccctgagcatattcaatttcctgttataaattctgtactctactggttacctcactgtcaaccttcaaaaacctcatgttcatttttgattccatgtctttgaggttatcctggatgctagaatacatttcctcttcactactgcctatttaaatgaatttccccaaaaggtttgcaaacttagttgaactcaagcagtacaggtcagaatgtaacctcaggactttggaaggcccaagtgaaaggcttgcctgaggccaggagttcaagaccagccaggccaacattttgaaactctgtccctactgaaaatacataaaattagccgggcatggcagtgcgcgcctgtaatcccagctacttgggaggttgagacaggagaatcacttgaacccgggagatggaggttgcagtgagccaagatcacgccactgtactccagctgggg

SEQ ID NO: 25770 - DNA, 469 bp, Homo sapiens
acttcagcgttcatcatcggacagttgtttcaatgaactgtggttcatctagacaatggaatgcatagcccttaaaaatattactgtggatctacatttactgaaatggaaagattcccatactatgggatggtatgataagcatgatataaagttctgaaattatagtgctattaaacttttttaatacattaggatttaaacttttatgtaccaatatcagaacaaaaggccataaaaagattaaaatataatgacaagccgagaatagattacatttctattatgatcactggtgtattttcttcacaacacttacatccacttgaattatatatattttttgttttttattatctttcattctcactaacctaaagtgagggaatgtaagtttactgttgcacaccagaaccttgaacatcatgagtatttgttgcataaattatgaataaattccacttctgca

SEQ ID NO: 25771 - DNA, 441 bp, Homo sapiens
gaaaaaatctaactctatgcattttccatgttgctagatacttagttatatttatttatcgattcatttatgtattttgttttgttttgtttttttgagacagagtctcactctgtcacccagtggcacgatctcggctcactgcagccctgcctcctgggttcaagcgattcttttgccccagcctcccgagtagctgggagtacaggtgcacgccaccatgcccagctaatttttgtatttttagtagagatggggtttcaccatattggccagactggtcttgaactcctgacctcgtgatctgccctcctcggcctcccaaagtgctgggattacaggcgtgagccactgcgcctggctcctgctagatttttggtacaaatgtaataatgtatgtccattcatgataattgggaaaatgcaaaaaaaatagaaata

SEQ ID NO: 25772 - DNA, 551 bp, Homo sapiens
ggtgacattgaatataagataaagtaaatatgtggttaatgtattttcctcattagccttttaccctaatgagtacataggggtcgcagttgcagggtcaggagagggatggttgattttgtgctgcctttgtgcttcatccaataggcaggttgtaatcggtgcctgtcagtgtgatatttgacagactctggccttgcaggtgaggttcagctttcgttcataggcccggtttctattacccatatggccaagatgcagccattttagacaatttttttttcttcagactttccttattttctgacacctatcaagaaagtaaatttgaccaggcgtggtggctcacgcctgtaatcccaacactttgggaggctgaggtgggtggatcacctgaggtcaggagtttaggaccagcctggccaacatggtggaaccccatctctattaaaaatacaaaaattagccaggcatggtggtgcacgcctgtgatcccagctactagggaggctggggcaggagaatcgcttgaacctgagagatggattttg

SEQ ID NO: 25773 - DNA, 418 bp, Homo sapiens
gagatacctgcggagggacctgtggagggactcctgtgtgaagtggtagttgacgctgcaatgcatcactttgcagttttgtattcttcttcacctaacttttttatgcctcactttagctgtcctgggttgatacagtctaaatagtccttgcctcaagctctaattttttgggaatctggtatcaaacacacatgaatctggattgagaaaaacacaatcattcactcctaattagatactcctgtcttcatataataaagcatttaaaaaaaaaacaggtacacctacatccagattcaaattttcagaaaatgtattcactggaaaaataggcaaacactctgcttacatggcaagtaggcagaattagtatccactttgactatacatcttcctgagagagagaggaagagag

SEQ ID NO: 25774 - DNA, 331 bp, Homo sapiens
gcgatgttttattttttttccccctttctctttctaggtattttagtgagcacttgggggagactattggagagatgttagccagatatcattttatctatgaaacctagagctattcttactgagattttttgataggattctttttgaaatgtgatctattacttcaattctctttacagttgcataatggataagtttaggataagtcagcatcatcacttttggaataaattatcgtgatttgctgtagattcaatcacagattagtttgtaggcctaaactctaaatgcacactgacctttccattactttgaaacttgatttctt

SEQ ID NO: 25775 - DNA, 457 bp, Homo sapiens
ccatggtccaggtgctgatgagaagagaaaaaggtaccagttctccccagattaccagaggaagtaactcttctgctctcccaatacaaaaccctcgccagtgtgcctgagcatggcctggcactgatacttgccaacatgccacagggtgaattttggaatcacggggcctgatggcctgcacctgagccacagaatatatgacattaccattatcatagggagagtgactgtgacatccactgtgctttgagtgtttgtgtcccctccaaaagtcatgttgaggccaggtgcagtggctcaacaaatcgcagcactttgagaagccaagaacaaatcccagcactttgggaggccaagcacaagtcccagcattttgggaggctggggcgggaggatcacttgaggtcaggagttcaagatcagcctggccaatatggtgaaaccccgtctctac

SEQ ID NO: 25776 - DNA, 431 bp, Homo sapiens
gtaagtgtttggggcatttctttttctctgttctttcccttccttctccacacatctatcccaaggcacaggcattttattttgcattttggacctgctgtctgtttgacagtgtcctcttttgatttatttattattgttgtttgcaaagaagagggaaattttgaagcatgaacttgctgtgctaccttgatttggaggtctcctggcccagtgtggaaaaagttaaaatcatctgacatatgtttatatatatttaagcatctcagttggcttcatttgtgcaatgaggtcccaagatccactcaaactcctacttacatacaggaaagaaaaacatctgctgctttgactaaaagttcctcctggccttccctgtgaaactcaggtgaaacctccagccaacagaattgtaacagagtcattctatt

SEQ ID NO: 25777 - DNA, 358 bp, Homo sapiens
gtattttttagtagagacgaggtttcactgtgttagccaggatggttcgatctcctgaccttgtgatccacccgcctcggcctcccaaagtgctgggattacaggcatgagccacggcacccggccggccagcattcttgtcttgttcctgatcatagatgaaaatagtttttcatcattgagtgtgatattagatttgggctggtcatatatggctttattatgttaaggtgcatttcttctctatatctaattgtttgagagttgttaatcataaaagaatgttgaattttgtcaaatgctttttatctattgatactatcacatgatttttattcttcattttattaatgtggtg

SEQ ID NO: 25778 - DNA, 425 bp, Homo sapiens
tttcttcaccacagatcagtgtagcctgttttagaacttcatataaatggaactgtacatacgtattcttctttgttaaggcttctttcatttagtacatttttgagattcataacttttgttgtgcacattagtaattcattcctttttattgttaatatccaattttgagcatatggtacagtttgtttatccattctcctgttaataggtccttgtgatgtttacagtttgggattattatgaaaaaaagctgcaatagccattctcataagtgttttcaggaacgcttgctttcatatttatttatttatgtatttcttgcatcaaagtctcgatctttcaccaggctggagtgcagtggcacgacctcagctcactgcaagctccgcctcctgggttcaagtgattcacctgccgcagcc

SEQ ID NO: 25779 - DNA, 224 bp, Homo sapiens
ggaaatggaagagtcattggagggaggggcagttttttagacccagacatgtccttggcaatcataatggtctcctggtgctgttctcaggagtcagacatgagtcctggggagagtagaggggctgtcagtaagagcccaaagagctgttccactgaacagtctgtgtcttatctgagcatacgcagtcttgttctgaagttaggtaagaaaggcatttgtcc

SEQ ID NO: 25780 - DNA, 354 bp, Homo sapiens
gggtttcactttcgagcttgccagatgtagaaaatgctggagaatggagtactatgaggaccattagaagatctttcaaggccggacgcagtggctcacccctgtaatcccggtactcttggaggccgaggcaggtggatcacttgagcgcaggagtttgagaccagcctgggcaacatggcgaatccccatctctactaaaaatacaaaaattagccaggtgtggtgtttagcgcctgtagtcccagctgctcaggaggctgaggtgggaggatctgcttgagctcaggaagtcgaggctgcagtgagctgagatcacgccactgcactccagcctaggcgcctagtgaaacc

SEQ ID NO: 25781 - DNA, 171 bp, Homo sapiens
ccatattgcgttttcaccgcattctgagatatgatgagatgtctcaagaagcacttatggattatttgagttgttagctgaactagccaatgtttctccttatttttatttggtttttcatgaaatattatttttacttggaagaatgacagataaactgtatttcttatg

SEQ ID NO: 25782 - DNA, 875 bp, Homo sapiens
tctgtctcccaggttcaagtgattctcctgcctcggcctcccaagtagctgagtccacaggcacgcaccaccatgctcggctaattttttgtatttttagtagagacgtggtttcaccatgttgggcaggctggtctcgaactcctgacctcaggtaatccacctgcctcggcctcccaaagtgctgggattacaggcgtaagccactgtgcccggccagcgaatttgcactcccaacagagtgtgtgtcagcgttcattttcccttaacatccttcctgacccttgatacattccagctcttcagtttggggcaatcagatagtcatgcgttattttcatttccctgaccatcccatgaacttgaaacagagaaaagtatttcacacaagaggagagagagaagtgagagtgggtgccaggttaatgacaactataggttaccatcacagaattatgatatttctttccatcttaggttaaagttattcgtataggactgaaaaacactttctttagagcgtgttgctttcctttccttagtgggttttgaagggatttaggacatagaaggcttctgaaccatttgatggaagttctgagtagaggagagtgaggaaggagggaggccgggcaaggtgacctgggaggcactaagttgcctctttctcaggcgcagctgttctcatgcctcctggcgtttccactaagcaggaagttcttttggtgtttgagtcataaagaaaacaaatgcactgggctgggctcagtggctcacgcctgtaatcccagcactttgggaggctgaggcgggcggatcacgaggtcagaagatcgagaccatcctggctaacacagtgaaaccccgtctctact

SEQ ID NO: 25783 - DNA, 2288 bp, Homo sapiens
  misc_feature (974)..(974): n is a, c, g, or t
aaatcttttgtagttatcccacagttcttatatcttgtttttttattcttctctttgcttttcaggtgtggatgtttctgctgatatattctcaagctctttagttggctgtttcttggccaataataagcctaccaaagacattcttcatttctgttacactgtcttcaatttctagcatttctttgtggttcttagaatttccatctctgtgtttacactgcctgtctgttcttggatgctgtctgctttatccagtagaacccatggcatatcaatcataattgttttaaattcccagtctgataatttcagcaatcctgctatatctggttctggttcttactctttctctttaaactaacttttgccttttagtatgcttgtaatttttccttagctggacatggcatactggataagaggaaatgctgtaagcaggcctctagtaatcatgataagctgtggggagaggggcagcattctattgtccagggattagatgtcagtcttgcagtgagtctgtgcttctgcactgcgaacttcagtttttcccaccctttagttgggtcaggatgtatagagttggctggagttggatatttcccttcctccaggtcactgaagctctgactaaaactccaggtgtggtggcttatgcctgtaataccagcactttgggaggccaaggcaggtggatcacctgaggttgggagttcatgaccagcctgaattgcttgaatccaggaggtggaggtcacagtgagccgagattgtgatactgcactccagcctgggaaacagtgagacactgtctcaaaaaaataaataaataaataaaaggctaggcgcagtggctcaaccctgtaatcccactaattttgtatttttagtgaaggcagggattctccatgttgatcaggctggtctcgaactcctgacctccagtgatctgcctggtttgacctcccaangtgctgagattacaggcatgagccatcacgcccagccagttcttcaattcttacagtccctttccatgtcattaaagaactcacactggagagaaatcttatcaatgttagaattgtggtaaagctctctgttgttcccatttacatgaaagatgtgaacagtcacattgtagaaaaatgctgtgagagttgggaatctggaaccacttctttattatctcaggtcataatgaacttgtaagaattcacagtggcaggaaaccctatgtaaatggaaaatatgggaaaggcttcatttaatccataggactgataccacaaaactcccactaggagaaaacctatgtttatacggaatgtgggaaaatcttcacttatttctcaagccttaaagtgtatgtcaggattcccagtggagagaagccatattgatgtaaggaatgtgggaaagcccttgcctgccacttagtccttgataaacattttagaacacaaactggagagaaactatgaattcaaggattgtgggaaaacccttttatgttccacaagctttaatattcatatgcaatgtatgctggagaataacttgatgactataataagtggaatggcctaggtcagggatccccaaacccctgggccatggactggtactggtctgtggcctgctaggatccagggtgcacagcaggaggtgaatgtaggatgagcaaacattactgcctgagctcaactttctgtcagatcagcagtggcattagattctcataggagcatgaactttattgtgaactgcacatgcaagggatctaggttgcacactccttatgagaatctaatgcctgatgatctgaactggaacagtttaatccccaactccagtccgtgggaaaaatgtcttccacgaaactggtccctggtgccaaaaagttaggggaccactgatttagattatgtcacatgtcccatccactcattaacattaaggctttcatccctgggacctcaagataatggtggtatttagagatgtggttttttaaagaggtgattttaaaatgaggcagttagaatggggccctcattcaatatgactggtttccttataagaagtgaaagagataccagggtagcaggcacagaattttatgtgaagtgaccggaaatggttaccttcaaggcaaagagagattcctggaggagatccttcttttaaggctcattatagaggaaatcatccttatctacactttgatcctggacttccagcctcaaaaattatgagcaaataaatttctgttgtttaagcca

SEQ ID NO: 25784 - DNA, 1979 bp, Homo sapiens
  misc_feature (440)..(440): n is a, c, g, or t
cgtgagccaccgcgcccagccaatccttcctttttaatatccacatacaaactcactgaagaaaaaccctgaaaatgtaaagcaatgttgaaaaacctagttatttaaattcatttcaagtatatgaactcacatggtaaagaaaccctgtgaatataagtagtatgataaattcttgaatttttttttttttggaggcagagttttgctcttgttggcccaggctggagtgcaatggctcaatcttggctcactacaacctctatcacccaggttcaagtgattattctgcctcagcctcccaagtagctgggattacaggcatgtaccaccatgcccagctaattttgtatttttagtgaaggcagggattctccatgttgatcaggctggtctcgaactcctgacctccagtgatctgcctggtttgacctcccaangtgctgagattacaggcatgagccatcacgcccagccagttcttcaattcttacagtccctttccatgtcattaaagaactcacactggagagaaatcttatcaatgttagaattgtggtaaagctctctgttgttcccatttacatgaaagatgtgaacagtcacattgtagaaaaatgctgtgagagttgggaatctggaaccacttctttattatctcaggtcataatgaacttgtaagaattcacagtggcaggaaaccctatgtaaatggaaaatatgggaaaggcttcatttaatccataggactgataccacaaaactcccactaggagaaaacctatgtttatacggaatgtgggaaaatcttcacttatttctcaagccttaaagtgtatgtcaggattcccagtggagagaagccatattgatgtaaggaatgtgggaaagcccttgcctgccacttagtccttgataaacattttagaacacaaactggagagaaactatgaattcaaggattgtgggaaaacccttttatgttccacaagctttaatattcatatgcaatgtatgctggagaataacttgatgactataataagtggaatggcctaggtcagggatccccaaacccctgggccatggactggtactggtctgtggcctgctaggatccagggtgcacagcaggaggtgaatgtaggatgagcaaacattactgcctgagctcaactttctgtcagatcagcagtggcattagattctcataggagcatgaactttattgtgaactgcacatgcaagggatctaggttgcacactccttatgagaatctaatgcctgatgatctgaactggaacagtttaatccccaactccagtccgtgggaaaaatgtcttccacgaaactggtccctggtgccaaaaagttaggggaccactgatttagattatgtcacatgtcccatccactcattaacattaaggctttcatccctgggacctcaagataatggtggtatttagagatgtggttttttaaagaggtgattttaaaatgaggcagttagaatggggccctcattcaatatgactggtttccttataagaagtgaaagagataccagggtagcaggcacagaattttatgtgaagtgaccggaaatggttaccttcaaggcaaagagagattcctggaggagatccttcttttaaggctcattatagaggaaatcatccttatctacactttgatcctggacttccagcctcaaaaattatgagcaaataaatttctgttgtttaagccaaaaaaaaaaaaaaaaaaaaccaacaacctttttgggcgcgccggccctgaaaaaatttttaaacaccccttcttggggccggggccctggttagtgaaaccgtggccaacggggtccaaagaaaccgggccaggactggggtggttttccccaaaaaaaacgccgggggccccgcggttgaccaaccgagggctcggggcttccggcttcacaggcccgggcgta

SEQ ID NO: 25785 - DNA, 1809 bp, Homo sapiens
  misc_feature (440)..(440): n is a, c, g, or t
cgtgagccaccgcgcccagccaatccttcctttttaatatccacatacaaactcactgaagaaaaaccctgaaaatgtaaagcaatgttgaaaaacctagttatttaaattcatttcaagtatatgaactcacatggtaaagaaaccctgtgaatataagtagtatgataaattcttgaatttttttttttttggaggcagagttttgctcttgttggcccaggctggagtgcaatggctcaatcttggctcactacaacctctatcacccaggttcaagtgattattctgcctcagcctcccaagtagctgggattacaggcatgtaccaccatgcccagctaattttgtatttttagtgaaggcagggattctccatgttgatcaggctggtctcgaactcctgacctccagtgatctgcctggtttgacctcccaangtgctgagattacaggcatgagccatcacgcccagccagttcttcaattcttacagtccctttccatgtcattaaagaactcacactggagagaaatcttatcaatgttagaattgtggtaaagctctctgttgttcccatttacatgaaagatgtgaacagtcacattgtagaaaaatgctgtgagagttgggaatctggaaccacttctttattatctcaggtcataatgaacttgtaagaattcacagtggcaggaaaccctatgtaaatggaaaatatgggaaaggcttcatttaatccataggactgataccacaaaactcccactaggagaaaacctatgtttatacggaatgtgggaaaatcttcacttatttctcaagccttaaagtgtatgtcaggattcccagtggagagaagccatattgatgtaaggaatgtgggaaagcccttgcctgccacttagtccttgataaacattttagaacacaaactggagagaaactatgaattcaaggattgtgggaaaacccttttatgttccacaagctttaatattcatatgcaatgtatgctggagaataacttgatgactataataagtggaatggcctaggtcagggatccccaaacccctgggccatggactggtactggtctgtggcctgctaggatccagggtgcacagcaggaggtgaatgtaggatgagcaaacattactgcctgagctcaactttctgtcagatcagcagtggcattagattctcataggagcatgaactttattgtgaactgcacatgcaagggatctaggttgcacactccttatgagaatctaatgcctgatgatctgaactggaacagtttaatccccaactccagtccgtgggaaaaatgtcttccacgaaactggtccctggtgccaaaaagttaggggaccactgatttagattatgtcacatgtcccatccactcattaacattaaggctttcatccctgggacctcaagataatggtggtatttagagatgtggttttttaaagaggtgattttaaaatgaggcagttagaatggggccctcattcaatatgactggtttccttataagaagtgaaagagataccagggtagcaggcacagaattttatgtgaagtgaccggaaatggttaccttcaaggcaaagagagattcctggaggagatccttcttttaaggctcattatagaggaaatcatccttatctacactttgatcctggacttccagcctcaaaaattatgagcaaataaatttctgttgtttaagccaaaaaaaaaattaatatagtcgatcggccgttaatttagtagtagtagtcggccgc

SEQ ID NO: 25786 - DNA, 2423 bp, Homo sapiens
agcggggaggaggtggagagtgaggccgaggcgtggggagcccgggaactccctcctcctgaagtaacgcgtcccgggccggctctgccgtcgttgctgccgccgggcgcccgggacgaggaggtggaggagggagagggcccgcgggcctcgcctccgccctccgccacctcgagctgcggtagcagcgactcatgagagcgcggcggaggacagatttgataatgggctgcattaaaagtaaagaaaacaaaagtccagccattaaatacagacctgaaaatactccagagcctgtcagtacaagtgtgagccattatggagcagaacccactacagtgtcaccatgtccgtcatcttcagcaaagggaacagcagttaatttcagcagtctttccatgacaccatttggaggatcctcaggggtaacgccttttggaggtgcatcttcctcattttcagtggtgccaagttcatatcctgctggtttaacaggtggtgttactatatttgtggccttatatgattatgaagctagaactacagaagacctttcatttaagaagggtgaaagatttcaaataattaacaatacggaaggagattggtgggaagcaagatcaatcgctacaggaaagaatggttatatcccgagcaattatgtagcgcctgcagattccattcaggcagaagaatggtattttggcaaaatggggagaaaagatgctgaaagattacttttgaatcctggaaatcaacgaggtattttcttagtaagagagagtgaaacaactaaaggtgcttattccctttctattcgtgattgggatgagataaggggtgacaatgtgaaacactacaaaattaggaaacttgacaatggtggatactatatcacaaccagagcacaatttgatactctgcagaaattggtgaaacactacacaggtatgtgaatatttcaaaggtaaaaattatttcttcatattctagtttatgaggacaaaatccatatcctcatttctcttaagatttaacacacttatttacacataatacatgcccaataaatgtctgttgtattctaaagggaggaacaggtaatacttagtacttgcattgtgctactcagataatgtgctaatagactctcatcatttgggtccttatatcttactggcatagtatttacattggagttcatttcaccacatgtaccttatgaaaataaacctaaaagcaaatatttatgggcacttagtaagtaaaactaaacattgggtaacagaaaaagctatgtcagaaggattaccttcctctgcatgggctggatcgcataagctttcctaaagtataaatccagtgaaatttggtctgacgatgcatttttcttatcctagaaaattaacctatagcaattatagacatttttgtctttcaaggacctctgaaggtatttaatattagaatcttctgtctcaaaatttttcattaccaatttggcatatgaatgcacctgaaagtctttacatgattaatactaggagaggggatgtttccatggtaatgtcttcaatgacagctagctgcaaactgagtctatcaagtcagccagcaatcttgacattgatcaagcatgttaccaagcagtggcatcacttgtaattgcctttgtcacaatgtgaatttatgtggtgattttagtgagaataggagagaacatgtctcatttataataagaaagattgtataagcagaattcataagtcaagctgttatgaatctagggttccctgactttgtgtctcccttatttaaaaaaatcagtctcctgttaggcatgtggattgtgcctttaatcccaactactgatgcaggaggatcacttgaggccaggagttcaagaacagcctgggcaacatagcaagacctcatctcttaaaaaaaaaaaaaaaaaaaaaaaaaaagaggcccagggcgtgttggggggctccccacctcctgtggttatctccccaccacatttgggggaaggccgaacaaccagacaaaagaactccacttgtgagaggctcgagagaagtttttgaaaacccaccctgtgggccaaaacaagtgggaaaacacccctttttctttttacaacatttaaaaaatttgtagcccgggcggcggtggtgggccatgcaccccctgggtgaggcctccgacgactccactgggggaaaggcactgaaggacaggcagaaactccaaatttgaaaaccgcggggaagggtgtggaaaagttgtgtgcccagtgtgaagcttgaagaaaacacacaacccagtttggcgacctccaactccggtgggtgcgcgaacccaaataggtgtgtagaacttcccgtgttcctccaaccaaaagacacaccaaaaagagt

SEQ ID NO: 25787 - DNA, 2503 bp, Homo sapiens
agcggggaggaggtggagagtgaggccgaggcgtggggagcccgggaactccctcctcctgaagtaacgcgtcccgggccggctctgccgtcgttgctgccgccgggcgcccgggacgaggaggtggaggagggagagggcccgcgggcctcgcctccgccctccgccacctcgagctgcggtagcagcgactcatgagagcgcggcggaggacagatgctgtggaagagagccaccattatcaaaatgatcacagttgcaaacattcgtgcttcaaataccagccactatgttagatttgataatgggctgcattaaaagtaaagaaaacaaaagtccagccattaaatacagacctgaaaatactccagagcctgtcagtacaagtgtgagccattatggagcagaacccactacagtgtcaccatgtccgtcatcttcagcaaagggaacagcagttaatttcagcagtctttccatgacaccatttggaggatcctcaggggtaacgccttttggaggtgcatcttcctcattttcagtggtgccaagttcatatcctgctggtttaacaggtggtgttactatatttgtggccttatatgattatgaagctagaactacagaagacctttcatttaagaagggtgaaagatttcaaataattaacaatacggaaggagattggtgggaagcaagatcaatcgctacaggaaagaatggttatatcccgagcaattatgtagcgcctgcagattccattcaggcagaagaatggtattttggcaaaatggggagaaaagatgctgaaagattacttttgaatcctggaaatcaacgaggtattttcttagtaagagagagtgaaacaactaaaggtgcttattccctttctattcgtgattgggatgagataaggggtgacaatgtgaaacactacaaaattaggaaacttgacaatggtggatactatatcacaaccagagcacaatttgatactctgcagaaattggtgaaacactacacaggtatgtgaatatttcaaaggtaaaaattatttcttcatattctagtttatgaggacaaaatccatatcctcatttctcttaagatttaacacacttatttacacataatacatgcccaataaatgtctgttgtattctaaagggaggaacaggtaatacttagtacttgcattgtgctactcagataatgtgctaatagactctcatcatttgggtccttatatcttactggcatagtatttacattggagttcatttcaccacatgtaccttatgaaaataaacctaaaagcaaatatttatgggcacttagtaagtaaaactaaacattgggtaacagaaaaagctatgtcagaaggattaccttcctctgcatgggctggatcgcataagctttcctaaagtataaatccagtgaaatttggtctgacgatgcatttttcttatcctagaaaattaacctatagcaattatagacatttttgtctttcaaggacctctgaaggtatttaatattagaatcttctgtctcaaaatttttcattaccaatttggcatatgaatgcacctgaaagtctttacatgattaatactaggagaggggatgtttccatggtaatgtcttcaatgacagctagctgcaaactgagtctatcaagtcagccagcaatcttgacattgatcaagcatgttaccaagcagtggcatcacttgtaattgcctttgtcacaatgtgaatttatgtggtgattttagtgagaataggagagaacatgtctcatttataataagaaagattgtataagcagaattcataagtcaagctgttatgaatctagggttccctgactttgtgtctcccttatttaaaaaaatcagtctcctgttaggcatgtggattgtgcctttaatcccaactactgatgcaggaggatcacttgaggccaggagttcaagaacagcctgggcaacatagcaagacctcatctcttaaaaaaaaaaaaaaaaaaaaaaaaaaagaggcccagggcgtgttggggggctccccacctcctgtggttatctccccaccacatttgggggaaggccgaacaaccagacaaaagaactccacttgtgagaggctcgagagaagtttttgaaaacccaccctgtgggccaaaacaagtgggaaaacacccctttttctttttacaacatttaaaaaatttgtagcccgggcggcggtggtgggccatgcaccccctgggtgaggcctccgacgactccactgggggaaaggcactgaaggacaggcagaaactccaaatttgaaaaccgcggggaagggtgtggaaaagttgtgtgcccagtgtgaagcttgaagaaaacacacaacccagtttggcgacctccaactccggtgggtgcgcgaacccaaataggtgtgtagaacttcccgtgttcctccaaccaaaagacacaccaaaaagagt

SEQ ID NO: 25788 - DNA, 1136 bp, Homo sapiens
agcggggaggaggtggagagtgaggccgaggcgtggggagcccgggaactccctcctcctgaagtaacgcgtcccgggccggctctgccgtcgttgctgccgccgggcgcccgggacgaggaggtggaggagggagagggcccgcgggcctcgcctccgccctccgccacctcgagctgcggtagcagcgactcatgagagcgcggcggaggacagatttgataatgggctgcattaaaagtaaagaaaacaaaagtccagccattaaatacagacctgaaaatactccagagcctgtcagtacaagtgtgagccattatggagcagaacccactacagtgtcaccatgtccgtcatcttcagcaaagggaacagcagttaatttcagcagtctttccatgacaccatttggaggatcctcaggggtaacgccttttggaggtgcatcttcctcattttcagtggtgccaagttcatatcctgctggtttaacaggtggtgttactatatttgtggccttatatgattatgaagctagaactacagaagacctttcatttaagaagggtgaaagatttcaaataattaacaatacggaaggagattggtgggaagcaagatcaatcgctacaggaaagaatggttatatcccgagcaattatgtagcgcctgcagattccattcaggcagaagaatggtattttggcaaaatggggagaaaagatgctgaaagattacttttgaatcctggaaatcaacgaggtattttcttagtaagagagagtgaaacaactaaaggtgcttattccctttctattcgtgattgggatgagataaggggtgacaatgtgaaacactacaaaattaggaaacttgacaatggtggatactatatcacaaccagagcacaatttgatactctgcagaaattggtgaaacactacacagaacatgctgatggtttatgccacaagttgacaactgtgtgtccaactgtgaaacctcagactcaaggtctagcaaaagatgcttgggaaatccctcgagaatctttgcgactagaggttaaactaggacaaggatgtttcggcgaagtgtggatggaacatggaatggaaccacgaaagtagcaatca

SEQ ID NO: 25789 - DNA, 735 bp, Homo sapiens
tgctgaaagattacttttgaatcctggaaatcaacgaggtattttcttagtaagagagagtgaaacaactaaaggtatgaatattgttatattagtataagtataaaatttcttggggcagtattttgagaaagatatagtgaaagtatttatttttcacccaggtgcttattccctttctattcgtgattgggatgagataaggggtgacaatgtgaaacactacaaaattaggaaacttgacaatggtggatactatatcacaaccagagcacaatttgatactctgcagaaattggtgaaacactacacaggtatgtgaatatttcaaaggtaaaaattatttcttcatattctagtttatgaggacaaaatccatatcctcatttctcttaagatttaacacacttatttacacataatacatgcccaataaatgtctgttgtattctaaagggaggaacaggtaatacttagtacttgcattgtgctactcagataatgtgctaatagactctcatcatttgggtccttatatcttactggcatagtatttacattggagttcatttcaccacatgtaccttatgaaaataaacctaaaagcaaatatttatgggcacttagtaagtaaaactaaacattgggtaacagaaaaagctatgtcagaaggattaccttcctctgcatgggctggatcgcataagctttcctaaagtataaatccagtgaaat

SEQ ID NO: 25790 - DNA, 401 bp, Homo sapiens
gacaagatccaaagagatattcatctgattgccctgagttaaccaacaataggccataagctcagtgaagttacactggccccagtgctttccttagctgctctcatataaatattcaaaagtcttagtcggtgctcacgcctgtaatcccagcactttgggaggccgaggtgggcagatcacgaggtcaggagatcgagaccatcctggctaacatggtgaaaccccatctctactaaaaatgcaaaaaattagcggggcttggtggcaggcacctgtagtcccagctactcgggaggctgaggcaggagaatggcgtgaacccgggaggtggagcttgcagtgagccaagatcgcaccactgcactccagcctgggagacaaggtgagactctgtctca

SEQ ID NO: 25791 - DNA, 394 bp, Homo sapiens
tgagaaggagttttgctgttgttgcccaggctggagtgcagtggcacaatctcggctccctgcaacctccgcctcctgggttcaagcgattctctggccccagcctcccaagtagctgggattacaggtatacaccaccatgcccagctaatttttgtatttttagtagagacagggtttcaccatgttggccaggctggtcttgaaatcctgacttcaggtgatccacccacgtcggcctctgaaagggctgggattacaggcatgagccaccacgcccagcctagactctcttttgaggtctctaaaatgatacaactgtgggggattatggaaacttgggggccaaacagaggagtggggactggacacaagggagctttggtttccaggc

SEQ ID NO: 25792 - DNA, 167 bp, Homo sapiens
tcaaagccatgagttcacactgatgcctctaattccaattctaaccattctagttttctctctttccgtattataattgccatccctaacaattaaaaacctagctaccattatctttaatatatttacttatttgatcaatccttttatgtaaccaatctctcata

SEQ ID NO: 25793 - DNA, 318 bp, Homo sapiens
ggaaatcttcagtcatctgatcatcacttgtcagttaatttagtgtgtgtttaatctcgtctcctaattagtatatcagctccccacaggcagggaccaccttagaatcttcagtggcctccaaggcaccaagcacagcgatgagtccccacctctgtcttccacaaatactggacagctattgatttggtcaacctatgctaaaacacaactgtagaatatttttaaagtgtactagaatcagtggatgaaagaaagatagaaattttgtcttcatttttaaacatatttcttaacttttagaactgtccaacaatg

SEQ ID NO: 25794 - DNA, 430 bp, Homo sapiens
tgtgcccggtttgaatgtaagcccgtgggagcctcgcagccttcctccccaggctctggagcccgggtgggcccgtcctgggcggcacagtggatgctcacgtgcctccccccctgcggcagcgcgagtgcttagcacctgaggctttaccctgggggctgtcttccctctgtgaggaccccagcaaggactcatgatgtccacaggtgcttaggggtggcctctgggctacttggcctcgcttgaccacaccttccggcccaggtgagccttgcgggtctaggtgaccaatgcggcctccaggtaaagggcacctgccttaggggacgcccacaagtgtctgcatttcaaactgctttgaaagaccaccctaaccgaccactgccacaatgtacccacaagtgcagatggtggctttggtctccaagat

SEQ ID NO: 25795 - DNA, 453 bp, Homo sapiens
tttatatagatagatagatagatagatagatagatagatagatagatagatagataaagtttttagaaagaactctgtgaagaactgtaaacatactcatgccatcttttggtataaaacttccgggaatttattccaaggaagtcagctggaagtcagccggaagaaagggaaagctacaagcacaagctcattatacattatttacaatacttgaaagtcagaaaaaatgaaaaatatctggccaccagggaacagttacgtaaattatttgatgtgtctttttaacaagatattaggaagtgctcggcattgttaggattttttttggccacgtggaaaaacacacatgatataaagcaaaggaaaataaggcagtctgcaaatggatctgcttagaactgccattacgtaaaacagtcctcagctcatactcgacttggagagaaatcc

SEQ ID NO: 25796 - DNA, 602 bp, Homo sapiens
gtgtatgtgtggggttttgtcttttgttttctgagaataaagtatatgagatcatggaaaaaatcagaaaacgaggaaaatcataaattcattaccaaaataatttctgatttggtattatagctctgcaaattacttcactaattgtgttcataggtactatggtacactgtacactgttttgtaacttgctttttagatggattatatcatatttttctgtatcaataaatatgaattcattacatcagtttaaactgatcaaaaacattttaatcaaagtaatacaattaaattgctaaatatcatagggaatcgaagagtttataatcccaaaccatactctttcttttcctagccagctggggacatttttaattgtttctattttcattctttctgtttcagttcttataaaaatacatatataaaattggctaaatgattaaatgttatagtagttctttaattataaatttgaataatatttgttgacttccaaactgcataccccttgccttgtccaagtaaaactgtaccatcgtttattctctgtgttgtcaataaaacactaagtgatatctgagtttctaaatttcagt

SEQ ID NO: 25797 - DNA, 481 bp, Homo sapiens
gactgatctcagccggggcaaaaaatgggaaagtgtagtcttttctatgtaggctattgtgaggctggggtgcaggagaggaactatgagcttttcagccctgagaaaggtattctccttcatcctatagtgttgggatacttttgtcctgggaaaatataggactaacttcaaactgaggagttgatgttttgccagctctcttaagaggagatgaagcaatgttcttctagctgagaacatttgtccctgtgttgacaccctgcctcagggtcttggtagcttacaatgttttcaatttttttgttaaaaaaatttttttttttggagacagggtctcattctgtcatccgggctagagtgcagtggtgcagtcatagctcattgcagcctccaactcttgggctcaagtgatcctcctatctcaacctcttgctgagtagctaggagtactggtgcatgccaccacatccagctaatt

SEQ ID NO: 25798 - DNA, 800 bp, Homo sapiens
gttgttgaaccagtgaaagtagatgagattacttgggaagaagatcagacctcctagaagatcagcagttaagggttggatagtgaaaggaactcacaaagatgggaaacagagaggttatatgagaaagagattattgtgctattttcatgatttttaaaaaataatgaaattctggctctgcaaccatctctcacaccagtaaaaataaaagaggaaaagtgctcttttttgaggacttcttagtttagatacttttctaaggtccttgaatgtattacctcttcattgttttcttttttgagatacagaaattaaaacagattagataatttgtccaagtggaacctgctagtaagcggtagaggtggtccatggtctggctcccaagtccatgctgttagcctctacactagtgtgctgatattgccaccatctcctaataatgaacttcggcactacaaccgttactcataccagtgaaacaaaaacaggatggtggctcatgcctgtaatcccagcacttttgagaggccaaggtgggtgattacctgagcctaggagtttgaggccagcctgagcaacttggtgaaacctgtctctacaaaaaaaaataaaaaataaaagatagatagatagatagatagctgggagtggtgctgctgcacgcctgtagtcctagctactcaggaggctgaggcaggcagttcaattgagcctgggagatcgaggctgcagtgagctgagatcacaccactgcactccagcctgagtgacagaatgagaccctatgtccaaaa

SEQ ID NO: 25799 - DNA, 308 bp, Homo sapiens
gtatactttattagtttaccaactggggtcaccctttgaaccaaaataaacatgaatcttttactgccaatttctcaaggcgaaaatgcgtaatttataatgtaggaaagataggctataaaatagttgataagatttaagtctagattgccttttcagttcggttgtggtggctgttgtttgagaaaaaggttattgatgttaaaggatagttgcattctagacgcaatgagccaaaatagaatttgttgcgaacttgttaatgtgttcatgtgtgttttttgttgaagtgagttgacatttttatg

SEQ ID NO: 25800 - DNA, 342 bp, Homo sapiens
gggaagggcgcactcactgaactaactcccttccctctactcccagagcccgcccggcaggaccaccgagcaaggccttggaaaaccagagagattagagcgcagaatggggaaatggagagagaacctgaaagagccccaaactcgaggacctattgctccccaagaataacatcttccagaagaactagacagaaaactaggcgtctgggaactctgaaatccttggaggagtagcatcatcatgaccctctgtgttccttttggcaaaggacttgctcccattgtttgcttgttccattgtctgtctgttaaataaataaaacccttttcatatatctt

SEQ ID NO: 25801 - DNA, 745 bp, Homo sapiens
gggaagggcgcactcactgaactaactcccttccctctactcccagagcccgcccggcaggaccaccgagcaaggccttggaaaaccagagagattagagcgcagaatggggaaatggagagagaacctgaaagagccccaaactcgaggacctattgctccccaagaataacatcttccagaagaactagacagaaaactaggcgtctgggaactctgaaatccttggaggagtagcatcatcatgaccctctgtgttccttttggcaaaggacttgctcccattgtttgcttgttccattgtctgtctgttaaataaataaaacccttttcatatatcttgcaaaaaaaacaaacaaacaaaaacaaaaaaaaaaaaatttggtgcggcgccggcctccgcgggcgcccctgaaaaaaggttttctagacacccactcgcggtcggggcgcgcgggggccccacagattggcgtaacatggcaacaactgtggcccaaaccgcgcggtgccccacgcaggaaaacaaccgcccgggctcgaaagaccaaccgacctgaccagaaactcgcccacccacaatcaacaaaacagcgcgccgcgggcgacaccaccgcacacgcgttctcggaacacaacctccccacaggcaccacacacgacggactccctacgcggggaccccacacaaaccgacgagcgccccaaacgacgacgaccagtacagacgttaggcccgcgactc

SEQ ID NO: 25802 - DNA, 1105 bp, Homo sapiens
gggaagggcgcactcactgaactaactcccttccctctactcccagagcccgcccggcaggaccaccgagcaaggccttggaaaaccagagagattagagcggtgagtcgcgccggtcacgttggacgcctgcgcgttaggagattctggagccagaacagcagaattgccttcgcccgccctgcccctcgcctgcttcagaagcttccaggaactcccgggtcggcgacccagcccgagccgcctggggccccaagggaagctgaacgccctgtgggctcctgggatggttcttcccgttctttgcgccgccttcacccattgaagagcctgtgcccaccctgcccagtcgctctcggggccgcggaggagcttccgctgccatcttcggatcctgtgttccgcacgggggctccaccagggcagggatggtggtgagggtcgctcgtgggtcccctcggggggagcagggtctggcactcaccagggctcacgactaggacttgtcgaatgaattcattgtcgcctttagcttttagtcctttgaagagccctgagagcggaaatcaacagatttttttccatggggaagttctttttacaaatcgttgatttctcagtaccctgcagggcgggaaactggcagggcctccggcgcaccttctgcgcggtggagccgcgggggctcagctgggccgtggtccggccctggggccgtagggcgagagcaggtaaagggaaaagcaaaagctgggaaagaagcccgggagcggtggaccagacatccagacctcctgaaaggcgcatgcagaggcacaggcgggatcttctggaagtgagaattgtttttgtttgtttattgtagcagaatggggaaatggagagagaacctgaaagagccccaaactcgaggacctattgctccccaagaataacatcttccagaagaactagacagaaaactaggcgtctgggaactctgaaatccttggaggagtagcatcatcatgaccctctgtgttccttttggcaaaggacttgctcccattgtttgcttgttccattgtctgtctgttaaataaataaaacccttttcatatatctt

SEQ ID NO: 25803 - DNA, 674 bp, Homo sapiens
gggaagggcgcactcactgaactaactcccttccctctactcccagagcccgcccggcaggaccaccgagcaaggccttggaaaaccagagagattagagcggtgagtcgcgccggtcacgttggacgcctgcgcgttaggagattctggagccagaacagcagaattgccttcgcccgccctgcccctcgcctgcttcagaagcttccaggaactcccgggtcggcgacccagcccgagccgcctggggccccaagggaagctgaacgccctgtgggctcctgggatggttcttcccgttctttgcgccgccttcacccattgaagagcctgtgcccaccctgcccagtcgctctcggggccgcggaggagcttccgctgccatcttcggatcctgtgttccgcacgggggctccaccagggcagggatggtgcagaatggggaaatggagagagaacctgaaagagccccaaactcgaggacctattgctccccaagaataacatcttccagaagaactagacagaaaactaggcgtctgggaactctgaaatccttggaggagtagcatcatcatgaccctctgtgttccttttggcaaaggacttgctcccattgtttgcttgttccattgtctgtctgttaaataaataaaacccttttcatatatctt

SEQ ID NO: 25804 - DNA, 571 bp, Homo sapiens
aaattagtaggtgcctgtcactcattcccatgcagaaggcatgctgaaaaccccagcccttcaaggggaagcaggggataaagggataagtctaagtagaatttttactgtagtttttattagtaaaaaagaatgatatatgtagcacaacaggaacagaagcgtatttaaagtcatctctagcttaccagaaacacccctaaaactgctggtttagattcattaatcaacctcatggtcctcagatgggttgtgactccctgttgcgtaaacacgaaccatgttacttcctggtcctcctgacctccactagctgatttcagcgaggatcaggagttaggtcgccagctgatctaaagcagcgagtcccaaagttcagccatttgtaaaccacctgcatggttttggaccaactcttgtgtcaccccatagtttctcagattttaatatgcatacaagtggcatgggatatgttgttcaaatgcggattctggttcagtagggagtgagaggggacaaagatccagtaccttttaacaaatgcccaggtgatgctgatggctctggccca

SEQ ID NO: 25805 - DNA, 660 bp, Homo sapiens
attctcaccgttcagaaaatattcctctgtacataccccagaggatgtctcaacaatcagaagtgaacacacagcatggctgggtctcgagggcatcacgctgagtgaaaaagccgctccgcagaggtcacacactggatgtttctaggtatgacagtcccagggaggagagattcgtgggtgcagggggagcatcaggatggggcgaaggggatgggcgggccacaaaggggagttctccttggtggtagcttgttctttatcttgtctgtggtggtggcttcatgaatctgcatgtggcagcattgcatagaaccacacacacacagagatgagctcgcgtgaaactggtgaacttggaatgggatctgtgggttgagccagtgtccattttctgattgtgacactgcactataattatgtaagatgttaccattagataaactgggtgtagggcataagacctctcagtatatttttgcaatttcctgggaatctacaatcatttcgaaataaaaactttccaaaaaattaatgtcctccttctaggaaaggattatacttccccacctcataagacttgctttggccaacaaaatgtgaaaggaggcagggtgctgtggttcatgcctgtaatcccaacactttgggaggccaagg

SEQ ID NO: 25806 - DNA, 736 bp, Homo sapiens
acttcagcctcccaaagagctgggattacaggcatgagccactgtgccagacagagatg[450 bp omitted]ttgctcttgttgcccaggctggagtgcagtggcacgatcttggctcactgcaatctccgccttctgggttcaagcgattctcctgcctaagcctcctgagtagctgggattacaggcgcacaccaccatgcccggctaacttttgtatttttagtagagaccgggtttcaccatgttggccaggctggtctcaaactcctgacctcaggtgatccacccacctcggc

SEQ ID NO: 25807 - DNA, 688 bp, Homo sapiens
atgtaatgctggaagatcttaaggactacatacattctagagatgacagtgttgttcaaagacagcctagtaagtaattggtagaaatgcccttataaaaaccattctcttgtcatctactgggactagggttttaaatacagcttttaaaaacaaaaacagggaataaaagcttttcaactcaaccacttctttgtaagacaaaactgaagtatctgtgtgcttccagaaagcttacagataaatgggtttcaagcacaagaatatgactagatttcagaaattaattattacagggagctattgatctactagcatcaaacaaaggcaagctctaattccacaggtaatacaatttagtgcaattaaagaaacacggcttgtatttttatgagggaattctgcagctagggattgtgactcctaaatcctcctctaaaagaaggcacttgccattaatcctaattcagtgctatccagttataaatggaatcttgagacaaaaccttaacaaagaaataacagtaatgatttccttagcagaagccgtatttgtacgcacaacattaaatcaagggctacaattcaagcacttttattcgtatcattggcctcttagatgatataagcatgaggtggggcctgtaatatttttttctgagtttcttctgcccaaaaatataatata

SEQ ID NO: 25808 - DNA, 266 bp, Homo sapiens
tcctggaaaagcaaaacccaatgccatggctgcctccctccggcagcaccagcacgagtgagccagatcctcacctttgatcatcaaggctgagaggtaatatctgaggtcgacagatcaagaagtagagacaaaagcaaaccaggctggtggtaaagaggaggaatgaccgtaagatgcctctgaaaagtgggaatatggggaatctcctcttggtttctggttgcacatgtgaatttattgaaaactgaatatattaagatgtg

SEQ ID NO: 25809 - DNA, 239 bp, Homo sapiens
aagaaaacatgcagtgtgttggagagaggtaggtgggacaacagtgaggagaccagagtttctggaacagaagactcccgtatgttagcagggggagtgaggtatattagaaaggctgggccgggtgcggtggctcacgcctgtaatcctagcactttgggaggccaaggtgggtggatcacgaggtcaggagttcgagaccagcctggccaagatggtgaaaccgtgtctgtacttaa

SEQ ID NO: 25810 - DNA, 476 bp, Homo sapiens
agcaccttgtgggatgaggagccgggcgcggtggctcacgagtgtcatccagtactttgagagaccaaggcagggggatcacctgaggtcaggaattcaagaccagcctggctaacatcacaaaacctcatctctacaaaaatataaaaattagccaggcatggtggcatgtgcttgtaatcccagctactcgggaggctgaatcatgagaatcacttgaacctggaaggcgagggctgcagtgagccaagcttgctccattgcactccatcctggatgaagagcgagaccctgtctcaaaaaaacaaaacaaaacaaaaaaagcaccagcacactgtggcatgaggggcgggattgtgaccacctctacctcccctcttagtgctcaccaagtctctgcagtagtgagcgtgtcctcatctcctgtcttctccctcagctactttgtctgcaactgctcctgttgtgtttgtcca

SEQ ID NO: 25811 - DNA, 4479 bp, Homo sapiens
gtgctcggggcttcactcccgcgcgtgaggcgagcgggcaagttggctgagggcgtgcggcagaggctgcttccctcggcgacgcgacccctcagcaactcaagctatgaactgaagctccctagggacggagaccggagcggagcggcggaggcagcagcagcagcagcagcagcagcagcagcagcagccgccgccgccgccgccttagcgggaactgagcagacccggcgcggagccacgactcctgcacgtttacctccctgtcgccgttcctgccggcggttggctaaaagacgttacagccgcgagacccgacacacaaaagccgctttctccgcgccgcccgcccagggaggctgcggccagcaagggaccccacctgagagcagctcgggctgctgagttcgttttgtgtctgagctctgcgctctgcacggaaccgaccccgtacccatggctctgataatggaaccggtgagcaaatggtctccgagtcaagtagtggactggatgaaaggtcttgatgactgtttgcagcagtatattaagaactttgagagggagaagatcagtggggaccagctgctgcgcattacacatcaggagctagaagatctgggggtcagccgcattggccatcaggaactgatcttggaagcagttgaccttctgtgtgcattgaattatggcttggaaacagaaaatctaaaaaccctttctcacaagttgaatgcatctgccaaaaatctgcagaattttataacaggaaggagaaggagtggccattatgatgggaggaccagccgaaaattgccaaacgactttctgacctcagttgtggatctgattggagcagccaagagtctgcttgcctggttggacaggtcaccatttgctgctgtgacagactattcagttacaagaaataatgtcatacaactctgcctggagttaacaacaattgtgcaacaggattgtactgtatatgaaacagagaataaaattcttcacgtgtgtaaaactctttctggagtctgtgaccacatcatatccctgtcgtcagatcctctggtttcacagtctgctcacctggaagtgattcagctggcaaacattaaaccaagcgaagggctgggtatgtatattaaatctacatatgatggcctccatgtaattactggaaccacagaaaattcacctgcagatcggtgcaagaaaatccatgctggcgatgaagtgattcaagttaatcatcagactgtggtggggtggcagttgaaaaatttggtgaatgcactacgagaggacccgagtggtgttatcttaactttgaaaaagcgacctcagagcatgcttacctcagcaccagctttactgaaaaatatgagatggaagccccttgctctgcagcctcttatacctagaagtcccacaagcagcgttgccacgccttccagcaccatcagtacacccaccaaaagagacagttctgccctccaggatctctacattccccctcctcctgcagaaccatatattcccagggatgaaaaaggaaaccttccttgtgaagacctcagaggacatatggtgggcaagccagtgcataagggatctgaatcaccaaattcatttctggatcaggaatatcgaaagagatttaatattgtcgaagaagatactgtcttatattgctatgaatatgaaaaaggaagatcaagtagtcaaggaagacgagaaagcaccccaacttatggcaagctacgacctatatctatgccagtggaatataattgggtgggggactatgaagatccaaataagatgaagagagatagtagaagagaaaactctctacttcggtatatgagcaatgaaaagattgctcaagaagaatacatgtttcagagaaacagcaaaaaggacacagggaagaagtcaaaaaagaagggtgataagagtaatagcccaactcactattcattgctacctagtttacaaatggatgcactgagacaagacatcatgggcactcctgtgccagagaccacactataccatacatttcagcagtcctcactgcagcacaaatcaaagaagaaaaacaaaggtcctatagcaggcaagagcaaaagacgaatttcttgcaaagatcttggccgtggtgactgtgagggctggctttggaaaaagaaagatgcgaagagttacttttcacagaaatggaaaaaatattggtttgtcctaaaggatgcatccctttattggtatattaatgaggaggatgaaaaagcagaaggattcattagcctgcctgaatttaaaattgatagagccagtgaatgccgcaaaaaatatgcattcaaagcctgtcatcctaaaatcaaaagcttttattttgctgctgaacatcttgatgatatgaacaggtggcttaacagaattaatatgctgactgcaggatatgcagaaagagagaggattaagcaggaacaagattactggagtgagagtgacaaggaagaagcagatactccatcaacaccaaaacaagatagccctccacccccatatgatacatacccacgacctccctcgatgagttgcgccagtccttatgtggaagcaaaacatagccgactttcctccacggagacttctcagtctcagtcttctcatgaggagtttcgccaggaagtaactgggagcagtgcagtgtctcccattcgcaagacagccagtcagcgccgctcctggcaggatttaattgagacgccactgacaagttcaggcttacactatcttcagactctgcccctggaggattctgtcttctctgactccgcggccatctccccagagcacaggcggcagtctaccctgccaactcagaaatgccacctgcaggatcactatgggccataccccttagctgagagtgagaggatgcaagtgctaaatggaaatgggggcaagcctcgaagttttactctgcctcgagatagcgggttcaaccattgctgtctgaatgctccagttagtgcctgtgacccacaggatgacgtgcaacccccagaggtggaggaagaggaggaggaggaggaggaggaaggggaggcagcaggggaaaacataggagaaaaaagctaatacactgcgagagttggtagaacctctccatgccaaatcggatccacttctgttggcactcaacccattggactcacagattgataagctaatgtttagagaatttagatcggagagagtcggtacggcgcagactcaacatcaacctcttgcaagcaactaaaatggcctcgtccttgctgtttataacagaaaacagacttgtaaaaagcttagatcatcaagtgttttggattgggggcctcccaaagggatataagaggggcaggccactcttaagaagaatgcgagctttctacattgggactagcataagatcaaagccaatcaagatggagcacagtaacagaaaactgcggtttctgtgggagaacagaaggggaaagggtcttaactgggaaagggctctgtgtggtaacacctcagttgtgttctcctgacaccaggaaaagagagggatcagcttcaataactagaaaattctggctgtttaatggactctttggtggcctctttaaggcaaagcagagaaagcaaattatgtattaagtgtattttgcatttttaaaacttgacgtgctgtattgtactaaattaagtgtaatctattaaggcaaggtatacacaatttgctttgaaacttactatgtttattctattataaagtgtattcaggtgcaacacagagactgctttcggtgacattaatgaagaaaatttctcatgccaggctttattatagaatcttcagctaaaatcctaactttctccttatttcttggcacttgtatacaagtggtgttgcctcttagggcaggcatgagctattcttttctgtaaaatattttgaatctataggctgtgggtttcatttttgaaaagtattttgtctggatgtctttcaaactagcttcagatattatttaatactatgtaactgggtcccctatggctcaatcaatattgcttatttttcttctgtagtggatgtgaaatttcctttagttggataagatacactgtaataattttaatgctaattaatgatatttcatactgtgcaatgaacagataatttaacactgtattttgaaatgtttttttcttcctgtcaccgcagtgtgtggtattgcataatgtgaatacctgtaaaaatataaattacttaaaaataaaaatatgaccaattggtatcagatcttttcagatagctaaataatttgctaagtatgcctgatagtaaatatctttctaaaaagaagtaatcagtgcttctttctcacaaatggaatttgtgtctgtgaataaaatcacattgatctgcct

SEQ ID NO: 25812 - DNA, 360 bp, Homo sapiens
gcatgatggtatttctaatacaaatactaatatgctttggaaataatggcactcgcaggtctttcatcatattgtatcactgctttatcatattaggctaatacactgcgagagttggtagaacctctccatgccaaatcggatccacttctgttggcactcaacccattggactcacagattgataagctaatgtttagagaatttagatcggagagagtcggtacggcgcagactcaacatcaacctcttgcaagcaactaaaatggcctcgtccttgctgtttataacagaaaacagacttgtaaaaagcttagatcatcaagtgttttggattgggggcctcccaaagggatataa

SEQ ID NO: 25813 - DNA, 525 bp, Homo sapiens
cacaagcaggatgtgcagaggatgcagggtttaggaaacagttgagagctaagggccagtgagtggaggaggggagttggagagtaggtccctgttgcaggagcactaatgccagagagggagactgcagcacagctgccatgggctgaggggggcggaactgccatgaggtgggtgtggaagcagggaacactcttgggggatgatacagtcccagagatcatcctctgtctgtgcctctctgagagaggcaatgtgccactctgtacctgacctgacttggctgggtcaatagaagaagctacttacgcttccttaccctcagttttctcatctgccaaatagggctaatcatagtgaccgtatgggtttgtaagaggatcaaatgaaaggaggcaagtaagtgtttcacagtgcctggtgcatcatcacttgataaataggtgcctgatgcatggtggagagcaggacacagggtcctttccctgcctcaggcacttcttccctgactgctgcttttgttgc

SEQ ID NO: 25814 - DNA, 417 bp, Homo sapiens
gtctatgtagaagatccaaaagaattgacaaactggaaccaataagcacaaggtagcaggatacaaggttaatatgcaaaagtagattatattcctatataccagcagtgaacaagtggaattctaaaattaaaaacacaataccattacattaatatctcccaaaataaatacttaggtataaatctaataaaatatatataaaatatgtacaaagaaaacttcaaaactctgataaacaagaactaaataacatgttcatggataggaagactatattaacaaggtgtcagttcttcacaattttatttgtagactgaatataattctagtcaaaattgcagtttgttgtagatattaacaaactgattccaataagtttatatggagaggcaaaagacccagaataggcaactt

SEQ ID NO: 25815 - DNA, 339 bp, Homo sapiens
ttcattataggattggagaagagagcttcatggttaacatggttacatctttctatattttactgcaattgcagaaaactgactagatattggggttctaattttctgtgtctaggccttttaattggctttccccaagtctgtcaacacagtatcagctactgactcgagaggtagaaaaataaaataaggccggccgagatggctcacgcctgtaatcctagcattttggtaggcggaggagggcggatcacctgaggtcgggagtttgagaccagcctggccatcatggtgaaaccccatctctactaaaaatacaaaaattagccgggtgtggtg

SEQ ID NO: 25816 - DNA, 733 bp, Homo sapiens
tacgcaaccccataaggtagcacgccgttacccgtggggagcgtttccgccatttttgaaaattaattgggaaggtactggttttaagtgtagttgccgacgcaatggcagcctttgcagtggaacctcaggggcccgcgttaggatctgaaccaatgatgctgggttcacccacatctccaaagccaggagttaatgcccagttcttacctggatttttaatgggggatttgccagctccggtgactccacaacctcgatcaattagtggcccttcagtaggagtaatggaaatgagatcacctttacttgcaggtgggtcaccaccacaaccagttgtaccagctcataaagataaaagtggcgctccaccagttagaagtatatatgatgacatttctagcccaggacttggatcaacacctttaacttcaagaagacagccaaacatttcagtaatgcagagtcctcttgttggagttacatctactcctggaacagggcaaagtatgtttagtccagcaagtatcggtcagccacgaaagacgacattatctcctgcccagttggatcctttttatactcaaggagattctttgactttcaagaaagaatcacccttcgaatgaacttcttgtgggtgtgaaccttgtaatttcgggggttttcccttccaagggcattcctgggctttccccttaaaccatttattttactcttaacaaaaattttg

SEQ ID NO: 25817 - DNA, 780 bp, Homo sapiens
tacgcaaccccataaggtagcacgccgttacccgtggggagcgtttccgccatttttgaaaattaattgggaaggtactggttttaagtgtagttgccgacgcaatggcagcctttgcagtggaacctcaggggcccgcgttaggatctgaaccaatgatgctgggttcacccacatctccaaagccaggagttaatgcccagttcttacctggatttttaatgggggatttgccagctccggtgactccacaacctcgatcaattagtggcccttcagtaggagtaatggaaatgagatcacctttacttgcaggtgggtcaccaccacaaccagttgtaccagctcataaagataaaagtggcgctccaccagttagaagtatatatgatgacatttctagcccaggacttggatcaacacctttaacttcaagaagacagggtccccaacagggtcctgctcagttgcccaggctagagtgcagcggcacagtcataactctgcagccttgaactcctgggttcaaccaatcctccctgtctcaaaaataaaataataaaaactaaaaaattaaaaaattgtttgttgcaagaaccactggcttctaaatttgtgcaaggttttattacttctctgatgatacagacaaaggcttacagatattgctgtattcaaaatgtttgaaagactcgtgggtcataatttatagagaatgtttttgatttgaaagttggtaagaatattattgctagattagagcccaaattagttatgccc

SEQ ID NO: 25818 - DNA, 1644 bp, Homo sapiens
tacgcaaccccataaggtagcacgccgttacccgtggggagcgtttccgccatttttgaaaattaattgggaaggtactggttttaagtgtagttgccgacgcaatggcagcctttgcagtggaacctcaggggcccgcgttaggatctgaaccaatgatgctgggttcacccacatctccaaagccaggagttaatgcccagttcttacctggatttttaatgggggatttgccagctccggtgactccacaacctcgatcaattagtggcccttcagtaggagtaatggaaatgagatcacctttacttgcaggtgggtcaccaccacaaccagttgtaccagctcataaagataaaagtggcgctccaccagttagaagtatatatgatgacatttctagcccaggacttggatcaacacctttaacttcaagaagacagccaaacatttcagtaatgcagagtcctcttgttggagttacatctactcctggaacagggcaaagtatgtttagtccagcaagtatcggtcagccacgaaagacgacattatctcctgcccagttggatcctttttatactcaaggagattctttgacttcagaagatcacctcgatgactcttgggtgactgtatttgggtttcctcaagcatctgcttcctacatattactacaatttgcacagtatgggaatatcttaaaacatgtgatgtctaatacaggaaattggatgcatattcgttatcaatctaaactgcaggctcggaaagccttaagcaaagatgggaggattttggagaatccatcatgattggtgtaaaaccatgtattgacaaaagtgttatggaaagcagtgacagatgtgctttatcatctccatctttagcctttacaccaccaatcaaaactctaggtacaccaacacaacctggaagtactcctaggatttctaccatgagacctcttgctacagcatacaaagcctctactagtgattatcaggttatttctgacagacaaacgccaaaaaaagatgaaagtcttgtatccaaagcaatggagtacatgtttggctggtagtagaacaccaagaaggaggttgctacactaaaacagagttagcagagtgctgctggttccttcggttagttatataactgttcctgcagtattggatagctatctcatacttcttttagaaagaagcctttttcattaaggatacaacctatttgtagctcgcactttaaaagatgcttgagatacattttaaagaaaactaaaaatccctgtaaataggattttgtgctttctgtaacagtgcatgcttcagcacagaaaactcagcattgattattgtaaattaaataactgaaattgtggtgagacgtcatagtcttcatgagaacgtgggggtgaatttcatgaaggggaactatagttatttctaccgacacaaatattataattagcaatttgaattatggtcttttaatttagatagtatttaatattttaattatccttgtttgtatatgtcctgtcacagagtgtcctcttggtgtattctaaaacgagcattcttttaaaaaacctaaagtttcttgataataaacattgtcaatgataaaaaaaaaaaa

SEQ ID NO: 25819 - DNA, 1378 bp, Homo sapiens
  misc_feature (1286)..(1286): n is a, c, g, or t
  misc_feature (1289)..(1289): n is a, c, g, or t
  misc_feature (1291)..(1291): n is a, c, g, or t
  misc_feature (1298)..(1298): n is a, c, g, or t
tacgcaaccccataaggtagcacgccgttacccgtggggagcgtttccgccatttttgaaaattaattgggaaggtactggttttaagtgtagttgccgacgcaatggcagcctttgcagtggaacctcaggggcccgcgttaggatctgaaccaatgatgctgggttcacccacatctccaaagccaggagttaatgcccagttcttacctggatttttaatgggggatttgccagctccggtgactccacaacctcgatcaattagtggcccttcagtaggagtaatggaaatgagatcacctttacttgcaggtgggtcaccaccacaaccagttgtaccagctcataaagataaaagtggcgctccaccagttagaagtatatatgatgacatttctagcccaggacttggatcaacacctttaacttcaagaagacagccaaacatttcagtaatgcagagtcctcttgttggagttacatctactcctggaacagggcaaagtatgtttagtccagcaagtatcggtcagccacgaaagacgacattatctcctgcccagttggatcctttttatactcaaggagattctttgacttcagaagatcacctcgatgactcttgggtgactgtatttgggtttcctcaagcatctgcttcctacatattactacaatttgcacagtatgggaatatcttaaaacatgtgatgtctaatacaggaaattggatgcatattcgttatcaatctaaactgcaggctcggaaagccttaagcaaagatgggaggattttggagaatccatcatgattggtgtaaaaccatgtattgacaaaagtgttatggaaagcagtgacagatgtgctttatcatctccatctttagcctttacaccaccaatcaaaactctaggtacaccaacacaacctggaagtactcctaggatttctaccatgagacctcttgctacagcatacaaagcctctactagtgattatcaggttatttctgacagacaaacgccaaaaaaagatgaaagtcttgtatccaaagcaatggagtacatgtttggctggtagtagaacaccaagaaggaggttgctacactaaaacagagttagcagagtgctgctggttccttcggttagttatataactgttcctgcagtattggatagctatctcatacttcttttagaaagaagcctttttcattaaggatacaacctatttgtagctcgcactttaaaagatgcttgagatacattttaagaactaaanccngnaaagggntgggtctggacgggtggtccgaaaccgtgtttggataaaacgcaggggggggcatcaaaggggggcagggatttcccata

SEQ ID NO: 25820 - DNA, 1914 bp, Homo sapiens
aattttatatctctcccaacattctctcagcatttagttctggttgctaaatgaagctatttgagatttccttagtttaattagaatctgttttaaaaaatctttattgagttctagagagattctgttctcatttattgattggatattgtctttgttttagaaggattttaaactattttaatccttaattttcttatatttaaaggaactaaaatggataatttaccagttttggaactttctactggtagtggtagggatatgctgtcttttattgtttagactgatttgaatctatagtgtttcatggtttctaagtatctgttgaaaatcaaattttgtcacccttctgtttttctgtatgaacctggtcattttaaaaattaccattatctctgttatttcaaatattgtacattagaaactaaaaacaaatagttaacatgtcaccttttacagaagatagtctttttttttttttttaacataatatgacttttcttattttaaacaaatactaagggatctagtaaattttaggttaatactgtttaacttatggggaaaaaagagtgcctttgtactttgagctaattagaggcatctctagcacatgataaaaattcagttatccattgaatgaagccttttaacacttactgtatttatgttttgcatttttaccataacactttcttctgtttgtgtagccaaacatttcagtaatgcagagtcctcttgttggagttacatctactcctggaacagggcaaagtatgtttagtccagcaagtatcggtcagccacgaaagacgacattatctcctgcccagttggatcctttttatactcaaggagattctttgacttcagaagatcacctcgatgactcttgggtgactgtatttgggtttcctcaagcatctgcttcctacatattactacaatttgcacagtatgggaatatcttaaaacatgtgatgtctaatacaggaaattggatgcatattcgttatcaatctaaactgcaggctcggaaagccttaagcaaagatgggaggattttggagaatccatcatgattggtgtaaaaccatgtattgacaaaagtgttatggaaagcagtgacagatgtgctttatcatctccatctttagcctttacaccaccaatcaaaactctaggtacaccaacacaacctggaagtactcctaggatttctaccatgagacctcttgctacagcatacaaagcctctactagtgattatcaggttatttctgacagacaaacgccaaaaaaagatgaaagtcttgtatccaaagcaatggagtacatgtttggctggtagtagaacaccaagaaggaggttgctacactaaaacagagttagcagagtgctgctggttccttcggttagttatataactgttcctgcagtattggatagctatctcatacttcttttagaaagaagcctttttcattaaggatacaacctatttgtagctcgcactttaaaagatgcttgagatacattttaaagaaaactaaaaatccctgtaaataggattttgtgctttctgtaacagtgcatgcttcagcacagaaaactcagcattgattattgtaaattaaataactgaaattgtggtgagacgtcatagtcttcatgagaacgtgggggtgaatttcatgaaggggaactatagttatttctaccgacacaaatattataattagcaatttgaattatggtcttttaatttagatagtatttaatattttaattatccttgtttgtatatgtcctgtcacagagtgtcctcttggtgtattctaaaacgagcattcttttaaaaaacctaaagtttcttgataataaacattgtcaatgataaaaaaaaaaaa

SEQ ID NO: 25821 - DNA, 1598 bp, Homo sapiens
tacgcaaccccataaggtagcacgccgttacccgtggggagcgtttccgccatttttgaaaattaattgggaaggtactggttttaagtgtagttgccgacgcaatggcagcctttgcagtggaacctcaggggcccgcgttaggatctgaaccaatgatgctgggttcacccacatctccaaagccaggagttaatgcccagttcttacctggatttttaatgggggatttgccagctccggtgactccacaacctcgatcaattagtggcccttcagtaggagtaatggaaatgagatcacctttacttgcaggtgggtcaccaccacaaccagttgtaccagctcataaagataaaagtggcgctccaccagttagaagtatatatgatgacatttctagcccaggacttggatcaacacctttaacttcaagaagacagccaaacatttcagtaatgcagagtcctcttgttggagttacatctactcctggaacagggcaaagtatgtttagtccagcaagtatcggtcagccacgaaagacgacattatctcctgcccagttggatcctttttatactcaaggagattctttgacttcagaagatcacctcgatgactcttgggtgactgtatttgggtttcctcaagcatctgcttcctacatattactacaatttgcacagtatgggaatatcttaaaacatgtgtgcaggctcggaaagccttaagcaaagatgggaggattttggagaatccatcatgattggtgtaaaaccatgtattgacaaaagtgttatggaaagcagtgacagatgtgctttatcatctccatctttagcctttacaccaccaatcaaaactctaggtacaccaacacaacctggaagtactcctaggatttctaccatgagacctcttgctacagcatacaaagcctctactagtgattatcaggttatttctgacagacaaacgccaaaaaaagatgaaagtcttgtatccaaagcaatggagtacatgtttggctggtagtagaacaccaagaaggaggttgctacactaaaacagagttagcagagtgctgctggttccttcggttagttatataactgttcctgcagtattggatagctatctcatacttcttttagaaagaagcctttttcattaaggatacaacctatttgtagctcgcactttaaaagatgcttgagatacattttaaagaaaactaaaaatccctgtaaataggattttgtgctttctgtaacagtgcatgcttcagcacagaaaactcagcattgattattgtaaattaaataactgaaattgtggtgagacgtcatagtcttcatgagaacgtgggggtgaatttcatgaaggggaactatagttatttctaccgacacaaatattataattagcaatttgaattatggtcttttaatttagatagtatttaatattttaattatccttgtttgtatatgtcctgtcacagagtgtcctcttggtgtattctaaaacgagcattcttttaaaaaacctaaagtttcttgataataaacattgtcaatgataaaaaaaaaaaa

SEQ ID NO: 25822 - DNA, 1502 bp, Homo sapiens
tacgcaaccccataaggtagcacgccgttacccgtggggagcgtttccgccatttttgaaaattaattgggaaggtactggttttaagtgtagttgccgacgcaatggcagcctttgcagtggaacctcaggggcccgcgttaggatctgaaccaatgatgctgggttcacccacatctccaaagccaggagttaatgcccagttcttacctggatttttaatgggggatttgccagctccggtgactccacaacctcgatcaattagtggcccttcagtaggagtaatggaaatgagatcacctttacttgcaggtgggtcaccaccacaaccagttgtaccagctcataaagataaaagtggcgctccaccagttagaagtatatatgatgacatttctagcccaggacttggatcaacacctttaacttcaagaagacagccaaacatttcagtaatgcagagtcctcttgttggagttacatctactcctggaacaggtttcctcaagcatctgcttcctacatattactacaatttgcacagtatgggaatatcttaaaacatgtgatgtctaatacaggaaattggatgcatattcgttatcaatctaaactgcaggctcggaaagccttaagcaaagatgggaggattttggagaatccatcatgattggtgtaaaaccatgtattgacaaaagtgttatggaaagcagtgacagatgtgctttatcatctccatctttagcctttacaccaccaatcaaaactctaggtacaccaacacaacctggaagtactcctaggatttctaccatgagacctcttgctacagcatacaaagcctctactagtgattatcaggttatttctgacagacaaacgccaaaaaaagatgaaagtcttgtatccaaagcaatggagtacatgtttggctggtagtagaacaccaagaaggaggttgctacactaaaacagagttagcagagtgctgctggttccttcggttagttatataactgttcctgcagtattggatagctatctcatacttcttttagaaagaagcctttttcattaaggatacaacctatttgtagctcgcactttaaaagatgcttgagatacattttaaagaaaactaaaaatccctgtaaataggattttgtgctttctgtaacagtgcatgcttcagcacagaaaactcagcattgattattgtaaattaaataactgaaattgtggtgagacgtcatagtcttcatgagaacgtgggggtgaatttcatgaaggggaactatagttatttctaccgacacaaatattataattagcaatttgaattatggtcttttaatttagatagtatttaatattttaattatccttgtttgtatatgtcctgtcacagagtgtcctcttggtgtattctaaaacgagcattcttttaaaaaacctaaagtttcttgataataaacattgtcaatgataaaaaaaaaaaa

SEQ ID NO: 25823 - DNA, 1625 bp, Homo sapiens
tacgcaaccccataaggtagcacgccgttacccgtggggagcgtttccgccatttttgaaaattaattgggaaggtactggttttaagtgtagttgccgacgcaatggcagcctttgcagtggaacctcaggggcccgcgttaggatctgaaccaatgatgctgggttcacccacatctccaaagccaggagttaatgcccagttcttacctggatttttaatgggggatttgccagctccggtgactccacaacctcgatcaattagtggcccttcagtaggagtaatggaaatgagatcacctttacttgcaggtgggtcaccaccacaaccagttgtaccagctcataaagataaaagtggcgctccaccagttagaagtatatatgatgacatttctagcccaggacttggatcaacacctttaacttcaagaagacagggtccccaacagggtcctgctcagttgcccaggctagagtgcagcggcacagtcataactctgcagccttgaactcctgggttcaaccaatcctcctgcctcaactgtcctattgggatatagccaaacatttcagtaatgcagagtcctcttgttggagttacatctactcctggaacaggtttcctcaagcatctgcttcctacatattactacaatttgcacagtatgggaatatcttaaaacatgtgatgtctaatacaggaaattggatgcatattcgttatcaatctaaactgcaggctcggaaagccttaagcaaagatgggaggattttggagaatccatcatgattggtgtaaaaccatgtattgacaaaagtgttatggaaagcagtgacagatgtgctttatcatctccatctttagcctttacaccaccaatcaaaactctaggtacaccaacacaacctggaagtactcctaggatttctaccatgagacctcttgctacagcatacaaagcctctactagtgattatcaggttatttctgacagacaaacgccaaaaaaagatgaaagtcttgtatccaaagcaatggagtacatgtttggctggtagtagaacaccaagaaggaggttgctacactaaaacagagttagcagagtgctgctggttccttcggttagttatataactgttcctgcagtattggatagctatctcatacttcttttagaaagaagcctttttcattaaggatacaacctatttgtagctcgcactttaaaagatgcttgagatacattttaaagaaaactaaaaatccctgtaaataggattttgtgctttctgtaacagtgcatgcttcagcacagaaaactcagcattgattattgtaaattaaataactgaaattgtggtgagacgtcatagtcttcatgagaacgtgggggtgaatttcatgaaggggaactatagttatttctaccgacacaaatattataattagcaatttgaattatggtcttttaatttagatagtatttaatattttaattatccttgtttgtatatgtcctgtcacagagtgtcctcttggtgtattctaaaacgagcattcttttaaaaaacctaaagtttcttgataataaacattgtcaatgataaaaaaaaaaaa

SEQ ID NO: 25824 - DNA, 1374 bp, Homo sapiens
tacgcaaccccataaggtagcacgccgttacccgtggggagcgtttccgccatttttgaaaattaattgggaaggtactggttttaagtgtagttgccgacgcaatggcagcctttgcagtggaacctcaggggcccgcgttaggatctgaaccaatgatgctgggttcacccacatctccaaagccaggagttaatgcccagttcttacctggatttttaatgggggatttgccagctccggtgactccacaacctcgatcaattagtggcccttcagtaggagtaatggaaatgagatcacctttacttgcaggtgggtcaccaccacaaccagttgtaccagctcataaagataaaagtggcgctccaccagttagaagtatatatgatgacatttctagcccaggacttggatcaacacctttaacttcaagaagacagatgtctaatacaggaaattggatgcatattcgttatcaatctaaactgcaggctcggaaagccttaagcaaagatgggaggattttggagaatccatcatgattggtgtaaaaccatgtattgacaaaagtgttatggaaagcagtgacagatgtgctttatcatctccatctttagcctttacaccaccaatcaaaactctaggtacaccaacacaacctggaagtactcctaggatttctaccatgagacctcttgctacagcatacaaagcctctactagtgattatcaggttatttctgacagacaaacgccaaaaaaagatgaaagtcttgtatccaaagcaatggagtacatgtttggctggtagtagaacaccaagaaggaggttgctacactaaaacagagttagcagagtgctgctggttccttcggttagttatataactgttcctgcagtattggatagctatctcatacttcttttagaaagaagcctttttcattaaggatacaacctatttgtagctcgcactttaaaagatgcttgagatacattttaaagaaaactaaaaatccctgtaaataggattttgtgctttctgtaacagtgcatgcttcagcacagaaaactcagcattgattattgtaaattaaataactgaaattgtggtgagacgtcatagtcttcatgagaacgtgggggtgaatttcatgaaggggaactatagttatttctaccgacacaaatattataattagcaatttgaattatggtcttttaatttagatagtatttaatattttaattatccttgtttgtatatgtcctgtcacagagtgtcctcttggtgtattctaaaacgagcattcttttaaaaaacctaaagtttcttgataataaacattgtcaatgataaaaaaaaaaaa

SEQ ID NO: 25825 - DNA, 1946 bp, Homo sapiens
  misc_feature (1615)..(1615): n is a, c, g, or t
  misc_feature (1857)..(1858): n is a, c, g, or t
  misc_feature (1917)..(1917): n is a, c, g, or t
acgcgggtttttaaggccgaaccctaggcaggctctgcagaggcagcggttggaggcgcggtgggtgtctgcgggggtctcgcggggcggctgcggtgtttcaccgggaaaggctcgaggagagcgcggctcacgagagataacccagctgtgctccctggaaccttcaatttcaaggcctccctgcctctactaggcgccttagctcactatggggaaccacttgactgagatggcgcccactgcctcctccttcttgccccacttccaagccctgcatgtcgtggtcattgggctggactctgctggaaagacctccctcctttaccgcctcaagttcaaggagtttgtccagagtgtccccaccaaaggcttcaacaccgagaagatccgggtgcccctcgggggatcgcgtggcatcaccttccaagtgtgggacgtcggggggcaggagaagctgcgaccactgtggcgctcttatacccgccggacagacggtctagtgtttgtggtggacgctgcggaggctgagcggctggaggaagccaaggtggagttgcaccgaatcagccgggcctcggacaaccagggcgtgccagtgctggtgctggccaacaagcaggaccagcccggggcactgagcgctgctgaggtggagaagaggctggcagtccgagagctagcagccgccactctcactcatgtgcaaggctgcagcgctgtggacggtctgggcctgcagcagggccttgagcgcctctatgagatgatcctcaagaggaagaaggcagctcggggtggcaagaagagacggtgacccaagccccccctccctttcctcccacctagtaggggtctgcacacttggacagcagggtgggaccagcctgtgacctctcagtcagactggggtgcaggacctgtccacctcaatgaaggagagaggagcatggggtgtcccgttttggtgccacactggggtggggatgggagatgggatgtctttgcatatctctctcatcctctctggagaagtgggcgctgcaggactgtggagacgtaaatgtaaactgtgactctacctcgaccctgtttcttatttttcttctctggctaaaaatttttaattggatgtgtttgggggcggggggatggaagtgacttggagaatgtgtttgggatgaaataactatctccccttcctctgtcccccaactggggagtctccccaggctgcttttctaggaataccagtcacatagtttttatttttgtgtctgtgaaagtgccaagaacccctccccacatttgtagatccatgaccctttttataagctgtgtgtgtcctctgtattattgttattaactattttttagcatttgcctgtaagttattaaagactgataactgtagctcttaccttggtctggggcattttcctctccttatcttgccccagagacaattcaagatttctatatggggttgtggcgcagggggagggagatttatcttgaagctgaatttgcaaagcaagcacttataaaaattagattgtgtgttacgggatggcttgtgaaaattataggggggagtggaaaacccctcaagctnccgtcaaagaagttgatattttaacagagtacagagtcctcaattccttaaaactcggcaaaataagccagacaacaggaatgtgcagctactatgaaatgctccaagcaggatggatgccttcatgcatgccaaatccagagaccaaaagctatcaggtcactaaaactgaaaactgaccagtgtctaatcctttcctcctctttcagcaactacagactgagttacctagggaaaacaanncaaaatacgatgtctctttgaagtcctcagattcaggtactgtttttccaccgtcacanagtttgatgttgtagaatggttcttaccg

SEQ ID NO: 25826 - DNA, 1934 bp, Homo sapiens
  misc_feature (1603)..(1603): n is a, c, g, or t
  misc_feature (1845)..(1846): n is a, c, g, or t
  misc_feature (1905)..(1905): n is a, c, g, or t
cataggctaggtagaggcccgtggttatcggcagcggttggaggcgcggtgggtgtctgcgggggtctcgcggggcggctgcggtgtttcaccgggaaaggctcgaggagagcgcggctcacgagagataacccagctgtgctccctggaaccttcaatttcaaggcctccctgcctctactaggcgccttagctcactatggggaaccacttgactgagatggcgcccactgcctcctccttcttgccccacttccaagccctgcatgtcgtggtcattgggctggactctgctggaaagacctccctcctttaccgcctcaagttcaaggagtttgtccagagtgtccccaccaaaggcttcaacaccgagaagatccgggtgcccctcgggggatcgcgtggcatcaccttccaagtgtgggacgtcggggggcaggagaagctgcgaccactgtggcgctcttatacccgccggacagacggtctagtgtttgtggtggacgctgcggaggctgagcggctggaggaagccaaggtggagttgcaccgaatcagccgggcctcggacaaccagggcgtgccagtgctggtgctggccaacaagcaggaccagcccggggcactgagcgctgctgaggtggagaagaggctggcagtccgagagctagcagccgccactctcactcatgtgcaaggctgcagcgctgtggacggtctgggcctgcagcagggccttgagcgcctctatgagatgatcctcaagaggaagaaggcagctcggggtggcaagaagagacggtgacccaagccccccctccctttcctcccacctagtaggggtctgcacacttggacagcagggtgggaccagcctgtgacctctcagtcagactggggtgcaggacctgtccacctcaatgaaggagagaggagcatggggtgtcccgttttggtgccacactggggtggggatgggagatgggatgtctttgcatatctctctcatcctctctggagaagtgggcgctgcaggactgtggagacgtaaatgtaaactgtgactctacctcgaccctgtttcttatttttcttctctggctaaaaatttttaattggatgtgtttgggggcggggggatggaagtgacttggagaatgtgtttgggatgaaataactatctccccttcctctgtcccccaactggggagtctccccaggctgcttttctaggaataccagtcacatagtttttatttttgtgtctgtgaaagtgccaagaacccctccccacatttgtagatccatgaccctttttataagctgtgtgtgtcctctgtattattgttattaactattttttagcatttgcctgtaagttattaaagactgataactgtagctcttaccttggtctggggcattttcctctccttatcttgccccagagacaattcaagatttctatatggggttgtggcgcagggggagggagatttatcttgaagctgaatttgcaaagcaagcacttataaaaattagattgtgtgttacgggatggcttgtgaaaattataggggggagtggaaaacccctcaagctnccgtcaaagaagttgatattttaacagagtacagagtcctcaattccttaaaactcggcaaaataagccagacaacaggaatgtgcagctactatgaaatgctccaagcaggatggatgccttcatgcatgccaaatccagagaccaaaagctatcaggtcactaaaactgaaaactgaccagtgtctaatcctttcctcctctttcagcaactacagactgagttacctagggaaaacaanncaaaatacgatgtctctttgaagtcctcagattcaggtactgtttttccaccgtcacanagtttgatgttgtagaatggttcttaccg

SEQ ID NO: 25827 - DNA, 995 bp, Homo sapiens
acgcgggtttttaaggccgaaccctaggcaggctctgcagaggcagcggttggaggcgcggtgggtgtctgcgggggtctcgcggggcggctgcggtgtttcaccgggaaaggctcgaggagagcgcggctcacgagagataacccagctgtgctccctggaaccttcaatttcaaggcctccctgcctctactaggcgccttagctcactatggggaaccacttgactgagatggcgcccactgcctcctccttcttgccccacttccaagccctgcatgtcgtggtcattgggctggactctgctggaaagacctccctcctttaccgcctcaagttcaaggagtttgtccagagtgtccccaccaaaggcttcaacaccgagaagatccgggtgcccctcgggggatcgcgtggcatcaccttcctagtaggggtctgcacacttggacagcagggtgggaccagcctgtgacctctcagtcagactggggtgcaggacctgtccacctcaatgaaggagagaggagcatggggtgtcccgttttggtgccacactggggtggggatgggagatgggatgtctttgcatatctctctcatcctctctggagaagtgggcgctgcaggactgtggagacgtaaatgtaaactgtgactctacctcgaccctgtttcttatttttcttctctggctaaaaatttttaattggatgtgtttgggggcggggggatggaagtgacttggagaatgtgtttgggatgaaataactatctccccttcctctgtcccccaactggggagtctccccaggctgcttttctaggaataccagtcacatagtttttatttttgtgtctgtgaaagtgccaagaacccctccccacatttgtagatccatgaccctttttataagctgtgtgtgtcctctgtattattgttattaactattttttagcatttgcctgtaagttattaaagactgataactgta

SEQ ID NO: 25828 - DNA, 1893 bp, Homo sapiens
  misc_feature (4)..(4): n is a, c, g, or t
  misc_feature (1562)..(1562): n is a, c, g, or t
  misc_feature (1804)..(1805): n is a, c, g, or t
  misc_feature (1864)..(1864): n is a, c, g, or t
cggncggtcttaagctgttcttgcataggctcttaagcagcatggaaaaatggttgatggaaaataaagagcgcggctcacgagagataacccagctgtgctccctggaaccttcaatttcaaggcctccctgcctctactaggcgccttagctcactatggggaaccacttgactgagatggcgcccactgcctcctccttcttgccccacttccaagccctgcatgtcgtggtcattgggctggactctgctggaaagacctccctcctttaccgcctcaagttcaaggagtttgtccagagtgtccccaccaaaggcttcaacaccgagaagatccgggtgcccctcgggggatcgcgtggcatcaccttccaagtgtgggacgtcggggggcaggagaagctgcgaccactgtggcgctcttatacccgccggacagacggtctagtgtttgtggtggacgctgcggaggctgagcggctggaggaagccaaggtggagttgcaccgaatcagccgggcctcggacaaccagggcgtgccagtgctggtgctggccaacaagcaggaccagcccggggcactgagcgctgctgaggtggagaagaggctggcagtccgagagctagcagccgccactctcactcatgtgcaaggctgcagcgctgtggacggtctgggcctgcagcagggccttgagcgcctctatgagatgatcctcaagaggaagaaggcagctcggggtggcaagaagagacggtgacccaagccccccctccctttcctcccacctagtaggggtctgcacacttggacagcagggtgggaccagcctgtgacctctcagtcagactggggtgcaggacctgtccacctcaatgaaggagagaggagcatggggtgtcccgttttggtgccacactggggtggggatgggagatgggatgtctttgcatatctctctcatcctctctggagaagtgggcgctgcaggactgtggagacgtaaatgtaaactgtgactctacctcgaccctgtttcttatttttcttctctggctaaaaatttttaattggatgtgtttgggggcggggggatggaagtgacttggagaatgtgtttgggatgaaataactatctccccttcctctgtcccccaactggggagtctccccaggctgcttttctaggaataccagtcacatagtttttatttttgtgtctgtgaaagtgccaagaacccctccccacatttgtagatccatgaccctttttataagctgtgtgtgtcctctgtattattgttattaactattttttagcatttgcctgtaagttattaaagactgataactgtagctcttaccttggtctggggcattttcctctccttatcttgccccagagacaattcaagatttctatatggggttgtggcgcagggggagggagatttatcttgaagctgaatttgcaaagcaagcacttataaaaattagattgtgtgttacgggatggcttgtgaaaattataggggggagtggaaaacccctcaagctnccgtcaaagaagttgatattttaacagagtacagagtcctcaattccttaaaactcggcaaaataagccagacaacaggaatgtgcagctactatgaaatgctccaagcaggatggatgccttcatgcatgccaaatccagagaccaaaagctatcaggtcactaaaactgaaaactgaccagtgtctaatcctttcctcctctttcagcaactacagactgagttacctagggaaaacaanncaaaatacgatgtctctttgaagtcctcagattcaggtactgtttttccaccgtcacanagtttgatgttgtagaatggttcttaccg

SEQ ID NO: 25829 - DNA, 1413 bp, Homo sapiens
acgcgggtttttaaggccgaaccctaggcaggctctgcagaggcagcggttggaggcgcggtgggtgtctgcgggggtctcgcggggcggctgcggtgtttcaccgggaaaggctcgaggagagcgcggctcacgagagataacccagctgtgctccctggaaccttcaatttcaaggcctccctgcctctactaggcgccttagctcactatggggaaccacttgactgagatggcgcccactgcctcctccttcttgccccacttccaagccctgcatgtcgtggtcattgggctggactctgctggaaagacctccctcctttaccgcctcaagttcaaggagtttgtccagagtgtccccaccaaaggcttcaacaccgagaagatccgggtgcccctcgggggatcgcgtggcatcaccttccaagtgtgggacgtcggggggcaggagaagctgcgaccactgtggcgctcttatacccgccggacagacggtctagtgtttgtggtggacgctgcggaggctgagcggctggaggaagccaaggtggagttgcaccgaatcagccgggcctcggacaaccagggcgtgccagtgctggtgctggccaacaagcaggaccagcccggggcactgagcgctgctgaggtggagaagaggctggcagtccgagagctagcagccgccactctcactcatgtgcaaggctgcagcgctgtggacggtctgggcctgcagcagggccttgagcgcctctatgagatgatcctcaagaggaagaaggcagctcggggtggcaagaagagacggtgacccaagccccccctccctttcctcccacctagtaggggtctgcacacttggacagcagggtgggaccagcctgtgacctctcagtcagactggggtgcaggacctgtccacctcaatgaaggagagaggagcatggggtgtcccgttttggtgccacactggggtggggatgggagatgggatgtctttgcatatctctctcatcctctctggagaagtgggcgctgcaggactgtggagacgtaaatgtaaactgtgactctacctcgaccctgtttcttatttttcttctctggctaaaaatttttaattggatgtgtttgggggcggggggatggaagtgacttggagaatgtgtttgggatgaaataactatctccccttcctctgtcccccaactggggagtctccccaggctgcttttctaggaataccagtcacatagtttttatttttgtgtctgtgaaagtgccaagaacccctccccacatttgtagatccatgaccctttttataagctgtgtgtgtcctctgtattattgttattaactattttttagcatttgcctgtaagttattaaagactgataactgta

SEQ ID NO: 25830 - DNA, 1078 bp, Homo sapiens
acgcgggtttttaaggccgaaccctaggcaggctctgcagaggcagcggttggaggcgcggtgggtgtctgcgggggtctcgcggggcggctgcggtgtttcaccgggaaaggctcgaggagagcgcggctcacgagagataacccagctgtgctccctggaaccttcaatttcaaggcctccctgcctctactaggcgccttagctcactatggggaaccacttgactgagatggcgcccactgcctcctccttcttgccccacttccaagccctgcatgtcgtggtcattgggctggactctgctggaaagacctccctcctttaccgcctcaagttcaaggagtttgtccagagtgtccccaccaaaggcttcaacaccgagaagatccgggtgcccctcgggggatcgcgtggcatcaccttccaagtgtgggacgtcggggggcaggagaagctgcgaccactgtggcgctcttatacccgccggacagacggtctagtgtttgtggtggacgctgcggaggctgagcggctggaggaagccaaggtggagttgcaccgaatcagccgggcctcggacaaccagggcgtgccagtgctggtgctggccaacaagcaggaccagcccggggcactgagcgctgctgaggtggagaagaggctggcagtccgagagctagcagccgccactctcactcatgtgcaaggctgcagcgctgtggacggtctgggcctgcagcagggccttgagcgcctctatgagatgatcctcaagaggaagaaggcagctcggggtggcaagaagagacggtgacccaagccccccctccctttcctcccacctagtaggggtctgcacacttggacagcagggtgggaccagcctgtgacctctcagtcagactggggtgcaggacctgtccacctcaatgaaggagagaggagcatggggtgtcccgttttggtgccacactggggtggggatgggaatacggattttaaaacttttttggggttttagaccaacatttaaaattggtgaaaaccgttttaactaaaaaaacttaaccggtta

SEQ ID NO: 25831 - DNA, 583 bp, Homo sapiens
ttttaaacatatgagttagatgtgtgctgtttattttcttttattgcttacaactaaacttggtagtttatggagtattttctaagactgttatttataaaatgtaataaaaccaaattattcatatatttttatattaaaccctctcagataattctgttaatatgatgagaactggaaatatagacctcttaaacatttttgttttttcttgataggaagaagaaaagaagtcggtcagttatccttctctccttagccacataacttcttctctcatgaatcatccagtcattccaatggcaaataagttctcctcacctacccttgagctgcaaggtgaattctctccattacagtcatctttgccttgtgacattcatctggttaatttgagaacaatacagtcaaaggtgggcaatgggcactccaatgaggcagccttgatcctccacagaaaagggtttgattgtcggttctctagcaaaggcacagggctgttttgttctactactcagggaaaggtaagttgaaaaggttatttttgcttactgttagtgtgctttgaaatcctctttctgca

SEQ ID NO: 25832 - DNA, 7972 bp, Homo sapiens
ggcggggccagccgcccgctcggctcaggcgctgcgggcgcctattgacccagcggctgctgcgccgccgctgtctcctcctgctcgtggcgggcggtgctggagcgccaagtggcgctggagaaccggcgcttcctttcgccgcttccgccgccatctccgcgtttgtggggcgggaaagagggagggggctagcggctgcagctggagcgggcttctctccggggacggtcctttcctccctgctctccttttccttctttccgcgttgccgccgcccgccccctgcgcctccccgcggagcctgggtccgggagggggaaggtaggggcggcggggggcgggagagtctggcgagcggacgctagctctgaggaaactcatcaatccgtgagccccggagtccggggtgcacatcggcccagccgcagcgtcggcggcggcggcggcagcagcacgaaggggctcagtcggggtaggcgggggcggtgccggtgccgcgggggcgggcccgaccgtcccgcccagaagttgtagggcttggctcctcgcgatcttgttcctttcccctccgcttctctgacctagctgcgcggccccggcccgggagctgccgaacccgcgcctcccctgggtgaggaggacacgcctgccctcgtcgagaaaacttttcctgccgactcagttggggcggcggtggcaggaagtgcgggcagcgacctctcctccgcctgccccgcgcgccctgccggaggtcggcgctgagcttgcgatcaagtttgtgggggccccccttcccagttgccggcgagtctcgcctcgagaggggcgcccgaccccggggagggcggcaggccagggcgaaggccaagggcgttttgtggcgccggagactaggtgcggagcaaggcggggactcgcacccgcatccgagagcgcggaggtcgcgcagcccgggagaagggagcctccggcggctgcttcctagagtccacagtgcgctgtctcctttggctgaggagagtgtcctggccccgagtctatcgaggaaaatgaagttaagccgccagttcaccgtgttcggcagtgcgatcttctgtgtggtgattttctcgctctacctgatgctggaccggggtcacttagactaccccaggaacccgcgccgcgagggctccttccctcagggccagctctcaatgttgcaagaaaaaatagaccatttggagcgtttgctagctgagaataatgagatcatctcaaatattagagactcagtcatcaatttgagtgagtctgtggaggatggtccgaaaagttcacaaagcaatttcagccaaggtgctggctcacatcttctgccctcacaattatccctctcagttgacactgcagactgtctgtttgcttcacaaagtggaagtcacaattcagatgtgcagatgttggatgtttacagtctaatttcttttgacaatccagatggtggagtttggaagcaaggatttgacattacttatgaatctaatgaatgggacactgaaccccttcaagtctttgtggtgcctcattcccataacgacccaggttggttgaagactttcaatgactactttagagacaagactcagtatatttttaataacatggtcctaaagctgaaagaagactcacggaggaagtttatttggtctgagatctcttacctttcaaagtggtgggatattatagatattcagaagaaggatgctgttaaaagtttaatagaaaatggtcagcttgaaattgtgacaggtggctgggttatgcctgatgaagctactccacattattttgccttaattgatcaactaattgaaggacatcagtggctggaaaataatataggagtgaaacctcggtccggctgggctattgatccctttggacactcaccaacaatggcttatcttctaaaccgtgctggactttctcacatgcttatccagagagttcattatgcagttaaaaaacactttgcactgcataaaacattggagtttttttggagacagaattgggatctgggatctgtcacagatattttatgccacatgatgcccttctacagctatgacatccctcacacttgtggacctgatcctaaaatatgctgccagtttgattttaaacgtcttcctggaggcagatttggttgtccctggggagtccccccagaaacaatacatcctggaaatgtccaaagcagggctcggatgctactagatcagtaccgaaagaagtcaaagctttttcgtaccaaagttctcctggctccactaggagatgatttccgctactgtgaatacacggaatgggatttacagtttaagaattatcagcagctttttgattatatgaattctcagtccaagtttaaagttaagatacagtttggaactttatcagatttttttgatgcgctggataaagcagatgaaactcagagagacaagggccaatcgatgttccctgttttaagtggagattttttcacttatgccgatcgagatgatcattactggagtggctattttacatccagacccttttacaaacgaatggacagaatcatggaatctcatttaagggctgctgaaattctttactatttcgccctgagacaagctcacaaatacaagataaataaatttctctcatcatcactttacacggcactgacagaagccagaaggaatttgggactgtttcaacatcatgatgctatcacaggaactgcaaaagactgggtggttgtggattatggtaccagactttttcattcgttaatggttttggagaagataattggaaattctgcatttcttcttattttgaaggacaaactcacatacgactcttactctcctgataccttcctggagatggatttgaaacaaaaatcacaagattctctgccacaaaaaaatataataaggctgagtgcggagccaaggtaccttgtggtctataatcctttagaacaagaccgaatctcgttggtctcagtctatgtgagttccccgacagtgcaagtgttctctgcttcaggaaaacctgtggaagttcaagtcagcgcagtttgggatacagcaaatactatttcagaaacagcctatgagatctcttttcgagcacatataccgccattgggactgaaagtgtataagattttggaatcagcaagttcaaattcacatttagctgattatgtcttgtataagaataaagtagaagatagcggaattttcaccataaagaatatgataaatactgaagaaggtataacactagagaactcctttgttttacttcggtttgatcaaactggacttatgaagcaaatgatgactaaagaagatggtaaacaccatgaagtaaatgtgcaattttcatggtatggaaccacaattaaaagagacaaaagtggtgcctacctcttcttacctgatggtaatgccaagccttatgtttacacaacaccgccctttgtcagagtgacacatggaaggatttattcggaagtgacttgcttttttgaccatgttactcatagagtccgactataccacatacagggaatagaaggacagtctgtggaagtttccaatattgtggacatccgaaaagtatataaccgtgagattgcaatgaaaatttcttctgatataaaaagccaaaatagattttatactgacctaaatgggtaccagattcaacctagaatgacactgagcaaattgcctcttcaagcaaatgtctatcccatgaccacaatggcctatatccaggatgccaaacatcgtttgacactgctctctgctcagtctttaggggtttcgagtttgaatagtggtcagattgaagttatcatggatcgaagactcatgcaagatgataatcgtggccttgagcaaggtatccaggataacaagattacagctaatctatttcgaatactactagaaaaaagaagtgctgttaatacggaagaagaaaagaagtcggtcagttatccttctctccttagccacataacttcttctctcatgaatcatccagtcattccaatggcaaataagttctcctcacctacccttgagctgcaaggtgaattctctccattacagtcatctttgccttgtgacattcatctggttaatttgagaacaatacagtcaaaggtgggcaatgggcactccaatgaggcagccttgatcctccacagaaaagggtttgattgtcggttctctagcaaaggcacagggctgttttgttctactactcagggaaagatattggtacagaaacttttaaacaagtttattgtcgaaagtctcacaccttcatcactatccttgatgcattcacctcccggcactcagaatataagtgagatcaacttgagtccaatggaaatcagcacattccgaatccagttgaggtgaacctgactttcacatttggattgagaatcattggcttttatacctttcttggtttgacgtgcaataaagaagcacattattttagcttctggctactgtgagaacatgaattctgtgattctgtgggttttttcttttttcttttaccagtacagtaagaaaaaaaaaaaaaaaaaaaaagccatgctatcaatcaagattctttttttttaaactttctcccatgaactaccaccatcagtatgaattgatgcaacaaatgaagaaatatttaaagacagcctctcaacagattgtatctcaggttaaatgctaactaattatgtctgtgttgggggttgcgaagagattcttaaaagtatctgtgtgttgatcatcagttttacaaaaacacctatttggctgaaatggaataaaatgtttgtgggtaaaagctaatggccaaaatggttgcaatcattcatactagttagaaaaattatgtgttgaaataagtggaaaagtgcaatccatccacccttatgattaacgtagatgatttttatacctttttctgatgtacctcttgaccttctccttcccttcctaccctttctaagtatttccagaaatacctgattttgaatcattcaacagtagaaaaagaggcatattttcattacttgacaatgtgggatgggtgcaatttattccatcttcactaaaatagaagcaattccataggtaccataaacctattttaggtaccacaaggtgtctttttacacagctcatttgaatacaggtgttctgagaaggggtttctattttaaaattaccatatcaaaataaatgtgccttatttttttataagtcttgttaaatcagtgtccatattactgtttggggaagggggaatgttgtggggtctgggagagggtgggtactttctatgacacataaattgtgtaatttttgcctgacaatgctggccacattctgatctgtttcattaaatttgtggtgatgttactctaaacattttgactatttgaatgtactgagatgtcagaaaacaaaacaaggaaggaaaatattgttaattaaaatgtgctgctgccaaggaaactgcaacttgaagcaaggattttgtaaaatgcaaaatccagctactgtttccatttcacagtagttaactatattaaagagagaatgctttaaaattgatcttgttttgaaacccacttttatgtagctcatcatggtttatcttactaaggaatatgtttgttcattcagttctcaacttttgtatgtgctaaccttaaagtgaagttctgagcccgtgtgccattacagtgcttttaataaaatttatttgggattattgtttccttaacattaaaataatagcgacatttagactatgcaattttagcatagaaaggagtctttgagtatgtacagttttgaaaattctctttgagataattgatttcatattctgtggctttcaacctccatttacctcttgtcattccaacatctttatagagaaataaaaacccaatttctctttcaccatttagtttgattatcatctggattttcactcaagatgcagctcctaagattattgttatgttaaattcataaactccttcacctttaataattaaggaaacaataccagtgttgataaagatattacaaggggtaatttcatgcaataaacatgtaccgtaagttttcttccacatattttgggaaaaaactaaaaaaagaaaaaggacttcctttttgtggacatctacagatgttagggttgccagaagcaaatcccaggaatgagatcagtattttcattgcatcttaaatgtataaccttcctgtgggagttcagtttgtctgtggttaagtgggtgtgcttaatcattctcgaaattgtgatcagatgaaataaaaaaaaaatcttgatgcaataacagtggttttgccacttctggttgtttgcgatggatctgtcccatgtcagtctggggttttattcagcttgtgttgctaccagcagttcacaggtaaagcagaaattctctttaaccagcaagtttctgctttttaaggttacttttagaataaatcatcagggaaacagagaggatgctttgctttgggttgtagtcaaaaactgattaaataatttaatgtctctggcacacactaaaaaccatacacttcagttgtgatctcagtggcatatttatttggttaggtttcgttacatttattattacagatgttcagttgaccaagtagttcagtgttttctttcctttttttggaaattttagtttgagtttgtgactgcagtgttcaagaactcagcatccttgttttctacaaatactgattaaaataaaatgctgtaaaatgtgatgtaaaacattatcatgatcttcccatgcctttgttgtacttgtgccgaagtgttttgatattcctttgtctggaagaaaatgtttgctttcattttgatcattttgttcaccttggaatcaacaggttttgatattttctcttggaagattttatatctttttgggaatatgtaatataagatctctaataaaagataatcttatcatgtaaaaaaaaaaaaaaaaaaaaaaaaaaaaaaaaaaaaaaaaaaaaaaaaaaaaaaaaaaaaaaaaaaaaaaaaaaacccaacaaaacaaaaaaaaaaaaaaaaaccacaaaaaaagacaagaaaacgaaaaaaaagagaaggcaacgcagaaacagccgacgcgacaccaccaccaggacacagcacgaaacacgacagcgctccaccacaacaccacaagcgcaggaacacagagacacagagaacgaacgcacccacgacacgaaaacaaacgaacaaaaagaaaccgcgaggcacacacacagggaacaaaaagagaacagaaaagagaaccaacaacgaaccgaagaaatagagcgaacaagcgaggccaccgcaagcacagacacaaacaagagcacacacccaggccaagaacacaacacacacaaaagccaacgaaccactaagcgaacaggaagacacaacgccggcgcagcgagaggcaagcgacagacgacaacgacgaacgagcaacgaaggacagagaagacccccgcgggccgcacagcgcagaacgacacagcaaaggacgacaccaacgcgaaagaaacgtcaacaaccgaccacaagagcgaccaggacagacagcgaacacaaagacacggaggagacagaccagcccaagacgccacggcacaggaacggaccccaaggagaagaaacgcacccgcagcacccaccgcagagaccgagcagagcaaaccaaccaagagaaacgggacaggacaaacaaagacacggccaccgcgacacaggaggaccactcagccgaagaacaggaaagaaagcacacacgaaccgaacaaaaaaaacaaaa

SEQ ID NO: 25833 - DNA, 7165 bp, Homo sapiens
ggcggggccagccgcccgctcggctcaggcgctgcgggcgcctattgacccagcggctgctgcgccgccgctgtctcctcctgctcgtggcgggcggtgctggagcgccaagtggcgctggagaaccggcgcttcctttcgccgcttccgccgccatctccgcgtttgtggggcgggaaagagggagggggctagcggctgcagctggagcgggcttctctccggggacggtcctttcctccctgctctccttttccttctttccgcgttgccgccgcccgccccctgcgcctccccgcggagcctgggtccgggagggggaaggtaggggcggcggggggcgggagagtctggcgagcggacgctagctctgaggaaactcatcaatccgtgagccccggagtccggggtgcacatcggcccagccgcagcgtcggcggcggcggcggcagcagcacgaaggggctcagtcggggtaggcgggggcggtgccggtgccgcgggggcgggcccgaccgtcccgcccagaagttgtagggcttggctcctcgcgatcttgttcctttcccctccgcttctctgacctagctgcgcggccccggcccgggagctgccgaacccgcgcctcccctgggtgaggaggacacgcctgccctcgtcgagaaaacttttcctgccgactcagttggggcggcggtggcaggaagtgcgggcagcgacctctcctccgcctgccccgcgcgccctgccggaggtcggcgctgagcttgcgatcaagtttgtgggggccccccttcccagttgccggcgagtctcgcctcgagaggggcgcccgaccccggggagggcggcaggccagggcgaaggccaagggcgttttgtggcgccggagactaggtgcggagcaaggcggggactcgcacccgcatccgagagcgcggaggtcgcgcagcccgggagaagggagcctccggcggctgcttcctagagtccacagtgcgctgtctcctttggctgaggagagtgtcctggccccgagtctatcgaggaaaatgaagttaagccgccagttcaccgtgttcggcagtgcgatcttctgtgtggtgattttctcgctctacctgatgctggaccggggtcacttagactaccccaggaacccgcgccgcgagggctccttccctcagggccagctctcaatgttgcaagaaaaaatagaccatttggagcgtttgctagctgagaataatgagatcatctcaaatattagagactcagtcatcaatttgagtgagtctgtggaggatggtccgaaaagttcacaaagcaatttcagccaaggtgctggctcacatcttctgccctcacaattatccctctcagttgacactgcagactgtctgtttgcttcacaaagtggaagtcacaattcagatgtgcagatgttggatgtttacagtctaatttcttttgacaatccagatggtggagtttggaagcaaggatttgacattacttatgaatctaatgaatgggacactgaaccccttcaagtctttgtggtgcctcattcccataacgacccaggttggttgaagactttcaatgactactttagagacaagactcagtatatttttaataacatggtcctaaagctgaaagaagactcacggaggaagtttatttggtctgagatctcttacctttcaaagtggtgggatattatagatattcagaagaaggatgctgttaaaagtttaatagaaaatggtcagcttgaaattgtgacaggtggctgggttatgcctgatgaagctactccacattattttgccttaattgatcaactaattgaaggacatcagtggctggaaaataatataggagtgaaacctcggtccggctgggctattgatccctttggacactcaccaacaatggcttatcttctaaaccgtgctggactttctcacatgcttatccagagagttcattatgcagttaaaaaacactttgcactgcataaaacattggagtttttttggagacagaattgggatctgggatctgtcacagatattttatgccacatgatgcccttctacagctatgacatccctcacacttgtggacctgatcctaaaatatgctgccagtttgattttaaacgtcttcctggaggcagatttggttgtccctggggagtccccccagaaacaatacatcctggaaatgtccaaagcagggctcggatgctactagatcagtaccgaaagaagtcaaagctttttcgtaccaaagttctcctggctccactaggagatgatttccgctactgtgaatacacggaatgggatttacagtttaagaattatcagcagctttttgattatatgaattctcagtccaagtttaaagttaagatacagtttggaactttatcagatttttttgatgcgctggataaagcagatgaaactcagagagacaagggccaatcgatgttccctgttttaagtggagattttttcacttatgccgatcgagatgatcattactggagtggctattttacatccagacccttttacaaacgaatggacagaatcatggaatctcatttaagggctgctgaaattctttactatttcgccctgagacaagctcacaaatacaagataaataaatttctctcatcatcactttacacggcactgacagaagccagaaggaatttgggactgtttcaacatcatgatgctatcacaggaactgcaaaagactgggtggttgtggattatggtaccagactttttcattcgttaatggttttggagaagataattggaaattctgcatttcttcttattttgaaggacaaactcacatacgactcttactctcctgataccttcctggagatggatttgaaacaaaaatcacaagattctctgccacaaaaaaatataataaggctgagtgcggagccaaggtaccttgtggtctataatcctttagaacaagaccgaatctcgttggtctcagtctatgtgagttccccgacagtgcaagtgttctctgcttcaggaaaacctgtggaagttcaagtcagcgcagtttgggatacagcaaatactatttcagaaacagcctatgagatctcttttcgagcacatataccgccattgggactgaaagtgtataagattttggaatcagcaagttcaaattcacatttagctgattatgtcttgtataagaataaagtagaagatagcggaattttcaccataaagaatatgataaatactgaagaaggtataacactagagaactcctttgttttacttcggtttgatcaaactggacttatgaagcaaatgatgactaaagaagatggtaaacaccatgaagtaaatgtgcaattttcatggtatggaaccacaattaaaagagacaaaagtggtgcctacctcttcttacctgatggtaatgccaagccttatgtttacacaacaccgccctttgtcagagtgacacatggaaggatttattcggaagtgacttgcttttttgaccatgttactcatagagtccgactataccacatacagggaatagaaggacagtctgtggaagtttccaatattgtggacatccgaaaagtatataaccgtgagattgcaatgaaaatttcttctgatataaaaagccaaaatagattttatactgacctaaatgggtaccagattcaacctagaatgacactgagcaaattgcctcttcaagcaaatgtctatcccatgaccacaatggcctatatccaggatgccaaacatcgtttgacactgctctctgctcagtctttaggggtttcgagtttgaatagtggtcagattgaagttatcatggatcgaagactcatgcaagatgataatcgtggccttgagcaaggtatccaggataacaagattacagctaatctatttcgaatactactagaaaaaagaagtgctgttaatacggaagaagaaaagaagtcggtcagttatccttctctccttagccacataacttcttctctcatgaatcatccagtcattccaatggcaaataagttctcctcacctacccttgagctgcaaggtgaattctctccattacagtcatctttgccttgtgacattcatctggttaatttgagaacaatacagtcaaaggtgggcaatgggcactccaatgaggcagccttgatcctccacagaaaagggtttgattgtcggttctctagcaaaggcacagggctgttttgttctactactcagggaaagatattggtacagaaacttttaaacaagtttattgtcgaaagtctcacaccttcatcactatccttgatgcattcacctcccggcactcagaatataagtgagatcaacttgagtccaatggaaatcagcacattccgaatccagttgaggtgaacctgactttcacatttggattgagaatcattggcttttatacctttcttggtttgacgtgcaataaagaagcacattattttagcttctggctactgtgagaacatgaattctgtgattctgtgggttttttcttttttcttttaccagtacagtaagaaaaaaaaaaaaaaaaaaaaagccatgctatcaatcaagattctttttttttaaactttctcccatgaactaccaccatcagtatgaattgatgcaacaaatgaagaaatatttaaagacagcctctcaacagattgtatctcaggttaaatgctaactaattatgtctgtgttgggggttgcgaagagattcttaaaagtatctgtgtgttgatcatcagttttacaaaaacacctatttggctgaaatggaataaaatgtttgtgggtaaaagctaatggccaaaatggttgcaatcattcatactagttagaaaaattatgtgttgaaataagtggaaaagtgcaatccatccacccttatgattaacgtagatgatttttatacctttttctgatgtacctcttgaccttctccttcccttcctaccctttctaagtatttccagaaatacctgattttgaatcattcaacagtagaaaaagaggcatattttcattacttgacaatgtgggatgggtgcaatttattccatcttcactaaaatagaagcaattccataggtaccataaacctattttaggtaccacaaggtgtctttttacacagctcatttgaatacaggtgttctgagaaggggtttctattttaaaattaccatatcaaaataaatgtgccttatttttttataagtcttgttaaatcagtgtccatattactgtttggggaagggggaatgttgtggggtctgggagagggtgggtactttctatgacacataaattgtgtaatttttgcctgacaatgctggccacattctgatctgtttcattaaatttgtggtgatgttactctaaacattttgactatttgaatgtactgagatgtcagaaaacaaaacaaggaaggaaaatattgttaattaaaatgtgctgctgccaaggaaactgcaacttgaagcaaggattttgtaaaatgcaaaatccagctactgtttccatttcacagtagttaactatattaaagagagaatgctttaaaattgatcttgttttgaaacccacttttatgtagctcatcatggtttatcttactaaggaatatgtttgttcattcagttctcaacttttgtatgtgctaaccttaaagtgaagttctgagcccgtgtgccattacagtgcttttaataaaatttatttgggattattgtttccttaacattaaaataatagcgacatttagactatgcaattttagcatagaaaggagtctttgagtatgtacagttttgaaaattctctttgagataattgatttcatattctgtggctttcaacctccatttacctcttgtcattccaacatctttatagagaaataaaaacccaatttctctttcaccatttagtttgattatcatctggattttcactcaagatgcagctcctaagattattgttatgttaaattcataaactccttcacctttaataattaaggaaacaataccagtgttgataaagatattacaaggggtaatttcatgcaataaacatgtaccgtaagttttcttccacatattttgggaaaaaactaaaaaaagaaaaaggacttcctttttgtggacatctacagatgttagggttgccagaagcaaatcccaggaatgagatcagtattttcattgcatcttaaatgtataaccttcctgtgggagttcagtttgtctgtggttaagtgggtgtgcttaatcattctcgaaattgtgatcagatgaaataaaaaaaaaatcttgatgcaataacagtggttttgccacttctggttgtttgcgatggatctgtcccatgtcagtctggggttttattcagcttgtgttgctaccagcagttcacaggtaaagcagaaattctctttaaccagcaagtttctgctttttaaggttacttttagaataaatcatcagggaaacagagaggatgctttgctttgggttgtagtcaaaaactgattaaataatttaatgtctctggcacacactaaaaaccatacacttcagttgtgatctcagtggcatatttatttggttaggtttcgttacatttattattacagatgttcagttgaccaagtagttcagtgttttctttcctttttttggaaattttagtttgagtttgtgactgcagtgttcaagaactcagcatccttgttttctacaaatactgattaaaataaaatgctgtaaaatgtgatgtaaaacattatcatgatcttcccatgcctttgttgtacttgtgccgaagtgttttgatattcctttgtctggaagaaaatgtttgctttcattttgatcattttgttcaccttggaatcaacaggttttgatattttctcttggaagattttatatctttttgggaatatgtaatataagatctctaataaaagataatcttatcatgtaaaaaaaacaaaaaaaattctggaaaaattaaatatctaaagggaaaaatgt

SEQ ID NO: 25834 - DNA, 5397 bp, Homo sapiens
ggcggggccagccgcccgctcggctcaggcgctgcgggcgcctattgacccagcggctgctgcgccgccgctgtctcctcctgctcgtggcgggcggtgctggagcgccaagtggcgctggagaaccggcgcttcctttcgccgcttccgccgccatctccgcgtttgtggggcgggaaagagggagggggctagcggctgcagctggagcgggcttctctccggggacggtcctttcctccctgctctccttttccttctttccgcgttgccgccgcccgccccctgcgcctccccgcggagcctgggtccgggagggggaaggtaggggcggcggggggcgggagagtctggcgagcggacgctagctctgaggaaactcatcaatccgtgagccccggagtccggggtgcacatcggcccagccgcagcgtcggcggcggcggcggcagcagcacgaaggggctcagtcggggtaggcgggggcggtgccggtgccgcgggggcgggcccgaccgtcccgcccagaagttgtagggcttggctcctcgcgatcttgttcctttcccctccgcttctctgacctagctgcgcggccccggcccgggagctgccgaacccgcgcctcccctgggtgaggaggacacgcctgccctcgtcgagaaaacttttcctgccgactcagttggggcggcggtggcaggaagtgcgggcagcgacctctcctccgcctgccccgcgcgccctgccggaggtcggcgctgagcttgcgatcaagtttgtgggggccccccttcccagttgccggcgagtctcgcctcgagaggggcgcccgaccccggggagggcggcaggccagggcgaaggccaagggcgttttgtggcgccggagactaggtgcggagcaaggcggggactcgcacccgcatccgagagcgcggaggtcgcgcagcccgggagaagggagcctccggcggctgcttcctagagtccacagtgcgctgtctcctttggctgaggagagtgtcctggccccgagtctatcgaggaaaatgaagttaagccgccagttcaccgtgttcggcagtgcgatcttctgtgtggtgattttctcgctctacctgatgctggaccggggtcacttagactaccccaggaacccgcgccgcgagggctccttccctcagggccagctctcaatgttgcaagaaaaaatagaccatttggagcgtttgctagctgagaataatgagatcatctcaaatattagagactcagtcatcaatttgagtgagtctgtggaggatggtccgaaaagttcacaaagcaatttcagccaaggtgctggctcacatcttctgccctcacaattatccctctcagttgacactgcagactgtctgtttgcttcacaaagtggaagtcacaattcagatgtgcagatgttggatgtttacagtctaatttcttttgacaatccagatggtggagtttggaagcaaggatttgacattacttatgaatctaatgaatgggacactgaaccccttcaagtctttgtggtgcctcattcccataacgacccaggttggttgaagactttcaatgactactttagagacaagactcagtatatttttaataacatggtcctaaagctgaaagaagactcacggaggaagtttatttggtctgagatctcttacctttcaaagtggtgggatattatagatattcagaagaaggatgctgttaaaagtttaatagaaaatggtcagcttgaaattgtgacaggtggctgggttatgcctgatgaagctactccacattattttgccttaattgatcaactaattgaaggacatcagtggctggaaaataatataggagtgaaacctcggtccggctgggctattgatccctttggacactcaccaacaatggcttatcttctaaaccgtgctggactttctcacatgcttatccagagagttcattatgcagttaaaaaacactttgcactgcataaaacattggagtttttttggagacagaattgggatctgggatctgtcacagatattttatgccacatgatgcccttctacagctatgacatccctcacacttgtggacctgatcctaaaatatgctgccagtttgattttaaacgtcttcctggaggcagatttggttgtccctggggagtccccccagaaacaatacatcctggaaatgtccaaagcagggctcggatgctactagatcagtaccgaaagaagtcaaagctttttcgtaccaaagttctcctggctccactaggagatgatttccgctactgtgaatacacggaatgggatttacagtttaagaattatcagcagctttttgattatatgaattctcagtccaagtttaaagttaagatacagtttggaactttatcagatttttttgatgcgctggataaagcagatgaaactcagagagacaagggccaatcgatgttccctgttttaagtggagattttttcacttatgccgatcgagatgatcattactggagtggctattttacatccagacccttttacaaacgaatggacagaatcatggaatctcatttaagggctgctgaaattctttactatttcgccctgagacaagctcacaaatacaagataaataaatttctctcatcatcactttacacggcactgacagaagccagaaggaatttgggactgtttcaacatcatgatgctatcacaggaactgcaaaagactgggtggttgtggattatggtaccagactttttcattcgttaatggttttggagaagataattggaaattctgcatttcttcttattttgaaggacaaactcacatacgactcttactctcctgataccttcctggagatggatttgaaacaaaaatcacaagattctctgccacaaaaaaatataataaggctgagtgcggagccaaggtaccttgtggtctataatcctttagaacaagaccgaatctcgttggtctcagtctatgtgagttccccgacagtgcaagtgttctctgcttcaggaaaacctgtggaagttcaagtcagcgcagtttgggatacagcaaatactatttcagaaacagcctatgagatctcttttcgagcacatataccgccattgggactgaaagtgtataagattttggaatcagcaagttcaaattcacatttagctgattatgtcttgtataagaataaagtagaagatagcggaattttcaccataaagaatatgataaatactgaagaaggtataacactagagaactcctttgttttacttcggtttgatcaaactggacttatgaagcaaatgatgactaaagaagatggtaaacaccatgaagtaaatgtgcaattttcatggtatggaaccacaattaaaagagacaaaagtggtgcctacctcttcttacctgatggtaatgccaagccttatgtttacacaacaccgccctttgtcagagtgacacatggaaggatttattcggaagtgacttgcttttttgaccatgttactcatagagtccgactataccacatacagggaatagaaggacagtctgtggaagtttccaatattgtggacatccgaaaagtatataaccgtgagattgcaatgaaaatttcttctgatataaaaagccaaaatagattttatactgacctaaatgggtaccagattcaacctagaatgacactgagcaaattgcctcttcaagcaaatgtctatcccatgaccacaatggcctatatccaggatgccaaacatcgtttgacactgctctctgctcagtctttaggggtttcgagtttgaatagtggtcagattgaagttatcatggatcgaagactcatgcaagatgataatcgtggccttgagcaaggtatccaggataacaagattacagctaatctatttcgaatactactagaaaaaagaagtgctgttaatacggaagaagaaaagaagtcggtcagttatccttctctccttagccacataacttcttctctcatgaatcatccagtcattccaatggcaaataagttctcctcacctacccttgagctgcaaggtgaattctctccattacagtcatctttgccttgtgacattcatctggttaatttgagaacaatacagtcaaaggtgggcaatgggcactccaatgaggcagccttgatcctccacagaaaagggtttgattgtcggttctctagcaaaggcacagggctgttttgttctactactcagggaaagatattggtacagaaacttttaaacaagtttattgtcgaaagtctcacaccttcatcactatccttgatgcattcacctcccggcactcagaatataagtgagatcaacttgagtccaatggaaatcagcacattccgaatccagttgaggtgaacctgactttcacatttggattgagaatcattggcttttatacctttcttggtttgacgtgcaataaagaagcacattattttagcttctggctactgtgagaacatgaattctgtgattctgtgggttttttcttttttcttttaccagtacagtaagaaaaaaaaaaaaaaaaaaaaaagcgccgggcttttcacccaaaatccttttttttaaaatttccccccagggaattacccccatttcggtttgattgggggccccaatggaaaaattttttaaaggaccaggcttccctccaaccaggttgtgttttccccaggtgtaaatgtgctaccctaattcatggtccgggggtgggggggtggggaaaaagaggattccttaaaaccggtttctggtgcgtggtcggacacctccagtttaaccaacaacaccccctattgggcgctggaacgtgggcttacactcggtcgggcggcgttaaaaggctagttgggccaaattgggttggcatcctttccatacctaaggttgggaaaaactttcttcgtgctggaactcagggtggacaggtgtattcaattccaccctttatgattaaacggtaaaacgaattttaaaccccttttcggatgtacctctggagcttttcgttcccttcctaccctttctaaggtttcccggaaatccggtttgaccctcaccggtgaagggcgggcttttcttctggccgggggtgtgcgctttcctcttccttatgggcctcctggtccctaccttttcggttccggtgttctccgctggaacgggtggagggtcttaactccaaggcgtttaacggacagccagggggaggggggacggcacaccgtgccccgttcgtaaacgccgtgtgtggcgtgtccgt

SEQ ID NO: 25835 - DNA, 3304 bp, Homo sapiens
ttttaaacatatgagttagatgtgtgctgtttattttcttttattgcttacaactaaacttggtagtttatggagtattttctaagactgttatttataaaatgtaataaaaccaaattattcatatatttttatattaaaccctctcagataattctgttaatatgatgagaactggaaatatagacctcttaaacatttttgttttttcttgataggaagaagaaaagaagtcggtcagttatccttctctccttagccacataacttcttctctcatgaatcatccagtcattccaatggcaaataagttctcctcacctacccttgagctgcaaggtgaattctctccattacagtcatctttgccttgtgacattcatctggttaatttgagaacaatacagtcaaaggtgggcaatgggcactccaatgaggcagccttgatcctccacagaaaagggtttgattgtcggttctctagcaaaggcacagggctgttttgttctactactcagggaaagatattggtacagaaacttttaaacaagtttattgtcgaaagtctcacaccttcatcactatccttgatgcattcacctcccggcactcagaatataagtgagatcaacttgagtccaatggaaatcagcacattccgaatccagttgaggtgaacctgactttcacatttggattgagaatcattggcttttatacctttcttggtttgacgtgcaataaagaagcacattattttagcttctggctactgtgagaacatgaattctgtgattctgtgggttttttcttttttcttttaccagtacagtaagaaaaaaaaaaaaaaaaaaaaagccatgctatcaatcaagattctttttttttaaactttctcccatgaactaccaccatcagtatgaattgatgcaacaaatgaagaaatatttaaagacagcctctcaacagattgtatctcaggttaaatgctaactaattatgtctgtgttgggggttgcgaagagattcttaaaagtatctgtgtgttgatcatcagttttacaaaaacacctatttggctgaaatggaataaaatgtttgtgggtaaaagctaatggccaaaatggttgcaatcattcatactagttagaaaaattatgtgttgaaataagtggaaaagtgcaatccatccacccttatgattaacgtagatgatttttatacctttttctgatgtacctcttgaccttctccttcccttcctaccctttctaagtatttccagaaatacctgattttgaatcattcaacagtagaaaaagaggcatattttcattacttgacaatgtgggatgggtgcaatttattccatcttcactaaaatagaagcaattccataggtaccataaacctattttaggtaccacaaggtgtctttttacacagctcatttgaatacaggtgttctgagaaggggtttctattttaaaattaccatatcaaaataaatgtgccttatttttttataagtcttgttaaatcagtgtccatattactgtttggggaagggggaatgttgtggggtctgggagagggtgggtactttctatgacacataaattgtgtaatttttgcctgacaatgctggccacattctgatctgtttcattaaatttgtggtgatgttactctaaacattttgactatttgaatgtactgagatgtcagaaaacaaaacaaggaaggaaaatattgttaattaaaatgtgctgctgccaaggaaactgcaacttgaagcaaggattttgtaaaatgcaaaatccagctactgtttccatttcacagtagttaactatattaaagagagaatgctttaaaattgatcttgttttgaaacccacttttatgtagctcatcatggtttatcttactaaggaatatgtttgttcattcagttctcaacttttgtatgtgctaaccttaaagtgaagttctgagcccgtgtgccattacagtgcttttaataaaatttatttgggattattgtttccttaacattaaaataatagcgacatttagactatgcaattttagcatagaaaggagtctttgagtatgtacagttttgaaaattctctttgagataattgatttcatattctgtggctttcaacctccatttacctcttgtcattccaacatctttatagagaaataaaaacccaatttctctttcaccatttagtttgattatcatctggattttcactcaagatgcagctcctaagattattgttatgttaaattcataaactccttcacctttaataattaaggaaacaataccagtgttgataaagatattacaaggggtaatttcatgcaataaacatgtaccgtaagttttcttccacatattttgggaaaaaactaaaaaaagaaaaaggacttcctttttgtggacatctacagatgttagggttgccagaagcaaatcccaggaatgagatcagtattttcattgcatcttaaatgtataaccttcctgtgggagttcagtttgtctgtggttaagtgggtgtgcttaatcattctcgaaattgtgatcagatgaaataaaaaaaaaatcttgatgcaataacagtggttttgccacttctggttgtttgcgatggatctgtcccatgtcagtctggggttttattcagcttgtgttgctaccagcagttcacaggtaaagcagaaattctctttaaccagcaagtttctgctttttaaggttacttttagaataaatcatcagggaaacagagaggatgctttgctttgggttgtagtcaaaaactgattaaataatttaatgtctctggcacacactaaaaaccatacacttcagttgtgatctcagtggcatatttatttggttaggtttcgttacatttattattacagatgttcagttgaccaagtagttcagtgttttctttcctttttttggaaattttagtttgagtttgtgactgcagtgttcaagaactcagcatccttgttttctacaaatactgattaaaataaaatgctgtaaaatgtgatgtaaaacattatcatgatcttcccatgcctttgttgtacttgtgccgaagtgttttgatattcctttgtctggaagaaaatgtttgctttcattttgatcattttgttcaccttggaatcaacaggttttgatattttctcttggaagattttatatctttttgggaatatgtaatataagatctctaataaaagataatcttatcatgta

SEQ ID NO: 25836 - DNA, 3551 bp, Homo sapiens
ctcttagctgacttgtcatgtttagtatttttatttttgcctgcctatcaacaatagcttctgcagtatcaatttaaatgatacatcaagctggtaaatgtgagctggcctaccaagtgaaagcataactaaatttaaatagctctgatataaaaataatgaatcagtacatcaaagattaagaatgcagttagcaaaaattaatgttcaataaagaagcatgtgtgacttttaagttagatggtatgtcattcaatgaccagataaggactaagttcaggtgcagtttattcaactgatgtgtgtgtttgaaaaataagacgaaaacataatgctttatttgaataaactttaataaaacaatatataatgtatggacataaggaaacctaagtcctcggggattataggggaaaccaaggcatgaggttacctaacaaggaaccttagaacataatcttacctggctcagtacaagtaggagagaatggtagcaggtgaatgggcagtgagcatggacctgaggagaaatgaatttgcctaactttcttgctaaataaatgtgcttttggatgctgacatcgagagagtggtgtgtgaagtaccataaatatttgctttattgtctgcgcggtgtgactgcattctgctcatttgcaggtgggcaatgggcactccaatgaggcagccttgatcctccacagaaaagggtttgattgtcggttctctagcaaaggcacagggctgttttgttctactactcagggaaagatattggtacagaaacttttaaacaagtttattgtcgaaagtctcacaccttcatcactatccttgatgcattcacctcccggcactcagaatataagtgagatcaacttgagtccaatggaaatcagcacattccgaatccagttgaggtgaacctgactttcacatttggattgagaatcattggcttttatacctttcttggtttgacgtgcaataaagaagcacattattttagcttctggctactgtgagaacatgaattctgtgattctgtgggttttttcttttttcttttaccagtacagtaagaaaaaaaaaaaaaaaaaaaaagccatgctatcaatcaagattctttttttttaaactttctcccatgaactaccaccatcagtatgaattgatgcaacaaatgaagaaatatttaaagacagcctctcaacagattgtatctcaggttaaatgctaactaattatgtctgtgttgggggttgcgaagagattcttaaaagtatctgtgtgttgatcatcagttttacaaaaacacctatttggctgaaatggaataaaatgtttgtgggtaaaagctaatggccaaaatggttgcaatcattcatactagttagaaaaattatgtgttgaaataagtggaaaagtgcaatccatccacccttatgattaacgtagatgatttttatacctttttctgatgtacctcttgaccttctccttcccttcctaccctttctaagtatttccagaaatacctgattttgaatcattcaacagtagaaaaagaggcatattttcattacttgacaatgtgggatgggtgcaatttattccatcttcactaaaatagaagcaattccataggtaccataaacctattttaggtaccacaaggtgtctttttacacagctcatttgaatacaggtgttctgagaaggggtttctattttaaaattaccatatcaaaataaatgtgccttatttttttataagtcttgttaaatcagtgtccatattactgtttggggaagggggaatgttgtggggtctgggagagggtgggtactttctatgacacataaattgtgtaatttttgcctgacaatgctggccacattctgatctgtttcattaaatttgtggtgatgttactctaaacattttgactatttgaatgtactgagatgtcagaaaacaaaacaaggaaggaaaatattgttaattaaaatgtgctgctgccaaggaaactgcaacttgaagcaaggattttgtaaaatgcaaaatccagctactgtttccatttcacagtagttaactatattaaagagagaatgctttaaaattgatcttgttttgaaacccacttttatgtagctcatcatggtttatcttactaaggaatatgtttgttcattcagttctcaacttttgtatgtgctaaccttaaagtgaagttctgagcccgtgtgccattacagtgcttttaataaaatttatttgggattattgtttccttaacattaaaataatagcgacatttagactatgcaattttagcatagaaaggagtctttgagtatgtacagttttgaaaattctctttgagataattgatttcatattctgtggctttcaacctccatttacctcttgtcattccaacatctttatagagaaataaaaacccaatttctctttcaccatttagtttgattatcatctggattttcactcaagatgcagctcctaagattattgttatgttaaattcataaactccttcacctttaataattaaggaaacaataccagtgttgataaagatattacaaggggtaatttcatgcaataaacatgtaccgtaagttttcttccacatattttgggaaaaaactaaaaaaagaaaaaggacttcctttttgtggacatctacagatgttagggttgccagaagcaaatcccaggaatgagatcagtattttcattgcatcttaaatgtataaccttcctgtgggagttcagtttgtctgtggttaagtgggtgtgcttaatcattctcgaaattgtgatcagatgaaataaaaaaaaaatcttgatgcaataacagtggttttgccacttctggttgtttgcgatggatctgtcccatgtcagtctggggttttattcagcttgtgttgctaccagcagttcacaggtaaagcagaaattctctttaaccagcaagtttctgctttttaaggttacttttagaataaatcatcagggaaacagagaggatgctttgctttgggttgtagtcaaaaactgattaaataatttaatgtctctggcacacactaaaaaccatacacttcagttgtgatctcagtggcatatttatttggttaggtttcgttacatttattattacagatgttcagttgaccaagtagttcagtgttttctttcctttttttggaaattttagtttgagtttgtgactgcagtgttcaagaactcagcatccttgttttctacaaatactgattaaaataaaatgctgtaaaatgtgatgtaaaacattatcatgatcttcccatgcctttgttgtacttgtgccgaagtgttttgatattcctttgtctggaagaaaatgtttgctttcattttgatcattttgttcaccttggaatcaacaggttttgatattttctcttggaagattttatatctttttgggaatatgtaatataagatctctaataaaagataatcttatcatgta

SEQ ID NO: 25837 - DNA, 3407 bp, Homo sapiens
ctcttagctgacttgtcatgtttagtatttttatttttgcctgcctatcaacaatagcttctgcagtatcaatttaaatgatacatcaagctggtaaatgtgagctggcctaccaagtgaaagcataactaaatttaaatagctctgatataaaaataatgaatcagtacatcaaagattaagaatgcagttagcaaaaattaatgttcaataaagaagcatgtgtgacttttaagttagatggtatgtcattcaatgaccagataaggactaagttcaggtgcagtttattcaactgatgtgtgtgtttgaaaaataagacgaaaacataatgctttatttgaataaactttaataaaacaatatataatgtatggacataaggaaacctaagtcctcggggattataggggaaaccaaggcatgaggttacctaacaaggaaccttagaacataatcttacctggctcagtacaagtaggagagaatggtagcaggtgaatgggcagtgagcatggacctgaggagaaatgaatttgcctaactttcttgctaaataaatgtgcttttggatgctgacatcgagagagtggtgtgtgaagtaccataaatatttgctttattgtctgcgcggtgtgactgcattctgctcatttgcaggtgggcaatgggcactccaatgaggcagccttgatgcattcacctcccggcactcagaatataagtgagatcaacttgagtccaatggaaatcagcacattccgaatccagttgaggtgaacctgactttcacatttggattgagaatcattggcttttatacctttcttggtttgacgtgcaataaagaagcacattattttagcttctggctactgtgagaacatgaattctgtgattctgtgggttttttcttttttcttttaccagtacagtaagaaaaaaaaaaaaaaaaaaaaagccatgctatcaatcaagattctttttttttaaactttctcccatgaactaccaccatcagtatgaattgatgcaacaaatgaagaaatatttaaagacagcctctcaacagattgtatctcaggttaaatgctaactaattatgtctgtgttgggggttgcgaagagattcttaaaagtatctgtgtgttgatcatcagttttacaaaaacacctatttggctgaaatggaataaaatgtttgtgggtaaaagctaatggccaaaatggttgcaatcattcatactagttagaaaaattatgtgttgaaataagtggaaaagtgcaatccatccacccttatgattaacgtagatgatttttatacctttttctgatgtacctcttgaccttctccttcccttcctaccctttctaagtatttccagaaatacctgattttgaatcattcaacagtagaaaaagaggcatattttcattacttgacaatgtgggatgggtgcaatttattccatcttcactaaaatagaagcaattccataggtaccataaacctattttaggtaccacaaggtgtctttttacacagctcatttgaatacaggtgttctgagaaggggtttctattttaaaattaccatatcaaaataaatgtgccttatttttttataagtcttgttaaatcagtgtccatattactgtttggggaagggggaatgttgtggggtctgggagagggtgggtactttctatgacacataaattgtgtaatttttgcctgacaatgctggccacattctgatctgtttcattaaatttgtggtgatgttactctaaacattttgactatttgaatgtactgagatgtcagaaaacaaaacaaggaaggaaaatattgttaattaaaatgtgctgctgccaaggaaactgcaacttgaagcaaggattttgtaaaatgcaaaatccagctactgtttccatttcacagtagttaactatattaaagagagaatgctttaaaattgatcttgttttgaaacccacttttatgtagctcatcatggtttatcttactaaggaatatgtttgttcattcagttctcaacttttgtatgtgctaaccttaaagtgaagttctgagcccgtgtgccattacagtgcttttaataaaatttatttgggattattgtttccttaacattaaaataatagcgacatttagactatgcaattttagcatagaaaggagtctttgagtatgtacagttttgaaaattctctttgagataattgatttcatattctgtggctttcaacctccatttacctcttgtcattccaacatctttatagagaaataaaaacccaatttctctttcaccatttagtttgattatcatctggattttcactcaagatgcagctcctaagattattgttatgttaaattcataaactccttcacctttaataattaaggaaacaataccagtgttgataaagatattacaaggggtaatttcatgcaataaacatgtaccgtaagttttcttccacatattttgggaaaaaactaaaaaaagaaaaaggacttcctttttgtggacatctacagatgttagggttgccagaagcaaatcccaggaatgagatcagtattttcattgcatcttaaatgtataaccttcctgtgggagttcagtttgtctgtggttaagtgggtgtgcttaatcattctcgaaattgtgatcagatgaaataaaaaaaaaatcttgatgcaataacagtggttttgccacttctggttgtttgcgatggatctgtcccatgtcagtctggggttttattcagcttgtgttgctaccagcagttcacaggtaaagcagaaattctctttaaccagcaagtttctgctttttaaggttacttttagaataaatcatcagggaaacagagaggatgctttgctttgggttgtagtcaaaaactgattaaataatttaatgtctctggcacacactaaaaaccatacacttcagttgtgatctcagtggcatatttatttggttaggtttcgttacatttattattacagatgttcagttgaccaagtagttcagtgttttctttcctttttttggaaattttagtttgagtttgtgactgcagtgttcaagaactcagcatccttgttttctacaaatactgattaaaataaaatgctgtaaaatgtgatgtaaaacattatcatgatcttcccatgcctttgttgtacttgtgccgaagtgttttgatattcctttgtctggaagaaaatgtttgctttcattttgatcattttgttcaccttggaatcaacaggttttgatattttctcttggaagattttatatctttttgggaatatgtaatataagatctctaataaaagataatcttatcatgta

SEQ ID NO: 25838 - DNA, 3276 bp, Homo sapiens
aagaacccagaggcttctggggaggatgggcggtcaccatcccttagcctcacttctaggtggctcctccactgtagttgttttaaatgtgattgttttctggaagcagctggagctgactagagtcagtgagcatagggttttaccttctgtaaacgaagcctggaacttgttttttatgtcacctttttttgtggttactcacttcttcacatccttcctgcttttgactattttcttgtaatacaaatctaatcacttctcagatgaaaaatcccgttgcctactgaattggttcagacactgagcattcaggtcctctgcagcctggcctctacttactgcagccacctggcttcccgttgctcttcgtgcctttggacaggtgggcaatgggcactccaatgaggcagccttgatcctccacagaaaagggtttgattgtcggttctctagcaaaggcacagggctgttttgttctactactcagggaaagatattggtacagaaacttttaaacaagtttattgtcgaaagtctcacaccttcatcactatccttgatgcattcacctcccggcactcagaatataagtgagatcaacttgagtccaatggaaatcagcacattccgaatccagttgaggtgaacctgactttcacatttggattgagaatcattggcttttatacctttcttggtttgacgtgcaataaagaagcacattattttagcttctggctactgtgagaacatgaattctgtgattctgtgggttttttcttttttcttttaccagtacagtaagaaaaaaaaaaaaaaaaaaaaagccatgctatcaatcaagattctttttttttaaactttctcccatgaactaccaccatcagtatgaattgatgcaacaaatgaagaaatatttaaagacagcctctcaacagattgtatctcaggttaaatgctaactaattatgtctgtgttgggggttgcgaagagattcttaaaagtatctgtgtgttgatcatcagttttacaaaaacacctatttggctgaaatggaataaaatgtttgtgggtaaaagctaatggccaaaatggttgcaatcattcatactagttagaaaaattatgtgttgaaataagtggaaaagtgcaatccatccacccttatgattaacgtagatgatttttatacctttttctgatgtacctcttgaccttctccttcccttcctaccctttctaagtatttccagaaatacctgattttgaatcattcaacagtagaaaaagaggcatattttcattacttgacaatgtgggatgggtgcaatttattccatcttcactaaaatagaagcaattccataggtaccataaacctattttaggtaccacaaggtgtctttttacacagctcatttgaatacaggtgttctgagaaggggtttctattttaaaattaccatatcaaaataaatgtgccttatttttttataagtcttgttaaatcagtgtccatattactgtttggggaagggggaatgttgtggggtctgggagagggtgggtactttctatgacacataaattgtgtaatttttgcctgacaatgctggccacattctgatctgtttcattaaatttgtggtgatgttactctaaacattttgactatttgaatgtactgagatgtcagaaaacaaaacaaggaaggaaaatattgttaattaaaatgtgctgctgccaaggaaactgcaacttgaagcaaggattttgtaaaatgcaaaatccagctactgtttccatttcacagtagttaactatattaaagagagaatgctttaaaattgatcttgttttgaaacccacttttatgtagctcatcatggtttatcttactaaggaatatgtttgttcattcagttctcaacttttgtatgtgctaaccttaaagtgaagttctgagcccgtgtgccattacagtgcttttaataaaatttatttgggattattgtttccttaacattaaaataatagcgacatttagactatgcaattttagcatagaaaggagtctttgagtatgtacagttttgaaaattctctttgagataattgatttcatattctgtggctttcaacctccatttacctcttgtcattccaacatctttatagagaaataaaaacccaatttctctttcaccatttagtttgattatcatctggattttcactcaagatgcagctcctaagattattgttatgttaaattcataaactccttcacctttaataattaaggaaacaataccagtgttgataaagatattacaaggggtaatttcatgcaataaacatgtaccgtaagttttcttccacatattttgggaaaaaactaaaaaaagaaaaaggacttcctttttgtggacatctacagatgttagggttgccagaagcaaatcccaggaatgagatcagtattttcattgcatcttaaatgtataaccttcctgtgggagttcagtttgtctgtggttaagtgggtgtgcttaatcattctcgaaattgtgatcagatgaaataaaaaaaaaatcttgatgcaataacagtggttttgccacttctggttgtttgcgatggatctgtcccatgtcagtctggggttttattcagcttgtgttgctaccagcagttcacaggtaaagcagaaattctctttaaccagcaagtttctgctttttaaggttacttttagaataaatcatcagggaaacagagaggatgctttgctttgggttgtagtcaaaaactgattaaataatttaatgtctctggcacacactaaaaaccatacacttcagttgtgatctcagtggcatatttatttggttaggtttcgttacatttattattacagatgttcagttgaccaagtagttcagtgttttctttcctttttttggaaattttagtttgagtttgtgactgcagtgttcaagaactcagcatccttgttttctacaaatactgattaaaataaaatgctgtaaaatgtgatgtaaaacattatcatgatcttcccatgcctttgttgtacttgtgccgaagtgttttgatattcctttgtctggaagaaaatgtttgctttcattttgatcattttgttcaccttggaatcaacaggttttgatattttctcttggaagattttatatctttttgggaatatgtaatataagatctctaataaaagataatcttatcatgta

SEQ ID NO: 25839 - DNA, 2885 bp, Homo sapiens
ttttaatcccctcctcatacctaattttccacagaaatatgtagttgtgctgcctaatcttcaaagttgatcctaaatatgtaaattttatcatttacttttcagatattggtacagaaacttttaaacaagtttattgtcgaaagtctcacaccttcatcactatccttgatgcattcacctcccggcactcagaatataagtgagatcaacttgagtccaatggaaatcagcacattccgaatccagttgaggtgaacctgactttcacatttggattgagaatcattggcttttatacctttcttggtttgacgtgcaataaagaagcacattattttagcttctggctactgtgagaacatgaattctgtgattctgtgggttttttcttttttcttttaccagtacagtaagaaaaaaaaaaaaaaaaaaaaagccatgctatcaatcaagattctttttttttaaactttctcccatgaactaccaccatcagtatgaattgatgcaacaaatgaagaaatatttaaagacagcctctcaacagattgtatctcaggttaaatgctaactaattatgtctgtgttgggggttgcgaagagattcttaaaagtatctgtgtgttgatcatcagttttacaaaaacacctatttggctgaaatggaataaaatgtttgtgggtaaaagctaatggccaaaatggttgcaatcattcatactagttagaaaaattatgtgttgaaataagtggaaaagtgcaatccatccacccttatgattaacgtagatgatttttatacctttttctgatgtacctcttgaccttctccttcccttcctaccctttctaagtatttccagaaatacctgattttgaatcattcaacagtagaaaaagaggcatattttcattacttgacaatgtgggatgggtgcaatttattccatcttcactaaaatagaagcaattccataggtaccataaacctattttaggtaccacaaggtgtctttttacacagctcatttgaatacaggtgttctgagaaggggtttctattttaaaattaccatatcaaaataaatgtgccttatttttttataagtcttgttaaatcagtgtccatattactgtttggggaagggggaatgttgtggggtctgggagagggtgggtactttctatgacacataaattgtgtaatttttgcctgacaatgctggccacattctgatctgtttcattaaatttgtggtgatgttactctaaacattttgactatttgaatgtactgagatgtcagaaaacaaaacaaggaaggaaaatattgttaattaaaatgtgctgctgccaaggaaactgcaacttgaagcaaggattttgtaaaatgcaaaatccagctactgtttccatttcacagtagttaactatattaaagagagaatgctttaaaattgatcttgttttgaaacccacttttatgtagctcatcatggtttatcttactaaggaatatgtttgttcattcagttctcaacttttgtatgtgctaaccttaaagtgaagttctgagcccgtgtgccattacagtgcttttaataaaatttatttgggattattgtttccttaacattaaaataatagcgacatttagactatgcaattttagcatagaaaggagtctttgagtatgtacagttttgaaaattctctttgagataattgatttcatattctgtggctttcaacctccatttacctcttgtcattccaacatctttatagagaaataaaaacccaatttctctttcaccatttagtttgattatcatctggattttcactcaagatgcagctcctaagattattgttatgttaaattcataaactccttcacctttaataattaaggaaacaataccagtgttgataaagatattacaaggggtaatttcatgcaataaacatgtaccgtaagttttcttccacatattttgggaaaaaactaaaaaaagaaaaaggacttcctttttgtggacatctacagatgttagggttgccagaagcaaatcccaggaatgagatcagtattttcattgcatcttaaatgtataaccttcctgtgggagttcagtttgtctgtggttaagtgggtgtgcttaatcattctcgaaattgtgatcagatgaaataaaaaaaaaatcttgatgcaataacagtggttttgccacttctggttgtttgcgatggatctgtcccatgtcagtctggggttttattcagcttgtgttgctaccagcagttcacaggtaaagcagaaattctctttaaccagcaagtttctgctttttaaggttacttttagaataaatcatcagggaaacagagaggatgctttgctttgggttgtagtcaaaaactgattaaataatttaatgtctctggcacacactaaaaaccatacacttcagttgtgatctcagtggcatatttatttggttaggtttcgttacatttattattacagatgttcagttgaccaagtagttcagtgttttctttcctttttttggaaattttagtttgagtttgtgactgcagtgttcaagaactcagcatccttgttttctacaaatactgattaaaataaaatgctgtaaaatgtgatgtaaaacattatcatgatcttcccatgcctttgttgtacttgtgccgaagtgttttgatattcctttgtctggaagaaaatgtttgctttcattttgatcattttgttcaccttggaatcaacaggttttgatattttctcttggaagattttatatctttttgggaatatgtaatataagatctctaataaaagataatcttatcatgta

SEQ ID NO: 25840 - DNA, 422 bp, Homo sapiens
atttttaataacatggtcctaaagctgaaagaagactcacggaggaagtttatttggtctgagatctcttacctttcaaagtggtgggatattatagatattcagaagaaggatgctgttaaaaggtttgttttaaaacttttttggaatttggtaatattaaagcttaattgtacaatgaactaagtattgaatttttagatggtgaaaattcttagctttatatttgaaacttaaaatatttcttcacataccgttttcgttgattttggttcatctctgaaaaagccatttgaaacttttccatttaaatcctgtgttccactggaagcagtggcttactgctgtaatcctagcactttgggaggccgaggtgggcggatcacctgagggcaggagttcaagaccactctggccaacat

SEQ ID NO: 25841 - DNA, 7114 bp, Homo sapiens
ggcggggccagccgcccgctcggctcaggcgctgcgggcgcctattgacccagcggctgctgcgccgccgctgtctcctcctgctcgtggcgggcggtgctggagcgccaagtggcgctggagaaccggcgcttcctttcgccgcttccgccgccatctccgcgtttgtggggcgggaaagagggagggggctagcggctgcagctggagcgggcttctctccggggacggtcctttcctccctgctctccttttccttctttccgcgttgccgccgcccgccccctgcgcctccccgcggagcctgggtccgggagggggaaggtaggggcggcggggggcgggagagtctggcgagcggacgctagctctgaggaaactcatcaatccgtgagccccggagtccggggtgcacatcggcccagccgcagcgtcggcggcggcggcggcagcagcacgaaggggctcagtcggggtaggcgggggcggtgccggtgccgcgggggcgggcccgaccgtcccgcccagaagttgtagggcttggctcctcgcgatcttgttcctttcccctccgcttctctgacctagctgcgcggccccggcccgggagctgccgaacccgcgcctcccctgggtgaggaggacacgcctgccctcgtcgagaaaacttttcctgccgactcagttggggcggcggtggcaggaagtgcgggcagcgacctctcctccgcctgccccgcgcgccctgccggaggtcggcgctgagcttgcgatcaagtttgtgggggccccccttcccagttgccggcgagtctcgcctcgagaggggcgcccgaccccggggagggcggcaggccagggcgaaggccaagggcgttttgtggcgccggagactaggtgcggagcaaggcggggactcgcacccgcatccgagagcgcggaggtcgcgcagcccgggagaagggagcctccggcggctgcttcctagagtccacagtgcgctgtctcctttggctgaggagagtgtcctggccccgagtctatcgaggaaaatgaagttaagccgccagttcaccgtgttcggcagtgcgatcttctgtgtggtgattttctcgctctacctgatgctggaccggggtcacttagactaccccaggaacccgcgccgcgagggctccttccctcagggccagctctcaatgttgcaagaaaaaatagaccatttggagcgtttgctagctgagaataatgagatcatctcaaatattagagactcagtcatcaatttgagtgagtctgtggaggatggtccgaaaagttcacaaagcaatttcagccaaggtgctggctcacatcttctgccctcacaattatccctctcagttgacactgcagactgtctgtttgcttcacaaagtggaagtcacaattcagatgtgcagatgttggatgtttacagtctaatttcttttgacaatccagatggtggagtttggaagcaaggatttgacattacttatgaatctaatgaatgggacactgaaccccttcaagtctttgtggtgcctcattcccataacgacccaggttggttgaagactttcaatgactactttagagacaagactcagtatatttttaataacatggtcctaaagctgaaagaagactcacggaggaagtttatttggtctgagatctcttacctttcaaagtggtgggatattatagatattcagaagaaggatgctgttaaaagtttaatagaaaatggtcagcttgaaattgtgacaggtggctgggttatgcctgatgaagctactccacattattttgccttaattgatcaactaattgaaggacatcagtggctggaaaataatataggagtgaaacctcggtccggctgggctattgatccctttggacactcaccaacaatggcttatcttctaaaccgtgctggactttctcacatgcttatccagagagttcattatgcagttaaaaaacactttgcactgcataaaacattggagtttttttggagacagaattgggatctgggatctgtcacagatattttatgccacatgatgcccttctacagctatgacatccctcacacttgtggacctgatcctaaaatatgctgccagtttgattttaaacgtcttcctggaggcagatttggttgtccctggggagtccccccagaaacaatacatcctggaaatgtccaaagcagggctcggatgctactagatcagtaccgaaagaagtcaaagctttttcgtaccaaagttctcctggctccactaggagatgatttccgctactgtgaatacacggaatgggatttacagtttaagaattatcagcagctttttgattatatgaattctcagtccaagtttaaagttaagatacagtttggaactttatcagatttttttgatgcgctggataaagcagatgaaactcagagagacaagggccaatcgatgttccctgttttaagtggagattttttcacttatgccgatcgagatgatcattactggagtggctattttacatccagacccttttacaaacgaatggacagaatcatggaatctcatttaagggctgctgaaattctttactatttcgccctgagacaagctcacaaatacaagataaataaatttctctcatcatcactttacacggcactgacagaagccagaaggaatttgggactgtttcaacatcatgatgctatcacaggaactgcaaaagactgggtggttgtggattatggtaccagactttttcattcgttaatggttttggagaagataattggaaattctgcatttcttcttattttgaaggacaaactcacatacgactcttactctcctgataccttcctggagatggatttgaaacaaaaatcacaagattctctgccacaaaaaaatataataaggctgagtgcggagccaaggtaccttgtggtctataatcctttagaacaagaccgaatctcgttggtctcagtctatgtgagttccccgacagtgcaagtgttctctgcttcaggaaaacctgtggaagttcaagtcagcgcagtttgggatacagcaaatactatttcagaaacagcctatgagatctcttttcgagcacatataccgccattgggactgaaagtgtataagattttggaatcagcaagttcaaattcacatttagctgattatgtcttgtataagaataaagtagaagatagcggaattttcaccataaagaatatgataaatactgaagaaggtataacactagagaactcctttgttttacttcggtttgatcaaactggacttatgaagcaaatgatgactaaagaagatggtaaacaccatgaagtaaatgtgcaattttcatggtatggaaccacaattaaaagagacaaaagtggtgcctacctcttcttacctgatggtaatgccaagccttatgtttacacaacaccgccctttgtcagagtgacacatggaaggatttattcggaagtgacttgcttttttgaccatgttactcatagagtccgactataccacatacagggaatagaaggacagtctgtggaagtttccaatattgtggacatccgaaaagtatataaccgtgagattgcaatgaaaatttcttctgatataaaaagccaaaatagattttatactgacctaaatgggtaccagattcaacctagaatgacactgagcaaattgcctcttcaagcaaatgtctatcccatgaccacaatggcctatatccaggatgccaaacatcgtttgacactgctctctgctcagtctttaggggtttcgagtttgaatagtggtcagattgaagttatcatggatcgaagactcatgcaagatgataatcgtggccttgagcaaggtatccaggataacaagattacagctaatctatttcgaatactactagaaaaaagaagtgctgttaatacggaagaagaaaagaagtcggtcagttatccttctctccttagccacataacttcttctctcatgaatcatccagtcattccaatggcaaataagttctcctcacctacccttgagctgcaaggtgaattctctccattacagtcatctttgccttgtgacattcatctggttaatttgagaacaatacagtcaaaggtgggcaatgggcactccaatgaggcagccttgatcctccacagaaaagggtttgattgtcggttctctagcaaaggcacagggctgttttgttctactactcagggaaagatattggtacagaaacttttaaacaagtttattgtcgaaagtctcacaccttcatcactatccttgatgcattcacctcccggcactcagaatataagtgagatcaacttgagtccaatggaaatcagcacattccgaatccagttgaggtgaacctgactttcacatttggattgagaatcattggcttttatacctttcttggtttgacgtgcaataaagaagcacattattttagcttctggctactgtgagaacatgaattctgtgattctgtgggttttttcttttttcttttaccagtacagtaagaaaaaaaaaaaaaaaaaaaaagccatgctatcaatcaagattctttttttttaaactttctcccatgaactaccaccatcagtatgaattgatgcaacaaatgaagaaatatttaaagacagcctctcaacagattgtatctcaggttaaatgctaactaattatgtctgtgttgggggttgcgaagagattcttaaaagtatctgtgtgttgatcatcagttttacaaaaacacctatttggctgaaatggaataaaatgtttgtgggtaaaagctaatggccaaaatggttgcaatcattcatactagttagaaaaattatgtgttgaaataagtggaaaagtgcaatccatccacccttatgattaacgtagatgatttttatacctttttctgatgtacctcttgaccttctccttcccttcctaccctttctaagtatttccagaaatacctgattttgaatcattcaacagtagaaaaagaggcatattttcattacttgacaatgtgggatgggtgcaatttattccatcttcactaaaatagaagcaattccataggtaccataaacctattttaggtaccacaaggtgtctttttacacagctcatttgaatacaggtgttctgagaaggggtttctattttaaaattaccatatcaaaataaatgtgccttatttttttataagtcttgttaaatcagtgtccatattactgtttggggaagggggaatgttgtggggtctgggagagggtgggtactttctatgacacataaattgtgtaatttttgcctgacaatgctggccacattctgatctgtttcattaaatttgtggtgatgttactctaaacattttgactatttgaatgtactgagatgtcagaaaacaaaacaaggaaggaaaatattgttaattaaaatgtgctgctgccaaggaaactgcaacttgaagcaaggattttgtaaaatgcaaaatccagctactgtttccatttcacagtagttaactatattaaagagagaatgctttaaaattgatcttgttttgaaacccacttttatgtagctcatcatggtttatcttactaaggaatatgtttgttcattcagttctcaacttttgtatgtgctaaccttaaagtgaagttctgagcccgtgtgccattacagtgcttttaataaaatttatttgggattattgtttccttaacattaaaataatagcgacatttagactatgcaattttagcatagaaaggagtctttgagtatgtacagttttgaaaattctctttgagataattgatttcatattctgtggctttcaacctccatttacctcttgtcattccaacatctttatagagaaataaaaacccaatttctctttcaccatttagtttgattatcatctggattttcactcaagatgcagctcctaagattattgttatgttaaattcataaactccttcacctttaataattaaggaaacaataccagtgttgataaagatattacaaggggtaatttcatgcaataaacatgtaccgtaagttttcttccacatattttgggaaaaaactaaaaaaagaaaaaggacttcctttttgtggacatctacagatgttagggttgccagaagcaaatcccaggaatgagatcagtattttcattgcatcttaaatgtataaccttcctgtgggagttcagtttgtctgtggttaagtgggtgtgcttaatcattctcgaaattgtgatcagatgaaataaaaaaaaaatcttgatgcaataacagtggttttgccacttctggttgtttgcgatggatctgtcccatgtcagtctggggttttattcagcttgtgttgctaccagcagttcacaggtaaagcagaaattctctttaaccagcaagtttctgctttttaaggttacttttagaataaatcatcagggaaacagagaggatgctttgctttgggttgtagtcaaaaactgattaaataatttaatgtctctggcacacactaaaaaccatacacttcagttgtgatctcagtggcatatttatttggttaggtttcgttacatttattattacagatgttcagttgaccaagtagttcagtgttttctttcctttttttggaaattttagtttgagtttgtgactgcagtgttcaagaactcagcatccttgttttctacaaatactgattaaaataaaatgctgtaaaatgtgatgtaaaacattatcatgatcttcccatgcctttgttgtacttgtgccgaagtgttttgatattcctttgtctggaagaaaatgtttgctttcattttgatcattttgttcaccttggaatcaacaggttttgatattttctcttggaagattttatatctttttgggaatatgtaatataagatctctaataaaagataatcttatcatgta

SEQ ID NO: 25842 - DNA, 2957 bp, Homo sapiens
ttaacaaagagccataaatcctctagagacaagacaaagaagaaagcaccttcaggcttccaaaaggtgggcaatgggcactccaatgaggcagccttgatcctccacagaaaagggtttgattgtcggttctctagcaaaggcacagggctgttttgttctactactcagggaaagatattggtacagaaacttttaaacaagtttattgtcgaaagtctcacaccttcatcactatccttgatgcattcacctcccggcactcagaatataagtgagatcaacttgagtccaatggaaatcagcacattccgaatccagttgaggtgaacctgactttcacatttggattgagaatcattggcttttatacctttcttggtttgacgtgcaataaagaagcacattattttagcttctggctactgtgagaacatgaattctgtgattctgtgggttttttcttttttcttttaccagtacagtaagaaaaaaaaaaaaaaaaaaaaagccatgctatcaatcaagattctttttttttaaactttctcccatgaactaccaccatcagtatgaattgatgcaacaaatgaagaaatatttaaagacagcctctcaacagattgtatctcaggttaaatgctaactaattatgtctgtgttgggggttgcgaagagattcttaaaagtatctgtgtgttgatcatcagttttacaaaaacacctatttggctgaaatggaataaaatgtttgtgggtaaaagctaatggccaaaatggttgcaatcattcatactagttagaaaaattatgtgttgaaataagtggaaaagtgcaatccatccacccttatgattaacgtagatgatttttatacctttttctgatgtacctcttgaccttctccttcccttcctaccctttctaagtatttccagaaatacctgattttgaatcattcaacagtagaaaaagaggcatattttcattacttgacaatgtgggatgggtgcaatttattccatcttcactaaaatagaagcaattccataggtaccataaacctattttaggtaccacaaggtgtctttttacacagctcatttgaatacaggtgttctgagaaggggtttctattttaaaattaccatatcaaaataaatgtgccttatttttttataagtcttgttaaatcagtgtccatattactgtttggggaagggggaatgttgtggggtctgggagagggtgggtactttctatgacacataaattgtgtaatttttgcctgacaatgctggccacattctgatctgtttcattaaatttgtggtgatgttactctaaacattttgactatttgaatgtactgagatgtcagaaaacaaaacaaggaaggaaaatattgttaattaaaatgtgctgctgccaaggaaactgcaacttgaagcaaggattttgtaaaatgcaaaatccagctactgtttccatttcacagtagttaactatattaaagagagaatgctttaaaattgatcttgttttgaaacccacttttatgtagctcatcatggtttatcttactaaggaatatgtttgttcattcagttctcaacttttgtatgtgctaaccttaaagtgaagttctgagcccgtgtgccattacagtgcttttaataaaatttatttgggattattgtttccttaacattaaaataatagcgacatttagactatgcaattttagcatagaaaggagtctttgagtatgtacagttttgaaaattctctttgagataattgatttcatattctgtggctttcaacctccatttacctcttgtcattccaacatctttatagagaaataaaaacccaatttctctttcaccatttagtttgattatcatctggattttcactcaagatgcagctcctaagattattgttatgttaaattcataaactccttcacctttaataattaaggaaacaataccagtgttgataaagatattacaaggggtaatttcatgcaataaacatgtaccgtaagttttcttccacatattttgggaaaaaactaaaaaaagaaaaaggacttcctttttgtggacatctacagatgttagggttgccagaagcaaatcccaggaatgagatcagtattttcattgcatcttaaatgtataaccttcctgtgggagttcagtttgtctgtggttaagtgggtgtgcttaatcattctcgaaattgtgatcagatgaaataaaaaaaaaatcttgatgcaataacagtggttttgccacttctggttgtttgcgatggatctgtcccatgtcagtctggggttttattcagcttgtgttgctaccagcagttcacaggtaaagcagaaattctctttaaccagcaagtttctgctttttaaggttacttttagaataaatcatcagggaaacagagaggatgctttgctttgggttgtagtcaaaaactgattaaataatttaatgtctctggcacacactaaaaaccatacacttcagttgtgatctcagtggcatatttatttggttaggtttcgttacatttattattacagatgttcagttgaccaagtagttcagtgttttctttcctttttttggaaattttagtttgagtttgtgactgcagtgttcaagaactcagcatccttgttttctacaaatactgattaaaataaaatgctgtaaaatgtgatgtaaaacattatcatgatcttcccatgcctttgttgtacttgtgccgaagtgttttgatattcctttgtctggaagaaaatgtttgctttcattttgatcattttgttcaccttggaatcaacaggttttgatattttctcttggaagattttatatctttttgggaatatgtaatataagatctctaataaaagataatcttatcatgta

SEQ ID NO: 25843 - DNA, 2241 bp, Homo sapiens
cgcctggctccggccccaccccgccatcccctggccatgggctgactcgccacccccgacactgcagcgcctgccgacctcggggccccgccctctgccttcgctcgcgccgctctccttcagtctccccagggcctgtttcatggatagggtccccttgcccgcgtgaaagtctcattcctcctcagctcagaaacactccaaggtctcggcgccctatattttccattcccactccctactctggcagtctagcttctaagctgaggagtttggccttcgctccaggtgcggggactcgtggaaggatttgattcgcgcttgagaaagatcgctccgctcctgtaaggaagagagcgtgtaggggctgcaaccagagacacagtcagaagctccgaggctaccgcgatggtccaggtgccacaggacacagcctaacagaggcccaggttggagccatggaccatggagtcatgagaatggaagggaagctgacgccatgtgggatggggtagaactgtccgcaaattcgtcccgcctctggagtcttcagaccagtcaaggccgaaattcaaccaagcctctcctctctctagctgttatttgtttgcagcacgcggtctggtggcaccctgcaggatttaccagctttttgccaacattctggcctatgcaatcaatacgtcccttcagcgttgcacttggatggattggacctatagttgttatatatggatattgtctaatttatttattacagtattaactgactcctatgttctggccttcagaatttctcctttggatcaattactagcctgtcttacattttctgcttcattcttttaaaatgtttagagatgatttgctaagttttcttcattgctgtcaatgatgcaatttaaactgtcaaaaaaattttttctcaagcagggtagtaatggtgaaccattcccttgctattcagacagcatggtttagatgaggcgcacctatccccagctttaggaatggaaacaggacccaagtctggctaatcagagactggtttagggtcggccccatggtctgagccagaccaatgagaattggtagagggacttccttttgcaacttctattttagaatcgggggtatatatgcaggcttgttacagaggtatattgcatggtgctgaggtttggagtatgaacgaatccgtccttcaggtaatgagcatagtacccaataggtagtttcaacccttgcccccttcctccttccccagtcttgtattccccagtgtctgttgttcccagacattgatctttttcctctatgttgctaagctggtagaaaggctggagttgctggcaaccatctttgcaaccatgcagggagaactactttggaaatgaagcaagacaaagaagaaaacagataaaaggagacaaatgtttgactttgtacagctggaaaccagcaatgctggaaatgagcactgaaggcagtttaatgggtttgtcacttgtaaccaagtgacccatggcaagctcacagatttgtattggcagaattcctccttttctttatttaaaatggtacttttggccaggcaaggtggttcacacctgtaatccaaagactttgggaggccgaggcgcactgatcacccaaggtcagaagttcgagaacagcctggccaacattggcgaaaccccatctctactaaaaatacaaaccattagctggctgcggtggcctttctaccagctttttgtctcaaaaaaaaaaaaaaaaaggtacttttgcttatctctaaccttcctcttccccataatttaacagttgcccatactatctgttactctgagctactctctgccccattctcctcctcttatcttcagttcctcctaggctgtcagagccatctgaaatgaaaacatttaggccgggcatagtggttcatgcctgtaatcccagcactttgggaggctgaggcaggcggatcagctgaggtcaggagttcaagaccaccctggtcaacatggtgaaaccccatctctactaaaaatacaaaaattatccagacatggtggcacatgcctctactcccagctacttgggaggctgaggcaggagaatcgcttgaacctaggaggcaggggttgcagtgagccgagattgagccactgcactctagcctgggcgacagagtgagactttgtctaaaaaacataaataaaataaaatgaaatg

SEQ ID NO: 25844 - DNA, 2284 bp, Homo sapiens
cgcctggctccggccccaccccgccatcccctggccatgggctgactcgccacccccgacactgcagcgcctgccgacctcggggccccgccctctgccttcgctcgcgccgctctccttcagtctccccagggcctgtttcatggatagggtccccttgcccgcgtgaaagtctcattcctcctcagctcagaaacactccaaggtctcggcgccctatactggccttccctcatccgaatacccctcgtgctcctgatgtacttttccattcccactccctactctggcagtctagcttctaagctgaggagtttggccttcgctccaggtgcggggactcgtggaaggatttgattcgcgcttgagaaagatcgctccgctcctgtaaggaagagagcgtgtaggggctgcaaccagagacacagtcagaagctccgaggctaccgcgatggtccaggtgccacaggacacagcctaacagaggcccaggttggagccatggaccatggagtcatgagaatggaagggaagctgacgccatgtgggatggggtagaactgtccgcaaattcgtcccgcctctggagtcttcagaccagtcaaggccgaaattcaaccaagcctctcctctctctagctgttatttgtttgcagcacgcggtctggtggcaccctgcaggatttaccagctttttgccaacattctggcctatgcaatcaatacgtcccttcagcgttgcacttggatggattggacctatagttgttatatatggatattgtctaatttatttattacagtattaactgactcctatgttctggccttcagaatttctcctttggatcaattactagcctgtcttacattttctgcttcattcttttaaaatgtttagagatgatttgctaagttttcttcattgctgtcaatgatgcaatttaaactgtcaaaaaaattttttctcaagcagggtagtaatggtgaaccattcccttgctattcagacagcatggtttagatgaggcgcacctatccccagctttaggaatggaaacaggacccaagtctggctaatcagagactggtttagggtcggccccatggtctgagccagaccaatgagaattggtagagggacttccttttgcaacttctattttagaatcgggggtatatatgcaggcttgttacagaggtatattgcatggtgctgaggtttggagtatgaacgaatccgtccttcaggtaatgagcatagtacccaataggtagtttcaacccttgcccccttcctccttccccagtcttgtattccccagtgtctgttgttcccagacattgatctttttcctctatgttgctaagctggtagaaaggctggagttgctggcaaccatctttgcaaccatgcagggagaactactttggaaatgaagcaagacaaagaagaaaacagataaaaggagacaaatgtttgactttgtacagctggaaaccagcaatgctggaaatgagcactgaaggcagtttaatgggtttgtcacttgtaaccaagtgacccatggcaagctcacagatttgtattggcagaattcctccttttctttatttaaaatggtacttttggccaggcaaggtggttcacacctgtaatccaaagactttgggaggccgaggcgcactgatcacccaaggtcagaagttcgagaacagcctggccaacattggcgaaaccccatctctactaaaaatacaaaccattagctggctgcggtggcctttctaccagctttttgtctcaaaaaaaaaaaaaaaaaggtacttttgcttatctctaaccttcctcttccccataatttaacagttgcccatactatctgttactctgagctactctctgccccattctcctcctcttatcttcagttcctcctaggctgtcagagccatctgaaatgaaaacatttaggccgggcatagtggttcatgcctgtaatcccagcactttgggaggctgaggcaggcggatcagctgaggtcaggagttcaagaccaccctggtcaacatggtgaaaccccatctctactaaaaatacaaaaattatccagacatggtggcacatgcctctactcccagctacttgggaggctgaggcaggagaatcgcttgaacctaggaggcaggggttgcagtgagccgagattgagccactgcactctagcctgggcgacagagtgagactttgtctaaaaaacataaataaaataaaatgaaatg

SEQ ID NO: 25845 - DNA, 952 bp, Homo sapiens
cgcctggctccggccccaccccgccatcccctggccatgggctgactcgccacccccgacactgcagcgcctgccgacctcggggccccgccctctgccttcgctcgcgccgctctccttcagtctccccagggcctgtttcatggatagggtccccttgcccgcgtgaaagtctcattcctcctcagctcagaaacactccaaggtctcggcgccctatactggccttccctcatccgaatacccctcgtgctcctgatgtacttttccattcccactccctactctggcagtctagcttctaagctgaggagtttggccttcgctccaggtgcggggactcgtggaaggatttgattcgcgcttgagaaagatcgctccgctcctgtaaggaagagagcgtgtaggggctgcaaccagagacacagtcagaagctccgaggctaccgcgatggtccaggtgccacaggacacagcctaacagaggcccaggttggagccatggaccatggagtcatgagaatggaagggaagctgacgccatgtgggatggggtagaactgtccgcaaattcgtcccgcctctggagtcttcagaccagtcaaggccgaaattcaaccaagcctctcctctctctagctgttatttgtttgcagcacgcggtctggtggcaccctgcaggatttaccagctttttgccaacattctggcctatgcaatcaatacgtcccttcagcgttgcacttggatggattggacctatagttgttatatatggatattgtctaatttatttattacagtattaactgactcctatgttcagagccagggtcctgttcgaaaccaagcatcctgtggcacgctgctactcatttgcttctatgggtatgctagaagcgagaatccgtatactaaccacaattctcagaccccatcctaagttcagagc

SEQ ID NO: 25846 - DNA, 2088 bp, Homo sapiens
cgcctggctccggccccaccccgccatcccctggccatgggctgactcgccacccccgacactgcagcgcctgccgacctcggggccccgccctctgccttcgctcgcgccgctctccttcagtctccccagggcctgtttcatggatagggtccccttgcccgcgtgaaagtctcattcctcctcagctcagaaacactccaaggtctcggcgccctatactggccttccctcatccgaatacccctcgtgctcctgatgtacttttccattcccactccctactctggcagtctagcttctaagctgaggagtttggccttcgctccaggtgcggggactcgtggaaggatttgattcgcgcttgagaaagatcgctccgctcctgtaaggaagagagcgtgtaggggctgcaaccagagacacagtcagaagctccgaggctaccgcgatggtccagcacgcggtctggtggcaccctgcaggatttaccagctttttgccaacattctggcctatgcaatcaatacgtcccttcagcgttgcacttggatggattggacctatagttgttatatatggatattgtctaatttatttattacagtattaactgactcctatgttctggccttcagaatttctcctttggatcaattactagcctgtcttacattttctgcttcattcttttaaaatgtttagagatgatttgctaagttttcttcattgctgtcaatgatgcaatttaaactgtcaaaaaaattttttctcaagcagggtagtaatggtgaaccattcccttgctattcagacagcatggtttagatgaggcgcacctatccccagctttaggaatggaaacaggacccaagtctggctaatcagagactggtttagggtcggccccatggtctgagccagaccaatgagaattggtagagggacttccttttgcaacttctattttagaatcgggggtatatatgcaggcttgttacagaggtatattgcatggtgctgaggtttggagtatgaacgaatccgtccttcaggtaatgagcatagtacccaataggtagtttcaacccttgcccccttcctccttccccagtcttgtattccccagtgtctgttgttcccagacattgatctttttcctctatgttgctaagctggtagaaaggctggagttgctggcaaccatctttgcaaccatgcagggagaactactttggaaatgaagcaagacaaagaagaaaacagataaaaggagacaaatgtttgactttgtacagctggaaaccagcaatgctggaaatgagcactgaaggcagtttaatgggtttgtcacttgtaaccaagtgacccatggcaagctcacagatttgtattggcagaattcctccttttctttatttaaaatggtacttttggccaggcaaggtggttcacacctgtaatccaaagactttgggaggccgaggcgcactgatcacccaaggtcagaagttcgagaacagcctggccaacattggcgaaaccccatctctactaaaaatacaaaccattagctggctgcggtggcctttctaccagctttttgtctcaaaaaaaaaaaaaaaaaggtacttttgcttatctctaaccttcctcttccccataatttaacagttgcccatactatctgttactctgagctactctctgccccattctcctcctcttatcttcagttcctcctaggctgtcagagccatctgaaatgaaaacatttaggccgggcatagtggttcatgcctgtaatcccagcactttgggaggctgaggcaggcggatcagctgaggtcaggagttcaagaccaccctggtcaacatggtgaaaccccatctctactaaaaatacaaaaattatccagacatggtggcacatgcctctactcccagctacttgggaggctgaggcaggagaatcgcttgaacctaggaggcaggggttgcagtgagccgagattgagccactgcactctagcctgggcgacagagtgagactttgtctaaaaaacataaataaaataaaatgaaatg

SEQ ID NO: 25847 - DNA, 541 bp, Homo sapiens
cggggactcgtggaaggatttgattcgcgcttgagaaagatcgctccgctcctgtaaggaagagagcgtgtaggggctgcaaccagagacacagtcagaagctccgaggctaccgcgatggtccaggtgagaatggaggggcctaactaaaccagtggcgggagggatggaagaatgaactgagacacttgggaggtgaatggaatcgagcgactgcatgtggaggtgtgagtgggaaggtatctgagatgactccagtttctggcttggacaatgacttggatggagggttaggtgggggctgagcagagtccacgaacagtttttaatttgcctgagtttaaggtgccacaggacacagcctaacagaggcccaggttggagccatggaccatggagtcatgagaatggaagggaagctgacgccatgtgggatggggtagaactgtccgcaaattcgtcccgcctctggagtcttcagaccagtcaaggccgaaattcaaccaagcctctcctctctctagctgttatttgtttgcag

SEQ ID NO: 25848 - DNA, 426 bp, Homo sapiens
gctgtcaatgatgcaatttaaactgtcaaaaaaattttttctcaagcagggtagtaatggtgaaccattcccttgctattcagacagcatggtttagatgaggcgcacctatccccagctttaggaatggaaacaggacccaagtctggctaatcagagactggtttagggtcggccccatggtctgagccagaccaatgagaattggtagagggacttccttttgcaacttctattttagaatcgggggtatatatgcaggcttgttacagaggtatattgcatggtgctgaggtttggagtatgaacgaatccgtccttcaggtaatgagcatagtacccaataggtagtttcaacccttgcccccttcctccttccccagtcttgtattccccagtgtctgttgttcccagacattgatcttt

SEQ ID NO: 25849 - DNA, 1275 bp, Homo sapiens
ttaattaaatttaatcccagggaaattagatgtgaatttgaacacctaactttccatgtactctctcatttttgtggaagtgtttctatactctaatgcctttacaaatgtgatttttctcttagctcgtttgaagtatgagaattagagtttttggtctcgcattcacctgctacatctaggattgcccactgtcatgactcccaggaaaaggtcctatcttagcttcctcctccctactttcctctacatggtcagcactgtaatgtagctaagatatagtaaggcattgctccctccccctacacttcaaggagttcacagtctaatggggagttcaggaaggccagagtattaatatccccatctgtgtcttttgccttccatgaacctgggttttgagccctctcttgtaaaatgggcacagtaatattacctacctcagggagttgtgaggattaaacatgaagtgctaagcatagtgcctggtacaaagacagtactcaataagtgctacctaaaactagtattcatagcaatactgttaggataaagaattatcatatatgagatagttccaaatttttgtttttttaaaaaagagttttataagttcaagataatattttcttacttcaaagaaacaatctcacaacgagggaatggtaagaatcaggagagattactaacctggcagaggagctatcacaatcacaaaggtggtttttccagggcacggctcatccattacactccagatgtgctgacccctgccatttccccaaatgtgggaaacccaactgcacagtttgtagtagtgggtgactgtgttcatgcgctcccctgaatcccgaaaacaacaacaacaacaaagaatcagaagagatactaggctatctaattcctaaatccaaacctgatatttctaagtaagattataagaatttttattgcattttctgaatttgcttttgcataagttatgttatttttacagggtctatattactattatttcttagaataatactaattataaaacaaaattctgtatatcacatttaaatgtaatttaatagaattataatcacaagacaagaccaaactttgttgataatcctcagtaattgcgaaaggggtatatacatgtaggccagcatacatgcataaactacttcttattgctagtctaattgttccatatgtagcaaatacagcagttcagcaatatcttgtgcttacagggtagctcatggtgctagctctcctcgtgcc

SEQ ID NO: 25850 - DNA, 1716 bp, Homo sapiens
ttaattaaatttaatcccagggaaattagatgtgaatttgaacacctaactttccatgtactctctcatttttgtggaagtgtttctatactctaatgcctttacaaatgtgatttttctcttagctcgtttgaagtatgagaattagagtttttggtctcgcattcacctgctacatctaggattgcccactgtcatgactcccaggaaaaggtcctatcttagcttcctcctccctactttcctctacatggtcagcactgtaatgtagctaagatatagtaaggcattgctccctccccctacacttcaaggagttcacagtctaatggggagttcaggaaggccagagtattaatatccccatctgtgtcttttgccttccatgaacctgggttttgagccctctcttgtaaaatgggcacagtaatattacctacctcagggagttgtgaggattaaacatgaagtgctaagcatagtgcctggtacaaagacagtactcaataagtgctacctaaaactagtattcatagcaatactgttaggataaagaattatcatatatgagatagttccaaatttttgtttttttaaaaaagagttttataagttcaagataatattttcttacttcaaagaaacaatctcacaacgagggaatggtaagaatcaggagagattactaacctggcagaggagctatcacaatcacaaaggtggtttttccagggcacggctcatccattacactccagatgtgctgacccctgccatttccccaaatgtgggaaacccaactgcacagtttgtagtagtgggtgactgtgttcatgcgctcccctgaatcccctgatatttctaagtaagattataagaatttttattgcattttctgaatttgcttttgcataagttatgttatttttacagggtctatattactattatttcttagaataatactaattataaaacaaaattctgtatatcacatttaaatgtaatttaatagaattataatcacaagacaagaccaaactttgttgataatcctcagtaattgcgaaaggggtatatacatgtaggccagcatacatgcataaactacttcttattgctagtctaattgttccatatgtagcaaatacagcagttcagcaatatcttgtgcttacagggtcctaagcagaggtgatgagtcaagtgtaaatatatatatatatttttttatttttcatggcaattgtatattagtaacctggggagaaaaggtttattgacaaccactctgatccatctgctgctatttttactgctaatttggtgcacattaaaaagaatgatcatgaaaagatattactttgagttaaaagtatatatatatatatatatatatatatatacacacacacatatatatacaatagtttgatgtcaataaatacatttctgaatgcttagtgttgcttcatttacatagaaaaaaacacactttaaaaactgatattggtttattatatatattcatttccttctcacagtactttcccattctcattttagaaataaaatgtgaatgattttttaaggccaaattttattcccatctggcagttgttttgattataagtagtggattgatggaaataatttaattgagcaaatatttagttgagttccttttatgaacaagatactttgttaaagttctgt

SEQ ID NO: 25851 - DNA, 1780 bp, Homo sapiens
ttaattaaatttaatcccagggaaattagatgtgaatttgaacacctaactttccatgtactctctcatttttgtggaagtgtttctatactctaatgcctttacaaatgtgatttttctcttagctcgtttgaagtatgagaattagagtttttggtctcgcattcacctgctacatctaggattgcccactgtcatgactcccaggaaaaggtcctatcttagcttcctcctccctactttcctctacatggtcagcactgtaatgtagctaagatatagtaaggcattgctccctccccctacacttcaaggagttcacagtctaatggggagttcaggaaggccagagtattaatatccccatctgtgtcttttgccttccatgaacctgggttttgagccctctcttgtaaaatgggcacagtaatattacctacctcagggagttgtgaggattaaacatgaagtgctaagcatagtgcctggtacaaagacagtactcaataagtgctacctaaaactagtattcatagcaatactgttaggataaagaattatcatatatgagatagttccaaatttttgtttttttaaaaaagagttttataagttcaagataatattttcttacttcaaagaaacaatctcacaacgagggaatggtaagaatcaggagagattactaacctggcagaggagctatcacaatcacaaaggtggtttttccagggcacggctcatccattacactccagatgtgctgacccctgccatttccccaaatgtgggaaacccaactgcacagtttgtagtagtgggtgactgtgttcatgcgctcccctgaatcccgaaaacaacaacaacaacaaagaatcagaagagatactaggctatctaattcctaaatccaaacctgatatttctaagtaagattataagaatttttattgcattttctgaatttgcttttgcataagttatgttatttttacagggtctatattactattatttcttagaataatactaattataaaacaaaattctgtatatcacatttaaatgtaatttaatagaattataatcacaagacaagaccaaactttgttgataatcctcagtaattgcgaaaggggtatatacatgtaggccagcatacatgcataaactacttcttattgctagtctaattgttccatatgtagcaaatacagcagttcagcaatatcttgtgcttacagggtcctaagcagaggtgatgagtcaagtgtaaatatatatatatatttttttatttttcatggcaattgtatattagtaacctggggagaaaaggtttattgacaaccactctgatccatctgctgctatttttactgctaatttggtgcacattaaaaagaatgatcatgaaaagatattactttgagttaaaagtatatatatatatatatatatatatatatacacacacacatatatatacaatagtttgatgtcaataaatacatttctgaatgcttagtgttgcttcatttacatagaaaaaaacacactttaaaaactgatattggtttattatatatattcatttccttctcacagtactttcccattctcattttagaaataaaatgtgaatgattttttaaggccaaattttattcccatctggcagttgttttgattataagtagtggattgatggaaataatttaattgagcaaatatttagttgagttccttttatgaacaagatactttgttaaagttctgt

SEQ ID NO: 25852 - DNA, 1705 bp, Homo sapiens
ttaattaaatttaatcccagggaaattagatgtgaatttgaacacctaactttccatgtactctctcatttttgtggaagtgtttctatactctaatgcctttacaaatgtgatttttctcttagctcgtttgaagtatgagaattagagtttttggtctcgcattcacctgctacatctaggattgcccactgtcatgactcccaggaaaaggtcctatcttagcttcctcctccctactttcctctacatggtcagcactgtaatgtagctaagatatagtaaggcattgctccctccccctacacttcaaggagttcacagtctaatggggagttcaggaaggccagagtattaatatccccatctgtgtcttttgccttccatgaacctgggttttgagccctctcttgtaaaatgggcacagtaatattacctacctcagggagttgtgaggattaaacatgaagtgctaagcatagtgcctggtacaaagacagtactcaataagtgctacctaaaactagtattcatagcaatactgttaggataaagaattatcatatatgagatagttccaaatttttgtttttttaaaaaagagttttataagttcaagataatattttcttacttcaaagaaacaatctcacaacgagggaatggtaagaatcaggagagattactaacctggcagaggagctatcacaatcacaaaggtggtttttccagggcacggctcatccattacactccagatgtgctgacccctgccatgaaaacaacaacaacaacaaagaatcagaagagatactaggctatctaattcctaaatccaaacctgatatttctaagtaagattataagaatttttattgcattttctgaatttgcttttgcataagttatgttatttttacagggtctatattactattatttcttagaataatactaattataaaacaaaattctgtatatcacatttaaatgtaatttaatagaattataatcacaagacaagaccaaactttgttgataatcctcagtaattgcgaaaggggtatatacatgtaggccagcatacatgcataaactacttcttattgctagtctaattgttccatatgtagcaaatacagcagttcagcaatatcttgtgcttacagggtcctaagcagaggtgatgagtcaagtgtaaatatatatatatatttttttatttttcatggcaattgtatattagtaacctggggagaaaaggtttattgacaaccactctgatccatctgctgctatttttactgctaatttggtgcacattaaaaagaatgatcatgaaaagatattactttgagttaaaagtatatatatatatatatatatatatatatacacacacacatatatatacaatagtttgatgtcaataaatacatttctgaatgcttagtgttgcttcatttacatagaaaaaaacacactttaaaaactgatattggtttattatatatattcatttccttctcacagtactttcccattctcattttagaaataaaatgtgaatgattttttaaggccaaattttattcccatctggcagttgttttgattataagtagtggattgatggaaataatttaattgagcaaatatttagttgagttccttttatgaacaagatactttgttaaagttctgt

SEQ ID NO: 25853 - DNA, 1412 bp, Homo sapiens
ttaattaaatttaatcccagggaaattagatgtgaatttgaacacctaactttccatgtactctctcatttttgtggaagtgtttctatactctaatgcctttacaaatgtgatttttctcttagctcgtttgaagtatgagaattagagtttttggtctcgcattcacctgctacatctaggattgcccactgtcatgactcccaggaaaaggtcctatcttagcttcctcctccctactttcctctacatggtcagcactgtaatgtagctaagatatagtaaggcattgctccctccccctacacttcaaggagttcacagtctaatggggagttcaggaaggccagagtattaatatccccatctgtgtcttttgccttccatgaacctgggttttgagccctctcttgtaaaatgggcacagtaatattacctacctcagggagttgtgaggattaaacatgaagtgctaagcatagtgcctggtacaaagacagtactcaataagtgctacctaaaactagtattcatagcaatactgttaggataaagaattatcatatatgagatagttccaaatttttgtttttttaaaaaagagttttataagttcaagataatattttcttacttcaaagaaacaatctcacaacgagggaatggtaagaatcaggagagattactaacctggcagaggagctatcacaatcacaaaggtggtttttccagggcacggctcatccattacactccagatgtgctgacccctgccatttccccaaatgtgggaaacccaactgcacagtttgtagtagtgggtgactgtgttcatgcgctcccctgaatcccgaaaacaacaacaacaacaaagaatcagaagagatactaggctatctaattcctaaatccaaacctgatatttctaagtaagattataagaatttttattgcattttctgaatttgcttttgcataagttatgttatttttacagggtctatattactattatttcttagaataatactaattataaaacaaaattctgtatatcacatttaaatgtaatttaatagaattataatcacaagacaagaccaaactttgttgataatcctcagtaattgcgaaaggggtatatacatgtaggccagcatacatgcataaactacttcttattgctagtctaattgttccatatgtagcaaatacagcagttcagcaatatcttgtgcttacagggtcctaagcagaggtgatgagtcaagtgtaaatatatatatatatttttttatgaatgattagaactgggaaaagtatgcacattgacttgtgtatttatgtatgggccttaaatgctgaaaatactgggttttttttttcccccttttcatgtgagatatttgagt

SEQ ID NO: 25854 - DNA, 1613 bp, Homo sapiens
ttaattaaatttaatcccagggaaattagatgtgaatttgaacacctaactttccatgtactctctcatttttgtggaagtgtttctatactctaatgcctttacaaatgtgatttttctcttagctcgtttgaagtatgagaattagagtttttggtctcgcattcacctgctacatctaggattgcccactgtcatgactcccaggaaaaggtcctatcttagcttcctcctccctactttccagagtattaatatccccatctgtgtcttttgccttccatgaacctgggttttgagccctctcttgtaaaatgggcacagtaatattacctacctcagggagttgtgaggattaaacatgaagtgctaagcatagtgcctggtacaaagacagtactcaataagtgctacctaaaactagtattcatagcaatactgttaggataaagaattatcatatatgagatagttccaaatttttgtttttttaaaaaagagttttataagttcaagataatattttcttacttcaaagaaacaatctcacaacgagggaatggtaagaatcaggagagattactaacctggcagaggagctatcacaatcacaaaggtggtttttccagggcacggctcatccattacactccagatgtgctgacccctgccatttccccaaatgtgggaaacccaactgcacagtttgtagtagtgggtgactgtgttcatgcgctcccctgaatcccctgatatttctaagtaagattataagaatttttattgcattttctgaatttgcttttgcataagttatgttatttttacagggtctatattactattatttcttagaataatactaattataaaacaaaattctgtatatcacatttaaatgtaatttaatagaattataatcacaagacaagaccaaactttgttgataatcctcagtaattgcgaaaggggtatatacatgtaggccagcatacatgcataaactacttcttattgctagtctaattgttccatatgtagcaaatacagcagttcagcaatatcttgtgcttacagggtcctaagcagaggtgatgagtcaagtgtaaatatatatatatatttttttatttttcatggcaattgtatattagtaacctggggagaaaaggtttattgacaaccactctgatccatctgctgctatttttactgctaatttggtgcacattaaaaagaatgatcatgaaaagatattactttgagttaaaagtatatatatatatatatatatatatatatacacacacacatatatatacaatagtttgatgtcaataaatacatttctgaatgcttagtgttgcttcatttacatagaaaaaaacacactttaaaaactgatattggtttattatatatattcatttccttctcacagtactttcccattctcattttagaaataaaatgtgaatgattttttaaggccaaattttattcccatctggcagttgttttgattataagtagtggattgatggaaataatttaattgagcaaatatttagttgagttccttttatgaacaagatactttgttaaagttctgt

SEQ ID NO: 25855 - DNA, 1726 bp, Homo sapiens
ttaattaaatttaatcccagggaaattagatgtgaatttgaacacctaactttccatgtactctctcatttttgtggaagtgtttctatactctaatgcctttacaaatgtgatttttctcttagctcgtttgaagtatgagaattagagtttttggtctcgcattcacctgctacatctaggattgcccactgtcatgactcccaggaaaaggtcctatcttagcttcctcctccctactttcctctacatggtcagcactgtaatgtagctaagatatagtaaggcattgctccctccccctacacttcaaggagttcacagtctaatggggagttcaggaaggccagagtattaatatccccatctgtgtcttttgccttccatgaacctgggttttgagccctctcttgtaaaatgggcacagtaatattacctacctcagggagttgtgaggattaaacatgaagtgctaagcatagtgcctggtacaaagacagtactcaataagtgctacctaaaactagtattcatagcaatactgttaggataaagaattatcatatatgagatagttccaaatttttgtttttttaaaaaagagttttataagttcaagataatattttcttacttcaaagaaacaatctcacaacgagggaatggtaagaatcaggagagattactaacctggcagaggagctatcacaatcacaaaggtggtttttccagggcacggctcatccattacactccagatgtgctgacccctgccatttccccaaatgtgggaaacccaactgcacagtttgtagtagtgggtgactgtgttcatgcgctcccctgaatcccgaaaacaacaacaacaacaaagaatcagaagagatactaggctatctaattcctaaatccaaacctgatatttctaagtaagattataagaatttttattgcattttctgaatttgcttttgcataagttatgttatttttacagggtctatattactattatttcttagaataatactaattataaaacaagaccaaactttgttgataatcctcagtaattgcgaaaggggtatatacatgtaggccagcatacatgcataaactacttcttattgctagtctaattgttccatatgtagcaaatacagcagttcagcaatatcttgtgcttacagggtcctaagcagaggtgatgagtcaagtgtaaatatatatatatatttttttatttttcatggcaattgtatattagtaacctggggagaaaaggtttattgacaaccactctgatccatctgctgctatttttactgctaatttggtgcacattaaaaagaatgatcatgaaaagatattactttgagttaaaagtatatatatatatatatatatatatatatacacacacacatatatatacaatagtttgatgtcaataaatacatttctgaatgcttagtgttgcttcatttacatagaaaaaaacacactttaaaaactgatattggtttattatatatattcatttccttctcacagtactttcccattctcattttagaaataaaatgtgaatgattttttaaggccaaattttattcccatctggcagttgttttgattataagtagtggattgatggaaataatttaattgagcaaatatttagttgagttccttttatgaacaagatactttgttaaagttctgt

SEQ ID NO: 25856 - DNA, 1722 bp, Homo sapiens
ttaattaaatttaatcccagggaaattagatgtgaatttgaacacctaactttccatgtactctctcatttttgtggaagtgtttctatactctaatgcctttacaaatgtgatttttctcttagctcgtttgaagtatgagaattagagtttttggtctcgcattcacctgctacatctaggattgcccactgtcatgactcccaggaaaaggtcctatcttagcttcctcctccctactttcctctacatggtcagcactgtaatgtagctaagatatagtaaggcattgctccctccccctacacttcaaggagttcacagtctaatggggagttcaggaaggccagagtattaatatccccatctgtgtcttttgccttccatgaacctgggttttgagccctctcttgtaaaatgggcacagtaatattacctacctcagggagttgtgaggattaaacatgaagtgctaagcatagtgcctggtacaaagacagtactcaataagtgctacctaaaactagtattcatagcaatactgttaggataaagaattatcatatatgagatagttccaaatttttgtttttttaacgagggaatggtaagaatcaggagagattactaacctggcagaggagctatcacaatcacaaaggtggtttttccagggcacggctcatccattacactccagatgtgctgacccctgccatttccccaaatgtgggaaacccaactgcacagtttgtagtagtgggtgactgtgttcatgcgctcccctgaatcccgaaaacaacaacaacaacaaagaatcagaagagatactaggctatctaattcctaaatccaaacctgatatttctaagtaagattataagaatttttattgcattttctgaatttgcttttgcataagttatgttatttttacagggtctatattactattatttcttagaataatactaattataaaacaaaattctgtatatcacatttaaatgtaatttaatagaattataatcacaagacaagaccaaactttgttgataatcctcagtaattgcgaaaggggtatatacatgtaggccagcatacatgcataaactacttcttattgctagtctaattgttccatatgtagcaaatacagcagttcagcaatatcttgtgcttacagggtcctaagcagaggtgatgagtcaagtgtaaatatatatatatatttttttatttttcatggcaattgtatattagtaacctggggagaaaaggtttattgacaaccactctgatccatctgctgctatttttactgctaatttggtgcacattaaaaagaatgatcatgaaaagatattactttgagttaaaagtatatatatatatatatatatatatatatacacacacacatatatatacaatagtttgatgtcaataaatacatttctgaatgcttagtgttgcttcatttacatagaaaaaaacacactttaaaaactgatattggtttattatatatattcatttccttctcacagtactttcccattctcattttagaaataaaatgtgaatgattttttaaggccaaattttattcccatctggcagttgttttgattataagtagtggattgatggaaataatttaattgagcaaatatttagttgagttccttttatgaacaagatactttgttaaagttctgt

SEQ ID NO: 25857 - DNA, 532 bp, Homo sapiens
gctgcaggattcggcacgagagctgctccaggaacagaggtgccatgcagccccgggtactccttgttgttgccctcctggcgctcctggcctctgcccgagcttcagaggccgaggatgcctcccttctcagcttcatgcagggctacatgaagcacgccaccaagaccgccaaggatgcactgagcagcgtgcaggagtcccaggtggcccagcaggccaggggctgggtgaccgatggcttcagttccctgaaagactactggagcaccgttaaggacaagttctctgagttctgggatttggaccctgaggtcagaccaacttcagccgtggctgcctgagacctcaataccccaagtccacctgcctatccatcctgccagctccttgggtcctgcaatctccagggctgcccctgtaggttgcttaaaagggacagtattctcagtgctctcctaccccacctcatgcctggcccccctccaggcatgctggcctcccaataaagctggacaagaagctgctatga

SEQ ID NO: 25858 - DNA, 550 bp, Homo sapiens
aaccctcctgcctgtctgctcagttcatccctagaggcagctgctccaggaacagaggtgccatgcagccccgggtactccttgttgttgccctcctggcgctcctggcctctgcccgagcttcagaggccgaggatgcctcccttctcagcttcatgcagggctacatgaagcacgccaccaagaccgccaaggatgcactgagcagcgtgcaggagtcccaggtggcccagcaggccaggggctgggtgaccgatggcttcagttccctgaaagactactggagcaccgttaaggacaagttctctgagttctgggatttggaccctgaggtcagaccaacttcagccgtggctgcctgagacctcaataccccaagtccacctgcctatccatcctgccagctccttgggtcctgcaatctccagggctgcccctgtaggttgcttaaaagggacagtattctcagtgctctcctaccccacctcatgcctggcccccctccaggcatgctggcctcccaataaagctggacaagaagctgctatga

SEQ ID NO: 25859 - DNA, 820 bp, Homo sapiens
ggctttggggtaggtgttattttctcactttgcagatgagaaaattgaggctcagagcgattaggtgacctgccccagatcacacaactaatcaatcctccaatgactttccaaatgagaggctgcctccctctgtcctaccctgctcagagccaccaggttgtgcaactccaggcggtgctgtttgcacagaaaacaatgacagccttgacctttcacatctccccaccctgtcactttgtgcctcaggcccaggggcataaacatctgaggtgacctgggagatggcagggtttgacttgtgctggggttcctgcaaggatatctcttctcccagggtgggcagctgtgggggattcctgcctgaggtctcagggctgtcgtccagtgaagttgagagggtggtgtggtcctgactggtgtcgtccagtggggaacatgggtgtgggtcccatggttgcctacagaggagttctcatgccctgctctgttgcttcccctgactatttaggggctgggtgaccgatggcttcagttccctgaaagactactggagcaccgttaaggacaagttctctgagttctgggatttggaccctgaggtcagaccaacttcagccgtggctgcctgagacctcaataccccaagtccacctgcctatccatcctgccagctccttgggtcctgcaatctccagggctgcccctgtaggttgcttaaaagggacagtattctcagtgctctcctaccccacctcatgcctggcccccctccaggcatgctggcctcccaataaagctggacaagaagctgctatga

SEQ ID NO: 25860 - DNA, 855 bp, Homo sapiens
  misc_feature (849)..(849): n is a, c, g, or t
ggctttggggtaggtgttattttctcactttgcagatgagaaaattgaggctcagagcgattaggtgacctgccccagatcacacaactaatcaatcctccaatgactttccaaatgagaggctgcctccctctgtcctaccctgctcagagccaccaggttgtgcaactccaggcggtgctgtttgcacagaaaacaatgacagccttgacctttcacatctccccaccctgtcactttgtgcctcaggcccaggggcataaacatctgaggtgacctgggagatggcagggtttgacttgtgctggggttcctgcaaggatatctcttctcccagggtgggcagctgtgggggattcctgcctgaggtctcagggctgtcgtccagtgaagttgagagggtggtgtggtcctgactggtgtcgtccagtggggaacatgggtgtgggtcccatggttgcctacagaggagttctcatgccctgctctgttgcttcccctgactatttaggggctgggtgaccgatggcttcagttccctgaaagactactggagcaccgttaaggacaagttctctgagttctgggatttggaccctgaggtcagaccaacttcagccgtggctgcctgagacctcaataccccaagtccacctgcctatccatcctgccagctccttgggtcctgcaatctccagggctgcccctgtaggttgcttaaaagggacagtattctcagtgctctcctaccccacctcatgcctggcccccctccaggcatgctggcctcccaataaagctggacaagaagctgctatgaaaaaaaaaaaaaaaaaaaaaaaaaaaacnaaaaaa

SEQ ID NO: 25861 - DNA, 445 bp, Homo sapiens
gatcacccggcaagttcaggctgaattctgaaggcaaacttgagcagacggtctccatggcaacccgagcttcagaggccgaggatgcctcccttctcagcttcatgcagggctacatgaagcacgccaccaagaccgccaaggatgcactgagcagcgtgcaggagtcccaggtggcccagcaggccaggggctgggtgaccgatggcttcagttccctgaaagactactggagcaccgttaaggacaagttctctgagttctgggatttggaccctgaggtcagaccaacttcagccgtggctgcctgagacctcaataccccaagtccacctgcctatccatcctgccagctccttgggtcctgcaatctccagggctgcccctgtaggttgcctccaggcatgctggcctcccaataaagctggacaagaagctgctatga

SEQ ID NO: 25862 - DNA, 609 bp, Homo sapiens
gctgcaggattcggcacgagagctgctccaggggccacgccacctccccagggaggggtccagaggcatggggacctggggtgcccctcacaggacacttccttgcaggaacagaggtgccatgcagccccgggtactccttgttgttgccctcctggcgctcctggcctctgcccgagcttcagaggccgaggatgcctcccttctcagcttcatgcagggctacatgaagcacgccaccaagaccgccaaggatgcactgagcagcgtgcaggagtcccaggtggcccagcaggccaggggctgggtgaccgatggcttcagttccctgaaagactactggagcaccgttaaggacaagttctctgagttctgggatttggaccctgaggtcagaccaacttcagccgtggctgcctgagacctcaataccccaagtccacctgcctatccatcctgccagctccttgggtcctgcaatctccagggctgcccctgtaggttgcttaaaagggacagtattctcagtgctctcctaccccacctcatgcctggcccccctccaggcatgctggcctcccaataaagctggacaagaagctgctatga

SEQ ID NO: 25863 - DNA, 706 bp, Homo sapiens
gctgcaggattcggcacgagagctgctccaggaacagaggtgccatgcagccccgggtactccttgttgttgccctcctggcgctcctggcctctgcccgagcttcagaggccgaggatgcctcccttctcagcttcatgcagggctacatgaagcacgccaccaagaccgccaaggatgcactgagcagcgtgcaggagtcccaggtggcccagcaggccaggggctgggtgaccgatggcttcagttccctgaaagactactggagcaccgttaaggacaagttctctgagttctgggatttggaccctgaggtcagaccaacttcagccgtggctgcctgagacctcaataccccaagtccacctgcctatccatcctgccagctccttgggtcctgcaatctccagggctgcccctgtaggttgcttaaaagggacagtattctcagtgctctcctaccccacctcatgcctggcccccctccaggcatgctggcctcccaataaagctggacaagaagctgctatgaaaaaaaaaaggaataacaataaaaagaactatacgaaaagaatacaaatactcaagggggggcccgagacccaaattgtcttatagtgagacgccttacaattaaatggcgggggggcccagtacccaaaattgcgaaaaccggggcgtatcccaattcactggccgtgcttta

SEQ ID NO: 25864 - DNA, 499 bp, Homo sapiens
gatcacccggcaagttcaggctgaattctgaaggcaaacttgagcagacggtctccatggcaacccgagcttcagaggccgaggatgcctcccttctcagcttcatgcagggctacatgaagcacgccaccaagaccgccaaggatgcactgagcagcgtgcaggagtcccaggtggcccagcaggccaggggctgggtgaccgatggcttcagttccctgaaagactactggagcaccgttaaggacaagttctctgagttctgggatttggaccctgaggtcagaccaacttcagccgtggctgcctgagacctcaataccccaagtccacctgcctatccatcctgccagctccttgggtcctgcaatctccagggctgcccctgtaggttgcttaaaagggacagtattctcagtgctctcctaccccacctcatgcctggcccccctccaggcatgctggcctcccaataaagctggacaagaagctgctatga

SEQ ID NO: 25865 - DNA, 567 bp, Homo sapiens
  misc_feature (561)..(561): n is a, c, g, or t
gctgcaggattcggcacgagagctgctccaggaacagaggtgccatgcagccccgggtactccttgttgttgccctcctggcgctcctggcctctgcccgagcttcagaggccgaggatgcctcccttctcagcttcatgcagggctacatgaagcacgccaccaagaccgccaaggatgcactgagcagcgtgcaggagtcccaggtggcccagcaggccaggggctgggtgaccgatggcttcagttccctgaaagactactggagcaccgttaaggacaagttctctgagttctgggatttggaccctgaggtcagaccaacttcagccgtggctgcctgagacctcaataccccaagtccacctgcctatccatcctgccagctccttgggtcctgcaatctccagggctgcccctgtaggttgcttaaaagggacagtattctcagtgctctcctaccccacctcatgcctggcccccctccaggcatgctggcctcccaataaagctggacaagaagctgctatgaaaaaaaaaaaaaaaaaaaaaaaaaaaacnaaaaaa

SEQ ID NO: 25866 - DNA, 436 bp, Homo sapiens
ggctgcagggctggcgggacagcagcgtggactcagtctcctagggatttcccaactctcccgcccgcttgctgcatctggacaccctgcctcaggccctcatctccactggtcagcaggtgacctttgcccagcgccctgggtcctcagtgcctgctgccctggagatgatatgctccaggaacagaggtgccatgcagccccgggtactccttgttgttgccctcctggcgctcctggcctctgcccgagcttcagaggccgaggatgcctcccttctcagcttcatgcagggctacatgaagcacgccaccaagaccgccaaggatgcactgagcagcgtgcaggagtcccaggtggcccagcaggccagggcctttgtcaggctgctgcgggagagatgacagagttgagactgcattcctcccaggtccct

SEQ ID NO: 25867 - DNA, 682 bp, Homo sapiens
ggctgcagggctggcgggacagcagcgtggactcagtctcctagggatttcccaactctcccgcccgcttgctgcatctggacaccctgcctcaggccctcatctccactggtcagcaggtgacctttgcccagcgccctgggtcctcagtgcctgctgccctggagatgatatgctccaggaacagaggtgccatgcagccccgggtactccttgttgttgccctcctggcgctcctggcctctgcccgagcttcagaggccgaggatgcctcccttctcagcttcatgcagggctacatgaagcacgccaccaagaccgccaaggatgcactgagcagcgtgcaggagtcccaggtggcccagcaggccaggggctgggtgaccgatggcttcagttccctgaaagactactggagcaccgttaaggacaagttctctgagttctgggatttggaccctgaggtcagaccaacttcagccgtggctgcctgagacctcaataccccaagtccacctgcctatccatcctgccagctccttgggtcctgcaatctccagggctgcccctgtaggttgcttaaaagggacagtattctcagtgctctcctaccccacctcatgcctggcccccctccaggcatgctggcctcccaataaagctggacaagaagctgctatga

SEQ ID NO: 25868 - DNA, 448 bp, Homo sapiens
cccatggtgtttgaatctgctccggctcctgttttatatcccatccttctccattttggtcagaaatattttctgttaccctgagattagcttgtactctaacagaaagaaagaaaattcctgtttaagattataagtggttcacttttagaattatctttttgctagtgccaaaagtttaatttattgttaagaataatgatttttttaattttgaaaatttaatttgtgttctttaaaagtaggcagtgtggaaaagtataaagaggagagtttaaaattattctaaattctatcaatagggctaatcttcattagtattagttaaatgtcattccagagagcattctcttcacatgtatattaatatgagaaagaaaaagtaggcagacagacatagcttatactatcatgaaaaagacatttttcattaaaaacattattcatc

SEQ ID NO: 25869 - DNA, 346 bp, Homo sapiens
ccccattgcagttcttccacaaactctgctagtctggcttcctccacttggatcttggcctccctatctctgacaaattcccctgaatgctgcagaagcccactcatatgtcactgatggttgggtatatgattgaacagattagaccctgcggcatggggctgccttagcctagaggaaggtgtgcccttttagaaagttatccaccaagagtgagacttcttcctactttgcacaaaggtgctgtacaggcaggcagaagctctgatcctctgctcccattgtcctctaggtgtttatggcactgagggcatgcttccccaagccagacctagcatctgactca

SEQ ID NO: 25870 - DNA, 408 bp, Homo sapiens
gattcaggagagggctgaagttcttgaatatcaagatgccgtcttcaacagtcctccttctgcctggacatgaatgggaaggaagctctcggcctcccacaccagcctgactcattttgaaggagaccgattacttcaaggcattcttctgtatctccttcaaaccccattctcttttaagttcgttcttttggcctcgttctgccctccggaaccctctcagattgaaattttcctggaactggagattctgtttttttgagacactctcactcactctactgcccgggctggagtccagtggcgcgatctcggctcactgcaaccttcgcctcccgagttccagcagttctcctgcctcagcctcccgagtaggtgacagagtgagactttgtctgcaaaaaaaaa

SEQ ID NO: 25871 - DNA, 487 bp, Homo sapiens
gccattatccacctagtacttgggagagggaactgagaatgcaggagaaaggtatctgctgaaggtggcagggcagtggcagctctatcagaagcttttgaggtaaagctttgtggctgtaggtgttgattctggggtccatgaggctgtcagtctttgctgtaatggcacagttgtagtcactgtggtggttgggtgagactgagggtatcctcaggtctcgcttgtaactgcaagtggtttgtggtgagctcctggatttagcaattgtggaggctttttttttttttttttttttaagaagactgccccgagtttcagcatccactgccttctcagcaggtgccttcatgcttctgcagtccagatttgctgtaacagtatagatatgcatcaatttatccattcaacaaatatttattcagccttttccatagagtagatgaggtgctagggatgcagccctaaatatgacatgattcctgtc

SEQ ID NO: 25872 - DNA, 478 bp, Homo sapiens
ctcactgtatgaaattgttcaataaactagttacatatacatatgatataataaactccatagatatttttaatgtaacattctatataatactatattaatataatattaattatatattagttatataatatatgtaatctatattaattaaaaatactatattaatctaatagagatattagattctagttgtggccaggcatggtgactcacgtctgtaatcccagtactttgggaggccaaggcagatggatcacttgaggccaggagttcaagaccagcctggccaacacagcaaaaccccatctctactaaaaatacaaaaaaattagccaggcatggtgacacatgcctgtaagctactcaggaggctgaggcaggagaattgcttgaacccgggaggcagaggttggggtgagctgagattgcgccgctgcactacagcctgggtgacagagagagactctgtctcaaa

SEQ ID NO: 25873 - DNA, 244 bp, Homo sapiens
taggaatttgtccatttcatctcagttttctacgttgatggcataaagttgttcataatattgtttcataatattttttaagtttgtacagttggtagtaatgtcacctctttcacttctgaagttggtaatttgggtctgctttttttctagtcagtgtagctaaatgtttttcaactttagtgatctctgcaaacttttagttacactgatttttctctagtacttttctgtttcattggtt

SEQ ID NO: 25874 - DNA, 124 bp, Homo sapiens
taaaaatctgacagtctctgagccccctctccctgcaatccatcctccatgatgccagaaatccaattatgtaacagagctaggatccagccactcctctgctcgcttcctgttaggggctgtg

SEQ ID NO: 25875 - DNA, 303 bp, Homo sapiens
aggataatttcttctccactcagctacctgagagacttttttaaaaaacatctgtcatggttgggcgcgatggctcaagcctctaatcccagcactttgggaggcctggcaggtggatcacttgaggtcaggagttcaagaccagcctggggtctttaacatagcaaaaccctgtctctacaaaatgtaaaaaaattagctagatgtaggtgtgcctgtagtcccagctactcaggaggctgagatggggggattgcttgaacctgggaggcgtgggttgcagtgagctgagatctgctactg

SEQ ID NO: 25876 - DNA, 364 bp, Homo sapiens
aacgccagcatctaacatgttcactatctacctagcccacttttctggagctctaagaataaaatctctgggctgggcgcggtggctcacgcctgtaatcctggcactttgggaggccgacgcaggcggatcaccagaggtcaggagtttgagaccagcctggccaatatggtgaaacccggcctctactaaaaatacaaaaaccagccaggcttggtggctggcgcctgtaatcccagctatttgggaggttgaggcaggagaattgcttgaacctgggaggcggaagttgcagtgagccaagactgtgctactgcactccagcctgggtgacagagcaagactgtctcaaaaaataaattaa

SEQ ID NO: 25877 - DNA, 327 bp, Homo sapiens
gcaacctccgcctcccagattcaagcaattctcctgcctcagcctaacaagtagctgagattacaggtacctgccaccacacctggctaatttttgtatttttggtagagacgaggtttcaccatgttggtcaggctggtcttgaactcctgacctcaagtgatcctcctgcctctgcctcccaaagtgctgggattgcagacatctgtcactgtgccctgccgcgggactgagcctttttaagaaatatttagggccaggcgcggtggctcacacctgtaatcccagcactgtaatcccagctacttgggaggctgaggcttgaac

SEQ ID NO: 25878 - DNA, 846 bp, Homo sapiens
gcctcaagaaagcctcagaaccagaaaaacaggctgctttaggttggaaaggaggtgttacagcagaggaactggccatgaccaccatccttggaatgtgaaacgcaaatcatcctgaaagcaacaagaataatggttgtaataattgtttccaggcctgggaccctgcatcttgttttttaagttgacctgatgaactagtaattgtaggaataaactgaatgtttgccagcaggagtcactctaggcttcctaataaaacgttagtaaattaaactctgtccttaaagctctgaaaggctgaggtgattgtgtgatatcagatggctttagggaaacactgactcttttcgttaagcatagcagcattcttagattattccttgggccttcttttgttcaccatcggttcttggatcttgttcctttcaagattggtccttaatgcatttttaaaaagcaacgtatatgggtaaggatatcaatatcttagtatgctgtattctgtatgttagctcattttggctttctaggatgaactgactctatcccacatcatgtaacttgaaatgaatagactcatatcctttccactgattgctgtccattctaatcatgcagcagaactcagtggagcgagctgtagtgtgaaaggagatgtcagttcatgcttttctgaaaagaatgggtccggtgtgatgatattctgaaatatttcagcaatagccatgaaatataatagtttcccaagcacacaaagctcaagaagttaattgttcatttatgtttgatactgggattgaaacattggattaaaaccaattaaatgttcctagaagcaacaga

SEQ ID NO: 25879 - DNA, 363 bp, Homo sapiens
tgagacatagtctcgctctgttgcccaggctggagtgcaatggcacaatcttggctcactgcaacctctgtctccaaggttcaagcaattctgcctcagcctcccgagtacctgggattacaggcacccaccatcacgcccagctgacttttctatttgtatttttagtagagacagggtttcaccatattggccagactagtcttgaactcctgacctcaagttatccacctaccttggcttcccaaagtgctgggattacccacgtgagccaccgctcctggccctgaggttctgattcctgtttgatgaacctgaagatgattagtcagcaaaccggggctaggtgggatgggcccatca

SEQ ID NO: 25880 - DNA, 497 bp, Homo sapiens
catcaccagcgaggggccatggaaggagcagactagactgctcaatctgctgtctccacctggcggacctaccatgtgattcacttacagacagttggtttgtttttgttttttgtttctctttttgacactgagtttcgctcttgttgcccaagccggagtgcagtggctcgatctcggctcaccacaacctctacctcccgggttcaagtgattctcctgcctcagccacccgagtaggtgggattacaggaacccaccaccacacctggctgattttctacttttagtaaagatggggtttctctatgttgatcaggctggtctgaaactaccgacttcaggaccgcctgcctcggccttccaaagtgcggggattactggcatgagccactgcccctggtcaagaattggtttttaatgcttccttcctccatacaacagaattcttttcaataatgatcattaaacaaaaggaataataataatgtccagaa

SEQ ID NO: 25881 - DNA, 463 bp, Homo sapiens
gatagaaaatggccaaacataagaatttaaagctgtagtcgaatgacccagtgagaaaaatggaaaacacctaagttcaaatctggctctgctttttcctttctcattttggacaggttacttcacctttctgagttgcattatctttagtcaccttataaaatgcaggaactggccaggtgtggtggcacatacctgtaatcccagcactttgggaggccgaggcgggtggatcacgaggtcaggagttcaagaccagcctggccaagatggtgaaacccagtctctactaaaaatacaaaaattagccaggtgtggtggcaggcgcctgtaatcccagctacttgggaggctgaggcagagaattccttgaacctgggaggcagaggttgcagtgagctgagatcgtgccactacgctccagcctgggcaacagagtgagactctgtctcaaaaaaaaaaa

SEQ ID NO: 25882 - DNA, 308 bp, Homo sapiens
gctttaagttggcagcacttcccaccccctgcagagaggaagtttgcatgccatgcacctaccttcttgattgcagctctcatggctacacagcaatagattagaaccccctcgtgctgaatcttgacttgatgaagacaatcaaaatgccccccaaaatgccccccaatacacaacacacgcacacacacacacctgcagccacctcagtttcctgttaagttattgtggtttgggagtcttcattgtcagttcacattagctgtgaagtcagaatccttctgtcatgggacttttagcaaaaaaaa

SEQ ID NO: 25883 - DNA, 622 bp, Homo sapiens
gtgagaaatgctgtgtagaatatgcagcttaggagtttggtagtaaatggttgtttttgaaggtaatttttgtgcattctcatctgatccttaaataaggctgtaaaaaagtagactgtgctttgcttcagaatgttgctttgaaatcagagtttaaggaagaggctgtcagtgtcagctagctggtactagaagaacccaaaggtggagatggctgccagtccaagtttgcttccaggggcgtatgctgcacccctttttcctcaggttctcttcttcacatctgtattctgattcttgtcctatcagatggattactctgtccacttaacaaccttgttaagtcttgcttgaattactgtaacataagaatgttccctggattcctggttaattcaaatctaaagcgcaggacacttgagggaaattaatggcttccttcattgagatgatctatttgttttccattgatgataggaatgacttccattatgaaaaattagttcactggcacacacactgtgggcggggacacacagggcttctgtggtttatttttacttctcgaaacaagaatgcacatccaagtaatctttcttctccgttgaagacaaaaaggtga

SEQ ID NO: 25884 - DNA, 451 bp, Homo sapiens
ggagaaatctggagatgcaattgctctcaaatagagaagaggcccagtaacaagaatgttaaaatgtggctgacttcaagaataggatcaaggtctcaaactagatagttctgaattcttcccccttcctataaggttgttctttcttctgcctggtgagttatgggagagtgacgggatatccttccttccaatctaacttatttctcttcttatagtccatatttataataaagacatcatcattccctttattgagttaaaaatccagaaatcaggctgggggcatggtggcttacacctgtaatcccagcactttgggaggccaaggtgggcaagagttcaagattcagcctgggcaacatgggcaaaaccccatgtccacaaaaaacacggagtttcaagaccagcctaggcaacatggcaaagccccatctctacaaaaaataga

SEQ ID NO: 25885 - DNA, 249 bp, Homo sapiens
taaaataaagcatgtcaaatagaaagcatcaagtcctgatataacagaatatataacactaaatataatcccaatacatacaaatgcattttttatttgcacatatttatgggggtaaatgagatgttgtgttacatgaatataatgtggtaatcaagtctggatattaaaggtgtccatcacttaagtacagtacatttttgttaagtatagtcatccgaagctactatcaaacaatgaatttattcc

SEQ ID NO: 25886 - DNA, 499 bp, Homo sapiens
tgctttggcggggcaaggcttgtttttcttagattgtatgatactagtcagaaaaataacgtggtctaaagatgccgaatttttaaatttatttttactgcttatggggggggggtgttgtagctgatggaaagcttaagcccctaagcccccaccccccattattaataatcagaatccttggaagtctcccgccgcctcccccttctgaccgcccagatttcatcaagccccaggaaggctccacaaggtccaggggaactgagccattttctggctcgtcgaagacaaatccaccgggcgggggaggggggcaactcgtgggaggccccaactcaccggaggggtgccctgggaggcgaacctggggtttacctcgaagagctcgcctcgaggtgcaggtgatgggggaatggggcgggggttgattaaaaaatgttcttcctttcttaaaaagaggagggggaagaacagactttaaattcttttgcaaacattc

SEQ ID NO: 25887 - DNA, 736 bp, Homo sapiens
ccgcctctgtgcattacagatgataaaacgaacccagaaaaaatgcaggggtcttgcctgacattctccagagagaatctggtcatctgactctggtcaactgacatccagcattttttttttgctagaccagctgaccagcatccgccggcagcacccccttccctctcccatcatgtgtgggtcatcctcctttccaccgcccacatggacccctccctctggtctcctgcatcctgcatggtgttggttatgtgaacaagttctttagtggtgatttctgagattttgggtgcacccatgattgggagcagtgtacactgtacctgtgtacactgtgtagtcttttatccctcacccccttcccaccctttcccccaaagtccccaaagtccattgtatctttttatgcctttggatcctcatagcttagctcccacttatgagtgagaacatacaatatttggttttccattcctgagttacttcacttagaatactaatctccagttccattctttttttttttttaacagcttataagttcctaggtccagtgtttcctgtctctaatcccagtttctcaggagggtgaggcgggagcaggcccctcctaccctcctgttcggtcattttagcagatgactttcaccctcatgccttttgcactgtgattgcaagaagggattatttttaactttatgaataggttatatgttcacatggacaccattga

SEQ ID NO: 25888 - DNA, 958 bp, Homo sapiens
tgccaagagctttcataattgttacttgaccctcacacaaaccttgtaatttgagataggtggtggtgtttctgttttacaggtaagaaacttaagatgcttagatattttgcccaaaatgatacaagcttgtcagctgcagagctgatacctgatcccaggactactttattctaagttgaatcttctttcttatacataggtactatgtagaacagactcaaatacaatttgatttgaatctgagtatagcagatattattggtacttccttaatttccgtgttccctggaaactttatagtaatactgattgtaaaaatgactataaaattactttttaaaagtgagataatttttctgtctacagggcactgtatctaaatattcacaccagtctttttctttttttaaccctcacaacactttgaagcagataatggctgatatactttattttactgacagtattgagatataaggagattaaatgagttaactgccttatatggcaataatttggcaatgatcttaaccttatctgtgagactatgttgagatttctgtagaagtgaaatttattgacttgtgaaactgaaacctttcagaggtagggctggcttaaagcattccttgatattgaggctcagatgatataatcagttctcttgctctccatttcttgtttccatttccactgggttgattccattctcagatagactttctccttattttggcaagagggctatagtacatctagctacatgtacttataatttcaaatttggtgaagagtgcctctcttctggcatttcctggaaaagacctgaaattcagtctgattggattggcttattggccttttcctatgacataaaacttctaatattgaaatctgaccagggcaaaaaacacttcgtggtgattgtatagtttaattttgtccttactcacgg

SEQ ID NO: 25889 - DNA, 511 bp, Homo sapiens
gccttatatggcaataatttggcaatgatcttaaccttatctgtgagactatgttgagatttctgtagaaaaactggttgttagaatttttcagttgtaagaaagaactaaacccaaactaagagtgaaatttattgacttgtgaaactgaaacctttcagaggtagggctggcttaaagcattccttgatattgaggctcagatgatataatcagttctcttgctctccatttcttgtttccatttccactgggttgattccattctcagatagactttctccttattttggcaagagggctatagtacatctagctacatgtacttataatttcaaatttggtgaagagtgcctctcttctggcatttcctggaaaagacctgaaattcagtctgattggattggcttattggccttttcctatgacataaaacttctaatattgaaatctgaccagggcaaaaaacacttcgtggtgattgtatagtttaattttgtccttactcacg

SEQ ID NO: 25890 - DNA, 265 bp, Homo sapiens
gatgagatttgggtggggacacagccaaaccataacagtgatggtatttgaaagcagggcttttggaagataattaggtttggaggaggtcatgagagtagggctcctgtaatgagaatagtgtacttataagaagagaaagagaccatagctctcactctgccatgtgaagacagtgagaaggtagtcaactgcatgccaggaagaggctctcaccaaacaccaaatccactgctcccttgatctcagacttcctaccctctag

SEQ ID NO: 25891 - DNA, 1346 bp, Homo sapiens
gcctccgcctcctcctcagtctccggctcttcccggccctgtctgtctctagcctgtggtgcagagcgggcggcggcggcggcggcgccggcggcgggatgaagcccgcactgcgcctgcgcgctcacggccccgcccggccccgcccctcgttcggggctggctgagggctccgaggccccaccgcagcgcgtctctccggtgaatggccgagggctgggtggggctgcggtgggcagcggtggcctttctccttcacacacatacacatgccttccaaatgtgcatggcttgggattcgcgtatttgtttaagagacgacggccacatccttttgttcggcgttcagcagactcctccgagttccgggatttctcccgactgaggcgtctccgtctcagtactctcggaggaaagcctcgaggggcagaactgccctctgttgtttcacggggctggaacctccctctccgcagcccaaagaatccggatggacccgcctttcccagaaccggagaccttggcctcctcaggctcccctctgactcaaacaaaagccggaattggaaagaccacccctttgatgtgttcgctgtaatcgacgtcctgctttcctcaaccgcccattcccttagccttcttagttgacaggaatattgagtatttgcaaggatgcgaagccagaaaaaaaaaaaagacttttaattctataaatcgtcccgctgcgtgcgcgcgtctgtccgtacagcgcggtgcccaccccgagagagggcctggattcaccaaggctgggggccttgagggctttttagggcacgtgaaaggaaaatggagttagagttgtgtcgggatagagagtgggatcattttgcactcaaggaattgagaagatcccgttggtaccgcagtttccaaggatttgtgtagtgcgttttttggatctggtttgtacaagcgaccagtataggagacgggatccctcccgcccttacaccccgctgcggggtcagccgacgtgggtgggattttgctggcggcgaggggagaaggtgacgtgcgtggcgccatgatcggaagtctggactgaattcttagctgcgaggtggaaaatgcgcgtgggagggcgatcttgaggggtgaagtctggccttcccatctcctaccaggcaggagggttatgctgaaggctggttttgctggtctttcattgtggctaagggcagttccacagatacagtcatagatagactccttaagtcatgctctgcttgcttcttctagtccgctgttacctctttatctgaatttgatgtaaataaatctccacattccttaaactggttctg

SEQ ID NO: 25892 - DNA, 279 bp, Homo sapiens
tggatggttggtgatgtattctggaagatggggatccaggagaaatgaaagagtgtggtttgaggagttcatctacagccaatgagacaggccagggggtcctgagacattcctccttggatatcatctgcgccagcttcctgattcacagatcgggaaactgagacccagagaaacacatagttagttagaggaggcttaaacccaggcttcctgacagcaaacaaccctgaatttaaccctaataaaagcatcactttgtttggtgaatttcccttc

SEQ ID NO: 25893 - DNA, 405 bp, Homo sapiens
cttctttccatcttacactgttgaattctgtactgcttctaaagcacctacaattaactctacaagaactgcacaattaacactcggcattgccttcttcctaattctaacatcgacattcatcagctttctccaatacagtcagatgattccttataatcatatctagccaaatgatgtaacttttgcttgatgtatgggaaaatagcttacattatgaatttagaagagctatagtagtatttgacaatatagatggaaaagtatttttaatttaaagaacatattgcacatctttcagaatttctgtaaaaacttttgaatgtccattttggctaggagcttagaaatgatcatgcttaagtttaattttgtgtttacattaaatcttttggattttcattc

SEQ ID NO: 25894 - DNA, 337 bp, Homo sapiens
ggagtcattttaataacataactaggctgatatatatgtacatttttcaatcatgtaacatttagattttactcattttaagtcattaacatcatccagcaaacaaaaattttccagaaatttttttcacaattacagttttagtctttaaaccaaaatgaaaaaatttctgccgggcatggtggctcacacctgtaatcccagcactttgggaggtcaaggtgggtggatcacctgaggtcaggagttcgaggccagcctggccaacgtggtgaaaccctgtctctaccaaaaatacaaaaattagcccagcgtgatggcccacctgtagtctcag

SEQ ID NO: 25895 - DNA, 1000 bp, Homo sapiens
ggccttccaaagtgctgggattacaggcgtgagtcaccgcgcccggccaaataaaataaaatgttaaagcaaattcaggactacccctcctccaagtcttctgttccctttgggcgcccaggtgagcgggggaggggctgggggagtaataacatcaaaagagcgccttttcctcccttattccgaggagacttccctgggcctgactcccggtcctgtccccagcgccccgcggcctctggagccccttcagtgaccaagatacagagatcaggacgcctttgcgccgccccaggtgcccgcccctagctggctctgcttgggccgcgagggaaggtgaggtcgggggcggagccggggcgtgacagccggggtgtgtgtccgccgggcttggtgcctccggtggccctgcagcaccgtcccacctctgccaccctccgatggggccgctacctgtgtgcctgccaatcatgctgctcctgctactgccgtcgctgctgctgctgctgcttctacctggccccgggtccggcgaggcctccaggatattacgtgtgcaccggcgtgggatcctggaactggcaggaactgtgggttgtgttggtccccgaacccccatcgcctatatgaaatatggttgcttttgtggcttgggaggccatggccagccccgcgatgccattgactggtgctgccatggccacgactgttgttacactcgagctgaggaggccggctgcagccccaagacagagcgctactcctggcagtgcgtcaatcagagcgtcctgtgcggaccggcagagaacaaatgccaagaactgttgtgcaagtgtgaccaggagattgctaactgcttagcccaaactgagtacaacttaaagtacctcttctacccccagttcctatgtgagccggactcgcccaagtgtgactgactaccttgacttgaaatgctcttttgcacaaggaaataaagcgtcctctcagtaatgaacaa

SEQ ID NO: 25896 - DNA, 170 bp, Homo sapiens
aaaatccttggcttaccactcaaatatgcaaatacaagggagcctccagggagccaggcttaacaaagcagaacctgggagccaaaagaactgagcacagaggtctgaccaccaaggctgctgaagccgcaacagcctaactctcccactgatcacaactaaaaactcta

SEQ ID NO: 25897 - DNA, 315 bp, Homo sapiens
cacactgagcctttgatcgcagctctccaccagacaccctcccatccaagcagccccagctgctcatttcaatctggtatgaattcctgctgagacaggaaccccctgcgggctgaaggggagggaaacttcagcagaaagaccttcagttggtctgagcagagtgggataggctctgcgccaggcctcccagttagaagtcaggagcctggaggagtctcagagcccagggagagaagcaggagcttgggccaccttaccctacctcctcaatggttgagtacttgctgtccacatttgccaagttgctacaga

SEQ ID NO: 25898 - DNA, 472 bp, Homo sapiens
tgcagtggagggcggtatccccagggtctgagcaagcctcaatcccactgatgagagtacaggccgaggccgggtgcaatggcttctgtctgtaatcccagcactttgagaggccattgtgggaggtttgcttgaggccagaagttggagatcagcctgggcaacatagcgagaccccatctctgcaaaagaataaaaatttaactggctgtggtggcatgcacctgtggttctagctacttaggaggctgaggtgggaggatcacttggaagcccaggagttcgaggctacagtgagctatgatcctgccactgcgctccagcttaggcaacagagtgagaccctgtctctattttaaaaaaagaaatcaaagaaatataaattggaaatgaaaaaataaactgtcactatttgcagtaacaagattgtgtatatatagacagagcaagacccagtctctcaaaaaaaaaa

SEQ ID NO: 25899 - DNA, 475 bp, Homo sapiens
caggaatctggcttgggttgctggatgcctttacttttaatgaagacatggaaggcaggaagaagaacaatggagaccaaggctggttaactctgatcaattgtttgatgatttcaatataaaagtattataataataacatattaaaatacttgagatatgagttcattacccttccacgtcaaaatacatccttgagtcaaaaaacatagccttgaatcaaaagaaattgattttctttctgttaaaagacagaaaatccttctctgagaagtggtattgcattatatttgaaataaccttgtacaatttataccaatcttgaatattattttaaaaattagaggtaggaaaagacattaaagatcctcttgctcttggccaggcgcagtggctcacgcctataatcccagcactttgggaggccgaggtgggtagatcacctgaggtcagatgttcaagaccagcctggcca

SEQ ID NO: 25900 - DNA, 277 bp, Homo sapiens
tattctccaatttcctaatgcgtcaaatggcagtattgactgctttgtgtgcctggctatttgggattaagtaccaataaataaattttaaaaaccacaaaacccagaaacatcatagcccttctctacatgagttcacagtttacgtctgggacagacacatgaacataagataaaatgataagtactactgtatgtgaaaacacttagacttatgaagtgcttctgtaagatacatttcttaaaatggttaaagtcagttgaagacctgttaaaa

SEQ ID NO: 25901 - DNA, 672 bp, Homo sapiens
gacaaaattaattcatatttagtctaatatattccaaaatccaagacttaatagggtaggaagcactgctgtgggccttaaaagttggttgctagattattattcctcttcctcgtcatcctgcccaatccctcatactaccctatttgtcctacgcagttgtcataatcatcacacagacacccacatgcctactatgtcatggtgtcaagtttaaattcttgaagtttgagaactttcatatacttccttggcatcttatgtttcctttaaaccttttattaatttcccaatctgtctgcaattctgcctaagacttttctgtcatccttaggaaggtgatgctgatttttttccccatactttggtccacctttctttaacccattactttctagcaattattttggcagttatttcattttcctaagacaaagattggaatgtgttgtcactgatgaaataatagaaatatatggttgagtcatgtacaaaataacttacaggccccaaccagtggccctcttcagggggtatttggaattatttaagtgacagacaacaaatttggactgaatcttaatatctagattctgtgggtaacaaaatctgtaaatagaaaataataaaatggttaggattagtccatatgagagtttgcgttcagaggtt

SEQ ID NO: 25902 - DNA, 410 bp, Homo sapiens
ttttttttttttgagatgaagtctcactcttttgcccaggcgagagtgcagtggggcaatctcggctcactgcaacctctgcctcttgggttcaagtgattctcgtgcctcagcctcccaagtagctgggactacaggcatgcatcactacacctggctaatttctgtactttttagtagagacatggaccatgttggccaaactggtctcagactcctgacctcaagtgatctgcccacctcggcctcccaaagtgctaggattataagcatgagccactgtgcccggcccaaatgaaggatcttttactaagccacgtggaagaggttcttggctaggcccaattagacttctaattgagacgaaagtctcaactggttaaaactgcaaaaatcaactatttaaaaga

SEQ ID NO: 25903 - DNA, 500 bp, Homo sapiens
gttttctcccatggtgttcatgtggagtaggcaggtttttttctcctgcggcgttaccccttttcccattcatttggctttttttctttgtctgtatccattgatgttttctggttgtagaccattgcacccaagccaaaagaaagcaaaagaaggcaaaaagtaagtataggaaagaccccaggaagcttactcccaggatattccacatatccgagagtgcctagattttatttataattagcaagaggaatagactggaatatacttggctccatcttgtgtggaatttgaagtgcccaaagcagcctttcaaagacagatttttaatctaagaaaccctgtctctactaacagtacaaaaattagccgggcatcgtggcaggcatccaagagaccaaggcaggagaatcacttgaactcaggaggaggaggttgcagtgagccaagggcatgtcactgcactccagcttgggcgacaagagcaaaactccatctca

SEQ ID NO: 25904 - DNA, 284 bp, Homo sapiens
tgactggagcagagagggtcagacttgcaacgcttttcagaatgaaatatccaacccaactcagtgattggattctgcggtataacttcacattgtcaagaatattcaaccagaaaaataaaatgcctctgacacactcttctgttcatggacttacctacagaagagaagaaaaaactctcttctcagcagttcttgcctatttctcagcaatctcctaatacaattgctgtatttgattttatgcattgtttgtgcctgcaaataacatacatcctgtttcc

SEQ ID NO: 25905 - DNA, 365 bp, Homo sapiens
cttgttttactatcacgttgctttttaaagccagcctgctttttccagttgggaggcctcggggagaaaagtctgacccaagtgagaaacacctgtaatatctaccagatgccagcagggtgtcccatggtgctgtctttgatccatgttcttaccctgtgtgctgagggttgttctagagtaggactacatctagtcacagtggccatgttccagagcctggcagcaagaaagagggatgcctagctccttggctttccagtgtgcagtgcacagccagctctctcagagaagccctggccctcttttgacccctactattgaggctggccccacaggaggacagctggtcacacagtggctgg

SEQ ID NO: 25906 - DNA, 412 bp, Homo sapiens
tgctatttcatcattctttttcttaaagtaaaattcaaagttaaaactttcttacattgggttgtttcacctaatccctgaaggcatttgagttttcaactcctgtcttaacctctaagcctgacttctcatctgtcaaatcttctcatctgtcaaatgcaaaaaaataacatttatctataattctgaaaaaaagccctgcagggtaaagcatgcatagagaacactgcctggcacatggaaagtgtttgaaaacggttaatataaggagctcaaaaaccatttacaaaatgaatgaatagaccaggcatagtggctcatgcctgtaatcccaacaccttgagacgccgaaagatcgcttagtccaggagtctgggaacagcctagccaacataacaagacccagtctgta

SEQ ID NO: 25907 - DNA, 351 bp, Homo sapiens
taagtcttgtatttcacctcctggaggtaaatattttttaacaatttgtcactgttcctccttttgttttcctttctgtgagcaatttcacccaaattggaaccatgctgtatacagtttggtagctggctttttatgtcttaccattatctctcatttgcattctcccacatctttaattatagcgtatcagttagggcccagcaggaaacagatggcccgtcaatttaggataatttgaggtggggttgataccagaagcctttataaagcgattggatagtaaaggcaaatgacaagagctagtgcaagctcctggggccagcatgggtgaggggcctcatccacagg

SEQ ID NO: 25908 - DNA, 387 bp, Homo sapiens
tgacagagtcttgctctgttgcccaggatggagtgcagtgctccgatctcggctcactgcaacctcagcttcctgggttcaagcgatctcctgccccagcctcttgagtagctgggaccacagacacgcaccaccacacccggccaattccaccttttatcttagtaagcagtaatatcaatgtccttctataaatatttttgctcttctataaatcacttttacaagtgttggtagtatattgctgtttataaaagaactgaaccgcctttaatgaaaacatatttacactaaaattaaaactctatcaaggatttgaaattgcttgtatcataaactattgttagtatttgctcctatttatattcccaagtggagagtaagctg

SEQ ID NO: 25909 - DNA, 334 bp, Homo sapiens
gcagatgctgaagaaaatttccaaaaaccataaaaaagacaaaataactttcaataaaatgtttactaaataaagtcaagaaatgtatcaaagtagaacagaaagtcaaagacatgtacagtataaaaggtaagaaaaatcaaaacaaatacagaagatccagtaattaccccatagtggtaataggaagggtaataggaataggtaataggaagaaagaacagaaaatgagaagattttatcaactaatgctggaaaattttccagaatgaaaagactttagcatctagaataaagtggcccaccaacagctcagcacaatatgtatgttaaa

SEQ ID NO: 25910 - DNA, 283 bp, Homo sapiens
ggtattttaaaatatttggtagtcacttaaaatgcataatgacagacaatagggtgtcataatatggtttattaatcttttttcattttccactagatgtggcaactacatagttggaagaaatgtggcggccgggggcagtggctcacgcctgtaatcctagcactttgggaggctgaggcaggagagtcgcttgaacctgcgagtcagaggttgcagtgagccaagatcgctccacttcactccagcctggtcaaaagagtgagactctgtctcaaaaaaa

SEQ ID NO: 25911 - DNA, 398 bp, Homo sapiens
ccaaaacctagcacatgtttgtgaatgcaggcacccgtatggggcgataggtataagtgctaattactaacttgcaccagtcttcacttcttgaatgtcgcctccttcccaagagaggatgggaaaacctcccagctgtattctgtttggaataattggatgtgagcataggaaataaatatgttttacatactccttttatgattcactataaaaggaggtgatcagtttttgttttcacttttttgagacagggtctcactttgtcacctaggctggagtgcagtggcatgatcatggctcactgcagcctcaaacttctgggctcaggcaatcctcctgccttatcctctcaagtagctaggactacaggcaagtacctccacacccagctaatt

SEQ ID NO: 25912 - DNA, 471 bp, Homo sapiens
gtgacagtcatatttgaattatgcctgtagcctgctatctggtcccccttttttaagtctttcttactctagttcattatatataccatttccagaataaacttcacagttaatgccttctctacatttgagaaccaatggtagcagtctgtattcattgcatttgctttgaccataccatacaagaattaacaaggttctgattatttcatttgtcttctatcttggccctactctggctaccccttttcagcctaatcagtttttaccaatcctccaatccttgcatctgattttcttccccctctctgccccttattattattatttttttttatttttatttttatttttatttatttatttttttttgaggcagggtctcactctgttatccaggctggaggttgtggtgagctgagatcgcaccattgtactccagtgtgggcaacacgagtgaaattcgtcaca

SEQ ID NO: 25913 - DNA, 494 bp, Homo sapiens
gtgcttacttgaggcagaatgatgatttgcacatacctgtgatagcctttttctttaatatctggtcccccttttttaagtctttcttactctagttcattatatataccatttccagaataaacttcacagttaatgccttctctacatttgagaaccaatggtagcagtctgtattcattgcatttgctttgaccataccatacaagaattaacaaggttctgattatttcatttgtcttctatcttggccctactctggctaccccttttcagcctaatcagtttttaccaatcctccaatccttgcatctgattttcttccccctctctgccccttattattattatttttttttatttttatttttatttttatttatttatttttttttgaggcagggtctcactctgttatccaggctggaggttgtggtgagctgagatcgcaccattgtactccagtgtgggcaacacgagtgaaattcgtcaca

SEQ ID NO: 25914 - DNA, 855 bp, Homo sapiens
aaagcttctgttttgtcaagaaagcaaaacagagttgaagtgatagctcgtaagatttaagcatgaaggtctaacaggactatgccataggagaggatcaaaaaaaagaaaaaatgataattttatcattaaacccacggtctcagcccaaattctctgctccagaaaagctaatccaaacatttcagaaactgtcattacctggcaggcaatttccaacttcattcctacaaaaatgtaaggagggcatgcacagcttcttacagcaccctgatctttgagagagaaatgccagctcttctctgcctcatgacttataccttcaggcagaggaaggaaaagcagtgtgaattatgtttacatatgcttaggaattgcatttgacaaggcataatgaatcagcgatgttttcttgtttggtttctgtctcaaaattgatctagctccaagtttagaagaccctacgacgtgactcagtaagtggcctcaccttcatccgattgctcagaattaaaacctagaagtcatccttgattttctcctctcaaatctgtctccattcatcagcacgtgcttttgactcgatgaaacgctccaaacacaactgcttcccaccgcctccactgctgcctcttgtccctgcagcatcatctctcacccacattggccacagcggcttgttgttggtgttcctgcttctacttttgacttgtttctattgtcttccatgcccactggaactgtaattattttttgcaaatgtaagttagataatgacattccactgtaaaaaaaaaaacaaaacagaaaacaaaatgaaagaacaaaataaaaatgtctagtgaccccctgtta

SEQ ID NO: 25915 - DNA, 1230 bp, Homo sapiens
gctctctgttcaagtcattccacacatttccctattttaggctattataatatagaaagaaaatgggaagcattagttggagctagaaaatgaactgtatattattgctatatttgctaataccaactatttcaataagtgttgtaccatatgtagcattaaatataaaatacataaaagaatgtacagaaaatagcttttattgagtaatattacatttcatttatactgtagcaatatatttgtaggtatactatgtaagggctttaaataaaagaggtccattaatacttccttataaaaattctagtctgtttcattactgcccagatgttttagagataaatatttatgcagaaggtatttttgaagtctccttttgtctgatagagtttaacagatatttaaatttagtgctcagaatccacaagtcacggtctaaacacacttagaatactacagcataaatctgttagcattattgccaaataagacagttgggatccaaacccaagtcttgagcaatgtttttctcaaaaagctgctatccaatgatataggaaaatacattgtgttttcctaaacacacttttctttttaaatgtgcttcattgtttgatttggtcctgcctaaatttcacaagctaggccaatgaaggctgaatcaaagacatttcatccaccaatatcatgtgtagatattatgtatagaaaataaaataaattatggctctaacttctgtgttgctcttccagacttctcatggctaacttttggtctgtattttgctccttagatgtgaatatttcttattagtctgcttcctgctacgcaatgactgcatttctatcatttctcagtttgttagtatatgtggatagtattctactgtataaatgattgcaaagtttatcaaaaacaaattattatatgtagcttttctacagtgctttgctaaaccatgtagtactagttaagtcttccttgaaaataaagatacactcttataggggacagttcctgttcactcccaggaaacttttttaaaagatgacactgaatgtttattgcactttagtgcagtgaagtggcaataaaacctaacatgaatcaaggttgtttatggcagatgcatgtgttgctttacagagtttagcaaaagctcttaattttatgtcatactgtattctactgaataataaagctaacattattcaataataaaatgg

SEQ ID NO: 25916 - DNA, 738 bp, Homo sapiens
tttaaataaaagaggtccattaatacttccttataaaaattctagtctgtttcattactgcccagatgttttagagataaatatttatgcagaaggtatttttgaagtctccttttgtctgatagagtttaacagatatttaaatttagtgctcagaatccacaagtcacggtctaaacacacttagaatactacagcataaatctgttagcattattgccaaataagacagttgggatccaaacccaagtcttgagcaatgtttttctcaaaaagctgctatccaatgatataggaaaatacattgtgttttcctaaacacacttttctttttaaatgtgcttcattgtttgatttggtcctgcctaaatttcacaagctaggccaatgaaggctgaatcaaagacatttcatccaccaatatcatgtgtagatattatgtatagaaaataaaataaattatggctctaacttctgtgttgctgtttatcttgttatttttcggcgttatactaatgtgtttattgagagcattttaccttccagacttctcatggctaacttttggtctgtattttgctccttagatgtgaatatttcttattagtctgcttcctgctacgcaatgactgcatttctatcatttctcagtttgttagtatatgtggatagtattctactgtataaatgattgcaaagtttatcaaaaacaaattattatatgtagcttttctacag

SEQ ID NO: 25917 - DNA, 4660 bp, Homo sapiens
gcaaaggtgactggcttcagtgaaggtgtggtggatagtgtcaaaggtgggttttccagcttctcccaggccacccattcagcagcaggcgctgtagtctcaaagcccagagagattgcctcactcattcggaacaaatttggcagtgcagacaacatccccaacctgaaggactctttagaggaagggcaagtggatgatgcggggaaggctttgggagtgatttcaaactttcagtctagcccaaaatatggtagtgaagaagattgttctagtgccacttcaggctcagtgggagccaacagcaccacagggggcatcgctgtaggagcatccagctccaaaacaaacaccctggacatgcagagctcaggatttgatgcactactacatgagatccaggagatccgggaaacccaggccagactagaggaatcctttgagactctcaaggaacattatcagagggactattccttaataatgcagaccttacaggaggagcgatatagatgtgaacgattggaagaacagctaaatgacctaacagagctccaccagaatgaaatcttgaacttgaagcaggaactggcaagcatggaagaaaaaatcgcgtatcagtcctatgaacgggcccgggacatccaggaggccctggaggcatgccagacgcgcatctccaagatggagctgcagcagcagcagcagcaggtggtgcagctagaagggctggagaatgccactgcccggaaccttctgggcaaactcatcaacatcctcctggctgtcatggcagtccttttggtctttgtctccactgtagccaactgtgtggtccccctcatgaagactcgcaacaggacgttcagcactttattccttgtggtttttattgcctttctctggaagcactgggacgccctcttcagctatgtggaacggttcttttcatcccctagatgatgctggcacagaaggcattgttccctaccctctggcgagtgcatgcagcagagagttagacagcaacttacctactctgaagttttctacaacaaaaaaagagttgagtgaatctgtttacatttagaataatgtttttttcttcaagagacgcaattgcaatagtattttttagattttatccaagaagttttttgggcgaaaatcttggatcatttttatgtagcatgattttccttgggatgcaaatcttaaaacagtcctttaatatgaaccaacaatctggagcacaccgaagggcaatctaaattgtggcttgaaggactgcactaaaacccactaaaaagatgcgaaaacctgatgagggcaaaccagttaaacctaacaccctgccttgtctgggctcatcacctctccctatcccagactaactttactgtgaaatcctaccacattccatgtctgaatttttggattcggggtggattttcgttgtccgtggaagaacacatggatctctctggctttctcacccaagttggccacttacgctaatcctggaagtatgatcacttttgaacctgccccttaaccttgacgaggatacaaaagtgaaagcatcatcccccaaaggatcactgcacagtcctactacagtatttttaagtagccctctaaatacttaattttaagcaaaatcccttggccgcacttttaaggtttttttatatgtgtatagttaccaacctaaaaataaaaaatccgaacagcatacttgaagaatgtaatactcaaactctcagtgcttccttatggtttctaataggattttttattattgttattattattattgggtttttttggacagggttgggagggtcttttatttttcctttgaaataaagaagtgatgtttttaaatgaagaaatgtgtggatatttaagtgtgctgctccctcttgtcttgaaacagtttgagtaagaaagtcttgctgtaaatgctgccctctgccgcctttgttttgagatgcagtttaaactccctctggctgctgctgctgctttttggtgtcccgacatacctacgcccccgttttatgggtttggcttagttgaagaggaaagggttgtgcaaggagagcaggaggctgtttccaaaaaccagtgtagtaggatagggatttttttttttttttttgccccaagaaaacgttcacccagtgatcttgggctggggttgtctttaggaaaagttgagactataagagtcataaataagtccttgtgtttccttaatttattttgttaacacccctaattacaaccaaagtgatgatgtggagtcttctgtcttcattttggccccagcattcttaatttcaaagctttattctgtctgcctaagagaatcaaccaaaggtgattctcctaaagagcagtgaaggaaatgtcaggttagcaggacccaagttttgggtgtgaaatgttgccagcttcctataatgtaaacggacttgttaacctaacctaattatgctcagtggacttctatagatggttttgaaaaatgaactgagctgccttcccgcatcgcataaccagttccatcatcctggtggaacttgaacatttagagtttatctagagagcttggttaatctttccatattatttgtagtattggtcacaaatgctgttccctcttagcctcattctgtgcaaccaagtgcatataagatgccctgaaaagagtaacaaagtatgctttgcctgtttccacttaccaggaaattccttcagaactagattagcattgccctgcctgtctgaaaggacagtttacctaatggtgccagcctccttttgctttggcaagctggatttctcagagccagcatgttgtttccataactactttgatattttaactcaggtactccagtcttcaccccaacctcagctgattgtagtacacctgctagctctgttgccccctcaaaactgcacccagagcagggccacaagggtgctttttttctttaaaaaaaaaaaaattagaaccaattcatgttcatgccaaaaacaaattgtccccaagcctatatgtattaaaatgttaactttgcctaaaaatattgcagtgactttttaggcaggagtgccaaaggacactatgaactttttgaactgacagtttctcctaactttctgctttagcgtaattgctcagagtagagagcccccacaaagttatttaaaagatgccctagcagcaatccaccagtttttctaagctagaacctttgagtcccccaaactgcctgaagacttaagttttgtgggcactggaagtcactttgatagatggattgaaactgttcctatttgccctgggacggtttctatctatcaaaggaaggttttcacctgtagaaagccccctgcctccagccaaatagtcccatgctgactttctatcttcctttctcaaactgtcttaggaaggaccttcagtgcagatcaggtgcagtaatggctttcttgtcccttaattattcaccagacccagaagttgtacgcatttaatgctgtttgtaaccatgcatctgttttcattctttgctgtaccttttgctgcccatcctgttacttttgagtttctttcattgtggttgttcttgggttcttttgtcttgtcagagctcttctataacctcgctctaatggcttaacagttgttctgggtggaaacgtcccctcatttgaatgctcctctaaaaaaaaaaagaaaagaaaactgtattcattccctttaaaatgaaacattcctggtttatttgtccatgcctctagcctgggtgagtgaagctggctgtgttggcctgggtgattgttcaggttgtagaatgcgcattttacattgtttatgataattgaagggtacttctgtctgctccaatttccattccttggtatactcagtatgtcctagtaaggaaggctttccactctactggctccttaagaagcaaaagtaggttaaattttatacttcactgactagggtcttctctctcccctgttctgaatggagtaaaagtctgatgccaagacaaatattgggagcgagccttcctcactagccatgtccaaataatgagcgtattttcatgtggtcttcactgcatttggttttgtttctgatttcatgttcctttgaggtacagtcagatgaaaatgctgagttctgagagagttccaatgaggagctgcctttcagctttggaaaatatgcatctaaaacaaaaccaaacattattgtaatctgacacaggcaaaattatggttcccacaccccaaccccaaatgaaacctgggattttgaatgtggctctaagagttaacattgctgtctgtatgtcgtgtatgctaggtgatatcctcagtagggattgactactagactgtgtgttttatcaaagtgtgtaagaataaaaactcacttgcacgaattgaaacgtaaagaaatgacacttgtgaacgtgtgaacgttaacactgtagttgatagatcttaagctgctaattgttgagagagatttaaatttatgttctgtctggtcgctgcagattctcagcagcacttttactgtatatagaaattgaaataaagacctcagctattaaaaaaaaaa

SEQ ID NO: 25918 - DNA, 4219 bp, Homo sapiens
agaaggcagtatagagactcctatcaaggataaagaagaactaaatagagtttagtaacatcgtaaaaaggatgtgaacgattggaagaacagctaaatgacctaacagagctccaccagaatgaaatcttgaacttgaagcaggaactggcaagcatggaagaaaaaatcgcgtatcagtcctatgaacgggcccgggacatccaggaggccctggaggcatgccagacgcgcatctccaagatggagctgcagcagcagcagcagcaggtggtgcagctagaagggctggagaatgccactgcccggaaccttctgggcaaactcatcaacatcctcctggctgtcatggcagtccttttggtctttgtctccactgtagccaactgtgtggtccccctcatgaagactcgcaacaggacgttcagcactttattccttgtggtttttattgcctttctctggaagcactgggacgccctcttcagctatgtggaacggttcttttcatcccctagatgatgctggcacagaaggcattgttccctaccctctggcgagtgcatgcagcagagagttagacagcaacttacctactctgaagttttctacaacaaaaaaagagttgagtgaatctgtttacatttagaataatgtttttttcttcaagagacgcaattgcaatagtattttttagattttatccaagaagttttttgggcgaaaatcttggatcatttttatgtagcatgattttccttgggatgcaaatcttaaaacagtcctttaatatgaaccaacaatctggagcacaccgaagggcaatctaaattgtggcttgaaggactgcactaaaacccactaaaaagatgcgaaaacctgatgagggcaaaccagttaaacctaacaccctgccttgtctgggctcatcacctctccctatcccagactaactttactgtgaaatcctaccacattccatgtctgaatttttggattcggggtggattttcgttgtccgtggaagaacacatggatctctctggctttctcacccaagttggccacttacgctaatcctggaagtatgatcacttttgaacctgccccttaaccttgacgaggatacaaaagtgaaagcatcatcccccaaaggatcactgcacagtcctactacagtatttttaagtagccctctaaatacttaattttaagcaaaatcccttggccgcacttttaaggtttttttatatgtgtatagttaccaacctaaaaataaaaaatccgaacagcatacttgaagaatgtaatactcaaactctcagtgcttccttatggtttctaataggattttttattattgttattattattattgggtttttttggacagggttgggagggtcttttatttttcctttgaaataaagaagtgatgtttttaaatgaagaaatgtgtggatatttaagtgtgctgctccctcttgtcttgaaacagtttgagtaagaaagtcttgctgtaaatgctgccctctgccgcctttgttttgagatgcagtttaaactccctctggctgctgctgctgctttttggtgtcccgacatacctacgcccccgttttatgggtttggcttagttgaagaggaaagggttgtgcaaggagagcaggaggctgtttccaaaaaccagtgtagtaggatagggatttttttttttttttttgccccaagaaaacgttcacccagtgatcttgggctggggttgtctttaggaaaagttgagactataagagtcataaataagtccttgtgtttccttaatttattttgttaacacccctaattacaaccaaagtgatgatgtggagtcttctgtcttcattttggccccagcattcttaatttcaaagctttattctgtctgcctaagagaatcaaccaaaggtgattctcctaaagagcagtgaaggaaatgtcaggttagcaggacccaagttttgggtgtgaaatgttgccagcttcctataatgtaaacggacttgttaacctaacctaattatgctcagtggacttctatagatggttttgaaaaatgaactgagctgccttcccgcatcgcataaccagttccatcatcctggtggaacttgaacatttagagtttatctagagagcttggttaatctttccatattatttgtagtattggtcacaaatgctgttccctcttagcctcattctgtgcaaccaagtgcatataagatgccctgaaaagagtaacaaagtatgctttgcctgtttccacttaccaggaaattccttcagaactagattagcattgccctgcctgtctgaaaggacagtttacctaatggtgccagcctccttttgctttggcaagctggatttctcagagccagcatgttgtttccataactactttgatattttaactcaggtactccagtcttcaccccaacctcagctgattgtagtacacctgctagctctgttgccccctcaaaactgcacccagagcagggccacaagggtgctttttttctttaaaaaaaaaaaaattagaaccaattcatgttcatgccaaaaacaaattgtccccaagcctatatgtattaaaatgttaactttgcctaaaaatattgcagtgactttttaggcaggagtgccaaaggacactatgaactttttgaactgacagtttctcctaactttctgctttagcgtaattgctcagagtagagagcccccacaaagttatttaaaagatgccctagcagcaatccaccagtttttctaagctagaacctttgagtcccccaaactgcctgaagacttaagttttgtgggcactggaagtcactttgatagatggattgaaactgttcctatttgccctgggacggtttctatctatcaaaggaaggttttcacctgtagaaagccccctgcctccagccaaatagtcccatgctgactttctatcttcctttctcaaactgtcttaggaaggaccttcagtgcagatcaggtgcagtaatggctttcttgtcccttaattattcaccagacccagaagttgtacgcatttaatgctgtttgtaaccatgcatctgttttcattctttgctgtaccttttgctgcccatcctgttacttttgagtttctttcattgtggttgttcttgggttcttttgtcttgtcagagctcttctataacctcgctctaatggcttaacagttgttctgggtggaaacgtcccctcatttgaatgctcctctaaaaaaaaaaagaaaagaaaactgtattcattccctttaaaatgaaacattcctggtttatttgtccatgcctctagcctgggtgagtgaagctggctgtgttggcctgggtgattgttcaggttgtagaatgcgcattttacattgtttatgataattgaagggtacttctgtctgctccaatttccattccttggtatactcagtatgtcctagtaaggaaggctttccactctactggctccttaagaagcaaaagtaggttaaattttatacttcactgactagggtcttctctctcccctgttctgaatggagtaaaagtctgatgccaagacaaatattgggagcgagccttcctcactagccatgtccaaataatgagcgtattttcatgtggtcttcactgcatttggttttgtttctgatttcatgttcctttgaggtacagtcagatgaaaatgctgagttctgagagagttccaatgaggagctgcctttcagctttggaaaatatgcatctaaaacaaaaccaaacattattgtaatctgacacaggcaaaattatggttcccacaccccaaccccaaatgaaacctgggattttgaatgtggctctaagagttaacattgctgtctgtatgtcgtgtatgctaggtgatatcctcagtagggattgactactagactgtgtgttttatcaaagtgtgtaagaataaaaactcacttgcacgaattgaaacgtaaagaaatgacacttgtgaacgtgtgaacgttaacactgtagttgatagatcttaagctgctaattgttgagagagatttaaatttatgttctgtctggtcgctgcagattctcagcagcacttttactgtatatagaaattgaaataaagacctcagctattaaaaaaaaaa

SEQ ID NO: 25919 - DNA, 3738 bp, Homo sapiens
atgaaggcatgttgtagacattgtgatgcagcacagatgaagttaacagtgaagacatggatgcttactgcaggaaagaaaacacttcagaaatctgcagtcacaatggagagtgcgtctgcggaagtatgtagtcgactacatacttctgaatctgtttacatttagaataatgtttttttcttcaagagacgcaattgcaatagtattttttagattttatccaagaagttttttgggcgaaaatcttggatcatttttatgtagcatgattttccttgggatgcaaatcttaaaacagtcctttaatatgaaccaacaatctggagcacaccgaagggcaatctaaattgtggcttgaaggactgcactaaaacccactaaaaagatgcgaaaacctgatgagggcaaaccagttaaacctaacaccctgccttgtctgggctcatcacctctccctatcccagactaactttactgtgaaatcctaccacattccatgtctgaatttttggattcggggtggattttcgttgtccgtggaagaacacatggatctctctggctttctcacccaagttggccacttacgctaatcctggaagtatgatcacttttgaacctgccccttaaccttgacgaggatacaaaagtgaaagcatcatcccccaaaggatcactgcacagtcctactacagtatttttaagtagccctctaaatacttaattttaagcaaaatcccttggccgcacttttaaggtttttttatatgtgtatagttaccaacctaaaaataaaaaatccgaacagcatacttgaagaatgtaatactcaaactctcagtgcttccttatggtttctaataggattttttattattgttattattattattgggtttttttggacagggttgggagggtcttttatttttcctttgaaataaagaagtgatgtttttaaatgaagaaatgtgtggatatttaagtgtgctgctccctcttgtcttgaaacagtttgagtaagaaagtcttgctgtaaatgctgccctctgccgcctttgttttgagatgcagtttaaactccctctggctgctgctgctgctttttggtgtcccgacatacctacgcccccgttttatgggtttggcttagttgaagaggaaagggttgtgcaaggagagcaggaggctgtttccaaaaaccagtgtagtaggatagggatttttttttttttttttgccccaagaaaacgttcacccagtgatcttgggctggggttgtctttaggaaaagttgagactataagagtcataaataagtccttgtgtttccttaatttattttgttaacacccctaattacaaccaaagtgatgatgtggagtcttctgtcttcattttggccccagcattcttaatttcaaagctttattctgtctgcctaagagaatcaaccaaaggtgattctcctaaagagcagtgaaggaaatgtcaggttagcaggacccaagttttgggtgtgaaatgttgccagcttcctataatgtaaacggacttgttaacctaacctaattatgctcagtggacttctatagatggttttgaaaaatgaactgagctgccttcccgcatcgcataaccagttccatcatcctggtggaacttgaacatttagagtttatctagagagcttggttaatctttccatattatttgtagtattggtcacaaatgctgttccctcttagcctcattctgtgcaaccaagtgcatataagatgccctgaaaagagtaacaaagtatgctttgcctgtttccacttaccaggaaattccttcagaactagattagcattgccctgcctgtctgaaaggacagtttacctaatggtgccagcctccttttgctttggcaagctggatttctcagagccagcatgttgtttccataactactttgatattttaactcaggtactccagtcttcaccccaacctcagctgattgtagtacacctgctagctctgttgccccctcaaaactgcacccagagcagggccacaagggtgctttttttctttaaaaaaaaaaaaattagaaccaattcatgttcatgccaaaaacaaattgtccccaagcctatatgtattaaaatgttaactttgcctaaaaatattgcagtgactttttaggcaggagtgccaaaggacactatgaactttttgaactgacagtttctcctaactttctgctttagcgtaattgctcagagtagagagcccccacaaagttatttaaaagatgccctagcagcaatccaccagtttttctaagctagaacctttgagtcccccaaactgcctgaagacttaagttttgtgggcactggaagtcactttgatagatggattgaaactgttcctatttgccctgggacggtttctatctatcaaaggaaggttttcacctgtagaaagccccctgcctccagccaaatagtcccatgctgactttctatcttcctttctcaaactgtcttaggaaggaccttcagtgcagatcaggtgcagtaatggctttcttgtcccttaattattcaccagacccagaagttgtacgcatttaatgctgtttgtaaccatgcatctgttttcattctttgctgtaccttttgctgcccatcctgttacttttgagtttctttcattgtggttgttcttgggttcttttgtcttgtcagagctcttctataacctcgctctaatggcttaacagttgttctgggtggaaacgtcccctcatttgaatgctcctctaaaaaaaaaaagaaaagaaaactgtattcattccctttaaaatgaaacattcctggtttatttgtccatgcctctagcctgggtgagtgaagctggctgtgttggcctgggtgattgttcaggttgtagaatgcgcattttacattgtttatgataattgaagggtacttctgtctgctccaatttccattccttggtatactcagtatgtcctagtaaggaaggctttccactctactggctccttaagaagcaaaagtaggttaaattttatacttcactgactagggtcttctctctcccctgttctgaatggagtaaaagtctgatgccaagacaaatattgggagcgagccttcctcactagccatgtccaaataatgagcgtattttcatgtggtcttcactgcatttggttttgtttctgatttcatgttcctttgaggtacagtcagatgaaaatgctgagttctgagagagttccaatgaggagctgcctttcagctttggaaaatatgcatctaaaacaaaaccaaacattattgtaatctgacacaggcaaaattatggttcccacaccccaaccccaaatgaaacctgggattttgaatgtggctctaagagttaacattgctgtctgtatgtcgtgtatgctaggtgatatcctcagtagggattgactactagactgtgtgttttatcaaagtgtgtaagaataaaaactcacttgcacgaattgaaacgtaaagaaatgacacttgtgaacgtgtgaacgttaacactgtagttgatagatcttaagctgctaattgttgagagagatttaaatttatgttctgtctggtcgctgcagattctcagcagcacttttactgtatatagaaattgaaataaagacctcagctattaaaaaaaaaa

SEQ ID NO: 25920 - DNA, 1895 bp, Homo sapiens
gcaaaggtgactggcttcagtgaaggtgtggtggatagtgtcaaaggtgggttttccagcttctcccaggccacccattcagcagcaggcgctgtagtctcaaagcccagagagattgcctcactcattcggaacaaatttggcagtgcagacaacatccccaacctgaaggactctttagaggaagggcaagtggatgatgcggggaaggctttgggagtgatttcaaactttcagtctagcccaaaatatggtagtgaagaagattgttctagtgccacttcaggctcagtgggagccaacagcaccacagggggcatcgctgtaggagcatccagctccaaaacaaacaccctggacatgcagagctcaggatttgatgcactactacatgagatccaggagatccgggaaacccaggccagactagaggaatcctttgagactctcaaggaacattatcagagggactattccttaataatgcagaccttacaggaggagcgatatagatgtgaacgattggaagaacagctaaatgacctaacagagctccaccagaatgaaatcttgaacttgaagcaggaactggcaagcatggaagaaaaaatcgcgtatcagtcctatgaacgggcccgggacatccaggaggccctggaggcatgccagacgcgcatctccaagatggagctgcagcagcagcagcagcaggtggtgcagctagaagggctggagaatgccactgcccggaaccttctgggcaaactcatcaacatcctcctggctgtcatggcagtccttttggtctttgtctccactgtagccaactgtgtggtccccctcatgaagactcgcaacaggacgttcagcactttattccttgtggtttttattgcctttctctggaagcactgggacgccctcttcagctatgtggaacggttcttttcatcccctagatgatgctggcacagaaggcattgttccctaccctctggcgagtgcatgcagcagagagttagacagcaacttacctactctgaagttttctacaacaaaaaaagagttgagtgaatctgtttacatttagaataatgtttttttcttcaagagacgcaattgcaatagtattttttagattttatccaagaagttttttgggcgaaaatcttggatcatttttatgtagcatgattttccttgggatgcaaatcttaaaacagtcctttaatatgaaccaacaatctggagcacaccgaagggcaatctaaattgtggcttgaaggactgcactaaaacccactaaaaagatgcgaaaacctgatgagggcaaaccagttaaacctaacaccctgccttgtctgggctcatcacctctccctatcccagactaactttactgtgaaatcctaccacattccatgtctgaatttttggattcggggtggattttcgttgtccgtggaagaacacatggatctctctggctttctcacccaagttggccacttacgctaatcctggaagtatgatcacttttgaacctgccccttaaccttgacgaggatacaaaagtgaaagcatcatcccccaaaggatcactgcacagtcctactacagtatttttaagtagccctctaaatacttaattttaagcaaaatcccttggccgcacttttaaggtttttttatatgtgtatagttaccaacctaaaaataaaaaatccgaacagcatacttgaagaatgtaatactcaaactctcagtgcttccttatggtttctaataggattttttattattgttattattattattgggtttttttggacagggttgggagggtcttttatttttcctttgaaataaagaagtgatgtttttaaatgaagaaa

SEQ ID NO: 25921 - DNA, 2234 bp, Homo sapiens
gcaaaggtgactggcttcagtgaaggtgtggtggatagtgtcaaaggtgggttttccagcttctcccaggccacccattcagcagcaggcgctgtagtctcaaagcccagagagattgcctcactcattcggaacaaatttggcagtgcagacaacatccccaacctgaaggactctttagaggaagggcaagtggatgatgcggggaaggctttgggagtgatttcaaactttcagtctagcccaaaatatggtagtgaagaagattgttctagtgccacttcaggctcagtgggagccaacagcaccacagggggcatcgctgtaggagcatccagctccaaaacaaacaccctggacatgcagagctcaggatttgatgcactactacatgagatccaggagatccgggaaacccaggccagactagaggaatcctttgagactctcaaggaacattatcagagggactattccttaataatgcagaccttacaggaggagcgatatagatgtgaacgattggaagaacagctaaatgacctaacagagctccaccagaatgaaatcttgaacttgaagcaggaactggcaagcatggaagaaaaaatcgcgtatcagtcctatgaacgggcccgggacatccaggaggccctggaggcatgccagacgcgcatctccaagatggagctgcagcagcagcagcagcaggtggtgcagctagaagggctggagaatgccactgcccggaaccttctgggcaaactcatcaacatcctcctggctgtcatggcagtccttttggtctttgtctccactgtagccaactgtgtggtccccctcatgaagactcgcaacaggacgttcagcactttattccttgtggtttttattgcctttctctggaagcactgggacgccctcttcagctatgtggaacggttcttttcatcccctagatgatgctggcacagaaggcattgttccctaccctctggcgagtgcatgcagcagagagttagacagcaacttacctactctgaagttttctacaacaaaaaaagagttgagtgaatctgtttacatttagaataatgtttttttcttcaagagacgcaattgcaatagtattttttagattttatccaagaagttttttgggcgaaaatcttggatcatttttatgtagcatgattttccttgggatgcaaatcttaaaacagtcctttaatatgaaccaacaatctggagcacaccgaagggcaatctaaattgtggcttgaaggactgcactaaaacccactaaaaagatgcgaaaacctgatgagggcaaaccagttaaacctaacaccctgccttgtctgggctcatcacctctccctatcccagactaactttactgtgaaatcctaccacattccatgtctgaatttttggattcggggtggattttcgttgtccgtggaagaacacatggatctctctggctttctcacccaagttggccacttacgctaatcctggaagtatgatcacttttgaacctgccccttaaccttgacgaggatacaaaagtgaaagcatcatcccccaaaggatcactgcacagtcctactacagtatttttaagtagccctctaaatacttaattttaagcaaaatcccttggccgcacttttaaggtttttttatatgtgtatagttaccaacctaaaaataaaaaatccgaacagcatacttgaagaatgtaatactcaaactctcagtgcttccttatggtttctaataggattttttattattgttattattattattgggtttttttggacagggttgggagggtcttttatttttcctttgaaataaagaagtgatgtttttaaatgaagaaaaacaaaaaaaaaaaaaaacaaaaaagcaacaaaaaaaaaaggggggggcgcgccaaaaaattccccacgggggggccccagatctcgcgcgagacccacgggtttctgtggcacacagcgggcgcccaatatggggacggaccgaataaaacagaccagcagcacagggagcgccgctgttataaacaaacgccgcggacggggcggaaaccacctgcggcacgcggggacacaccatggggagagagagacaccccaactcccgcggggggcggcgcccaagtggggcgcacaacacccccacacggaattataacaccgcccagggggaagaacacc

SEQ ID NO: 25922 - DNA, 1193 bp, Homo sapiens
  misc_feature (23)..(23): n is a, c, g, or t
acctctgaatccattggcgcctnctactactatgctgcgagaagacgacagattggcaccagacccagaagttgtacgcatttaatgctgtttgtaaccatgcatctgttttcattctttgctgtaccttttgctgcccatcctgttacttttgagtttctttcattgtggttgttcttgggttcttttgtcttgtcagagctcttctataacctcgctctaatggcttaacagttgttctgggtggaaacgtcccctcatttgaatgctcctctaaaaaaaaaaagaaaagaaaactgtattcattccctttaaaatgaaacattcctggtttatttgtccatgcctctagcctgggtgagtgaagctggctgtgttggcctgggtgattgttcaggttgtagaatgcgcattttacattgtttatgataattgaagggtacttctgtctgctccaatttccattccttggtatactcagtatgtcctagtaaggaaggctttccactctactggctccttaagaagcaaaagtaggttaaattttatacttcactgactagggtcttctctctcccctgttctgaatggagtaaaagtctgatgccaagacaaatattgggagcgagccttcctcactagccatgtccaaataatgagcgtattttcatgtggtcttcactgcatttggttttgtttctgatttcatgttcctttgaggtacagtcagatgaaaatgctgagttctgagagagttccaatgaggagctgcctttcagctttggaaaatatgcatctaaaacaaaaccaaacattattgtaatctgacacaggcaaaattatggttcccacaccccaaccccaaatgaaacctgggattttgaatgtggctctaagagttaacattgctgtctgtatgtcgtgtatgctaggtgatatcctcagtagggattgactactagactgtgtgttttatcaaagtgtgtaagaataaaaactcacttgcacgaattgaaacgtaaagaaatgacacttgtgaacgtgtgaacgttaacactgtagttgatagatcttaagctgctaattgttgagagagatttaaatttatgttctgtctggtcgctgcagattctcagcagcacttttactgtatatagaaattgaaataaagacctcagctattaaaaaaaaaa

SEQ ID NO: 25923 - DNA, 3813 bp, Homo sapiens
gcaaaggtgactggcttcagtgaaggtgtggtggatagtgtcaaaggtgggttttccagcttctcccaggccacccattcagcagcaggcgctgtagtctcaaagcccagagagattgcctcactcattcggaacaaatttggcagtgcagacaacatccccaacctgaaggactctttagaggaagggcaagtggatgatgcggggaaggctttgggagtgatttcaaactttcagtctagcccaaaatatggtagtgaagaagattgttctagtgccacttcaggctcagtgggagccaacagcaccacagggggcatcgctgtaggagcatccagctccaaaacaaacaccctggacatgcagagctcaggatttgatgcactactacatgagatccaggagatccgggaaacccaggccagactagaggaatcctttgagactctcaaggaacattatcagagggactattccttaataatgcagaccttacaggaggagcgatatagatgtgaacgattggaagaacagctaaatgacctaacagagctccaccagaatgaaatcttgaacttgaagcaggaactggcaagcatggaagaaaaaatcgcgtatcagtcctatgaacgggcccgggacatccaggaggccctggaggcatgccagacgcgcatctccaagatggagctgcagcagcagcagcagcaggtggtgcagctagaagggctggagaatgccactgcccggaaccttctgggcaaactcatcaacatcctcctggctgtcatggcagtccttttggtctttgtctccactgtagccaactgtgtggtccccctcatgaagactcgcaacaggacgttcagcactttattccttgtggtttttattgcctttctctggaagcactgggacgccctcttcagctatgtggaacggttcttttcatcccctagatgatgctggcacagaaggcattgttccctaccctctggcgagtgcatgcagcagagagttagacagcaacttacctactctgaagttttctacaacaaaaaaagagttgagtgaatctgtttacatttagaataatgtttttttcttcaagagacgcaattgcaatagtattttttagattttatccaagaagttttttgggcgaaaatcttggatcatttttatgtagcatgattttccttgggatgcaaatcttaaaacagtcctttaatatgaaccaacaatctggagcacaccgaagggcaatctaaattgtggcttgaaggactgcactaaaacccactaaaaagatgcgaaaacctgatgagggcaaaccagttaaacctaacaccctgccttgtctgggctcatcacctctccctatcccagactaactttactgtgaaatcctaccacattccatgtctgaatttttggattcggggtggattttcgttgtccgtggaagaacacatggatctctctggctttctcacccaagttggccacttacgctaatcctggaagtatgatcacttttgaacctgccccttaaccttgacgaggatacaaaagtgaaagcatcatcccccaaaggatcactgcacagtcctactacagtatttttaagtagccctctaaatacttaattttaagcaaaatcccttggccgcacttttaaggtttttttatatgtgtatagttaccaacctaaaaataaaaaatccgaacagcatacttgaagaatgtaatactcaaactctcagtgcttccttatggtttctaataggattttttattattgttattattattattgggtttttttggacagggttgggagggtcttttatttttcctttgaaataaagaagtgatgtttttaaatgaagaaatgtgtggatatttaagtgtgctgctccctcttgtcttgaaacagtttgagtaagaaagtcttgctgtaaatgctgccctctgccgcctttgttttgagatgcagtttaaactccctctggctgctgctgctgctttttggtgtcccgacatacctacgcccccgttttatgggtttggcttagttgaagaggaaagggttgtgcaaggagagcaggaggctgtttccaaaaaccagtgtagtaggatagggatttttttttttttttttgccccaagaaaacgttcacccagtgatcttgggctggggttgtctttaggaaaagttgagactataagagtcataaataagtccttgtgtttccttaatttattttgttaacacccctaattacaaccaaagtgatgatgtggagtcttctgtcttcattttggccccagcattcttaatttcaaagctttattctgtctgcctaagagaatcaaccaaaggtgattctcctaaagagcagtgaaggaaatgtcaggttagcaggacccaagttttgggtgtgaaatgttgccagcttcctataatgtaaacggacttgttaacctaacctaattatgctcagtggacttctatagatggttttgaaaaatgaactgagctgccttcccgcatcgcataaccagttccatcatcctggtggaacttgaacatttagagtttatctagagagcttggttaatctttccatattatttgtagtattggtcacaaatgctgttccctcttagcctcattctgtgcaaccaagtgcatataagatgccctgaaaagagtaacaaagtatgctttgcctgtttccacttaccaggaaattccttcagaactagattagcattgccctgcctgtctgaaaggacagtttacctaatggtgccagcctccttttgctttggcaagctggatttctcagagccagcatgttgtttccataactactttgatattttaactcaggtactccagtcttcaccccaacctcagctgattgtagtacacctgctagctctgttgccccctcaaaactgcacccagagcagggccacaagggtgctttttttctttaaaaaaaaaaaaattagaaccaattcatgttcatgccaaaaacaaattgtccccaagcctatatgtattaaaatgttaactttgcctaaaaatattgcagtgactttttaggcaggagtgccaaaggacactatgaactttttgaactgacagtttctcctaactttctgctttagcgtaattgctcagagtagagagcccccacaaagttatttaaaagatgccctagcagcaatccaccagtttttctaagctagaacctttgagtcccccaaactgcctgaagacttaagttttgtgggcactggaagtcactttgatagatggattgaaactgttcctatttgccctgggacggtttctatctatcaaaggaaggttttcacctgtagaaagccccctgcctccagccaaatagtcccatgctgactttctatcttcctttctcaaactgtcttaggaaggaccttcagtgcagatcaggtgcagtaatggctttcttgtcccttaattattcaccagacccagaagttgtacgcatttaatgctgtttgtaaccatgcatctgttttcattctttgctgtaccttttgctgcccatcctgttacttttgagtccttcatgggggtgtctgggtcttggctgtagagtctttatacttggttatgttacaagtgttggtggaaagtcctcatgaagtctttaaaaaaaaagggggcaaaatctcgggcagtggacgattgtaggccaagagaaaaaagcgggaaggggaaagttgaatggggaccaagaattttgtgataaa

SEQ ID NO: 25924 - DNA, 527 bp, Homo sapiens
cctcttagcacttctgttccctacaaaggactctgtggaaagcgagaggctgtatttaatccagaagagcccctagcttctatgcctagcatgggttggggacttattaacagcagtttctctcgttacagccatccccacatggggagaccaactgcataccaacttgctgctgcacctccaaaggattgggatagccagcagggcagaggagaggagaaaatgttgtagcccctttgtggagctcccactgttgccctaatagccagttcctttctcaggggaggctgatgttcaggctgtttatttacctgctgcctttcatctgcaatctacaaaccctttactttaataacagcttctgttagtttagtgcctctctcctaggaggttaaaatactccctatagatgatctcttttatctttgtgatggtcccagaaggtagggtggggacatgattatatgattatgcttattccatcctttggaagacagaaatacaaggacggtaagggagatgagaca

SEQ ID NO: 25925 - DNA, 437 bp, Homo sapiens
ccgggaggcagaggttgcagtgagccaagattgcgccattgcactccagcctgggtgacagagcaacactccatctcggaaaaaaaaaaaaaaaatttggtctgttcgttttaggtgttgcccgtggttgagaatcagaccctctgcccagggtttgtgactttattgcacagaaggctgcatcacccgcaaccgtcatcttaatactgccaccgaatttcattttgctgtttttgtttgcgaaggacctggagtgactcggatagaattactgctggaataaatgacgtatgaaatgagaaatctttgtccagtgttgcaagggggagggagagaagaaaagaaaggctttgatggaaccgctgttgtacagaattagtttccataagaccagaaaatacagaagaacaaaataaaacgtcatcagatatttttct

SEQ ID NO: 25926 - DNA, 306 bp, Homo sapiens
tatagatcactgacaaagtatctgttttagcagatagggacaaagtttaaataatttggccaaggtcatagtagaccaagatttggacccagcacaagcatcctctttccaggaaaccttccctcaggcccttagttggtttaagtgccctctctctgtactattagcatatgcacacacattcattttagcgttgactttaataataaggatgtttaccatgtaccagatacatagtacttgcacctatgttatctatgtttaagtgttttgtaggcattagttcatttaagcctcataactgcc

SEQ ID NO: 25927 - DNA, 504 bp, Homo sapiens
tataattaattgtactatatgctgagtacaactaaaaactctgaatattatacgtaaaacacaagaagactctgaaaggtggagagaataaggcagaggagctagggatctcaggacccaaataatgacactgcagtagttccctgccttttcttttagcctcatatattccataattagagctaaagaagctgataacccagaagtgcaatggccacagacaaagaaagcgccagcaaaagcccagtcttttaaatactagtagagggacaccatagcaagacagaaaactttttgagaataaccattctacttcaaccaaacaccacagaaaaaaacattggtcacactcatagctgcaaaggccaagtagggatcctagatttccatcctcaccaagctgttatgaggcaccctaacacctcctccactggaattgtgtcagattaggccaggtacagagttgggactttaattcccatagaatggttaactagcctttcc

SEQ ID NO: 25928 - DNA, 563 bp, Homo sapiens
tagtatgagctgtgttggaaagttttctactcactcttttctaccaggttaatcaatgttgtgggtaggagcttggattttggcatcgcacagactggcgttcaaattcacactatgctatttattgactgtgacttttgaacaaataccttccctgattctcagtcccttcatctgtgaaatgggggaaatgccaccaacctgataaagttattttgagaattacatgaagtactgaatgttgaacgcttactataacatcatggtgaatgaaataatgcagacacaaaaggaaaaatactgtatggttccatatatatgaagtacctcgtagagaattttgagctgaggggaagggcaagagttcttgtttaatggctgcagaattccagttgggggaaaggtgtggagatgatcacacaacaatgtgaacgtataaatgccgctgaactgtacatgtttaaatcggcaaaatggtaaatgtatattatgcatattttaacacaataaaataaacaaattttaaaatgtttacagtagagcttggcgcacaataaatggct

SEQ ID NO: 25929 - DNA, 491 bp, Homo sapiens
tagctgttccagaggatccccgtccataaggtgtgccagcagcagtatcacaatcaccaaaaggttgaacaaacctagagtgctcatcagcagatgaagtgtgggctatctaaccataaatggaatattatacagtcataaaaaaggaatgaagtactaatacatactctgacatggatgaaccttgaaacattacactacatgaatgtctgactaaaaggaaaaatactgtatggttccatatatatgaagtacctcgtagagaattttgagctgaggggaagggcaagagttcttgtttaatggctgcagaattccagttgggggaaaggtgtggagatgatcacacaacaatgtgaacgtataaatgccgctgaactgtacatgtttaaatcggcaaaatggtaaatgtatattatgcatattttaacacaataaaataaacaaattttaaaatgtttacagtagagcttggcgcacaataaatggct

SEQ ID NO: 25930 - DNA, 433 bp, Homo sapiens
actaaagaaagtaaagttcatttgttgactacagaaattccttaatatgcatacctggtctcacttacttaaggtataagactgaggtcagcaggaaaaggaaaatcaacagcaaaagggcaaagatcagatggattccatatctaaggattgttatttcatagttcccatggagatgaataaagaaaagcatgagaagtatgagtgatgcaaagccattggccatccagattagactggtcactactaagacaaaaataaattcctttaagttttataaggcgactagattacttcaaagtactctactggatagccactcaaatatctcctaatggtgtcctaatttgaactcgtaagaactggggtcagagtatttctagagaggagccatattttaaaaatgccttctgtctgtcctaacctttgatat

SEQ ID NO: 25931 - DNA, 1587 bp, Homo sapiens
gtctagtagagcctggtgttaatcggccgaggagcggggaccgggaagcatggcccgggggtcggcggttgcctgggcggcgctcgggccgttgttgtggggctgcgcgctggggctgcagggcgggatgctgtacccccaggagagcccgtcgcgggagtgcaaggagctggacggcctctggagcttccgcgccgacttctctgacaaccgacgccggggcttcgaggagcagtggtaccggcggccgctgtgggagtcaggccccaccgtggacatgccagttccctccagcttcaatgacatcagccaggactggcgtctgcggcattttgtcggctgggtgtggtacgaacgggaggtgatcctgccggagcgatggacccaggacctgcgcacaagagtggtgctgaggattggcagtgcccattcctatgccatcgtgtgggtgaatggggtcgacacgctagagcatgaggggggctacctccccttcgaggccgacatcagcaacctggtccaggtggggcccctgccctcccggctccgaatcactatcgccatcaacaacacactcacccccaccaccctgccaccagggaccatccaatacctgactgacacctccaagtatcccaagggttactttgtccagaacacatattttgactttttcaactacgctggactgcagcggtctgtacttctgtacacgacacccaccacctacatcgatgacatcaccgtcaccaccagcgtggagcaagacagtgggctggtgaattaccagatctctgtcaagggcagtaacctgttcaagttggaagtgcgtcttttggatgcagaaaacaaagtcgtggcgaatgggactgggacccagggccaacttaaggtgccaggtgtcagcctctggtggccgtacctgatgcacgaacgccctgcctatctgtattcattggagatccgagggaagggcttcgactggccgctgctggtgaaggacttcaacctgcttcgctggcttggtgccaacgctttccgtaccagccactacccctatgcagaggaagtgatgcagatgtgtgaccgctatgggattgtggtcatcgatgagtgtcccggcgtgggcctggcgctgccgcagttcttcaacaacgtttctctgcatcaccacatgcaggtgatggaagaagtggtgcgtagggacaagaaccaccccgcggtcgtgatgtggtctgtggccaacgagcctgcgtcccacctagaatctgctggctactacttgaagatggtgatcgctcacaccaaatccttggaccctcccggctgtgacctttgtgagcaactctaactatgcagcagacaagggggctccgtatgtggatgtgatctgtttgaacagctactactcttggtatcacgactacgggcacctggagttgattcaggctgcagctggccaccagtttgagaactggtaataagaagtatcaagaagcccattattcagagcgagtatggaagaggaaacgattgcagggtttcaccagggatccaactctgatgtacactgaaggagtaccagaa

SEQ ID NO: 25932 - DNA, 1737 bp, Homo sapiens
ttagcgccgcagacggtggccgagcgggggacggggaccgggaagcatggcccgggggtcggcggttgcctgggcggcgctcgggccgttgttgtggggctgcgcgctggggctgcagggcgggatgctgtacccccaggagagcccgtcgcgggagtgcaaggagctggacggcctctggagcttccgcgccgacttctctgacaaccgacgccggggcttcgaggagcagtggtaccggcggccgctgtgggagtcaggccccaccgtggacatgccagttccctccagcttcaatgacatcagccaggactggcgtctgcggcattttgtcggctgggtgtggtacgaacgggaggtgatcctgccggagcgatggacccaggacctgcgcacaagagtggtgctgaggattggcagtgcccattcctatgccatcgtgtgggtgaatggggtcgacacgctagagcatgaggggggctacctccccttcgaggccgacatcagcaacctggtccaggtggggcccctgccctcccggctccgaatcactatcgccatcaacaacacactcacccccaccaccctgccaccagggaccatccaatacctgactgacacctccaagtatcccaagggttactttgtccagaacacatattttgactttttcaactacgctggactgcagcggtctgtacttctgtacacgacacccaccacctacatcgatgacatcaccgtcaccaccagcgtggagcaagacagtgggctggtgaattaccagatctctgtcaagggcagtaacctgttcaagttggaagtgcgtcttttggatgcagaaaacaaagtcgtggcgaatgggactgggacccagggccaacttaaggtgccaggtgtcagcctctggtggccgtacctgatgcacgaacgccctgcctatctgtattcattggaggtgcagctgactgcacagacgtcactggggcctgtgtctgacttctacacactccctgtggggatccgcactgtggctgtcaccaagagccagttcctcatcaatgggaaacctttctatttccacggtgtcaacaagcatgaggatgcggacatccgagggaagggcttcgactggccgctgctggtgaaggacttcaacctgcttcgctggcttggtgccaacgctttccgtaccagccactacccctatgcagaggaagtgatgcagatgtgtgaccgctatgggattgtggtcatcgatgagtgtcccggcgtgggcctggcgctgccgcagttcttcaacaacgtttctctgcatcaccacatgcaggtgatggaagaagtggtgcgtagggacaagaaccaccccgcggtcgtgatgtggtctgtggccaacgagcctgcgtcccacctagaatctgctggctactacttgaagatggtgatcgctcacaccaaatccttggaccctcccggctgtgacctttgtgagcaactctaactatgcagcagacaagggggctccgtatgtggatgtgatctgtttgaacagctactactcttggtatcacgactacgggcacctggagttgattcaggctgcagctggccaccagtttgagaactggtaataagaagtatcaagaagcccattattcagagcgagtatggaagaggaaacgattgcagggtttcaccagggatccaactctgatgtacactgaaggagtaccagaa

SEQ ID NO: 25933 - DNA, 1077 bp, Homo sapiens
tcgaggctcgggttttaatttcgtgcgacgagggggagggcggggaccgggaagcatggcccgggggtcggcggttgcctgggcggcgctcgggccgttgttgtggggctgcgcgctggggctgcagggcgggatgctgtacccccaggagagcccgtcgcgggagtgcaaggagctggacggcctctggagcttccgcgccgacttctctgacaaccgacgccggggcttcgaggagcagtggtaccggcggccgctgtgggagtcaggccccaccgtggacatgccagttccctccagcttcaatgacatcagccaggactggcgtctgcggcattttgtcggctgggtgtggtacgaacgggaggtgatcctgccggagcgatggacccaggacctgcgcacaagagtggtgctgaggattggcagtgcccattcctatgccatcgtgatccgagggaagggcttcgactggccgctgctggtgaaggacttcaacctgcttcgctggcttggtgccaacgctttccgtaccagccactacccctatgcagaggaagtgatgcagatgtgtgaccgctatgggattgtggtcatcgatgagtgtcccggcgtgggcctggcgctgccgcagttcttcaacaacgtttctctgcatcaccacatgcaggtgatggaagaagtggtgcgtagggacaagaaccaccccgcggtcgtgatgtggtctgtggccaacgagcctgcgtcccacctagaatctgctggctactacttgaagatggtgatcgctcacaccaaatccttggaccctcccggctgtgacctttgtgagcaactctaactatgcagcagacaagggggctccgtatgtggatgtgatctgtttgaacagctactactcttggtatcacgactacgggcacctggagttgattcaggctgcagctggccaccagtttgagaactggtaataagaagtatcaagaagcccattattcagagcgagtatggaagaggaaacgattgcagggtttcaccagggatccaactctgatgtacactgaaggagtaccagaa

SEQ ID NO: 25934 - DNA, 1740 bp, Homo sapiens
gtctagtagagcctggtgttaatcggccgaggagcggggaccgggaagcatggcccgggggtcggcggttgcctgggcggcgctcgggccgttgttgtggggctgcgcgctggggctgcagggcgggatgctgtacccccaggagagcccgtcgcgggagtgcaaggagctggacggcctctggagcttccgcgccgacttctctgacaaccgacgccggggcttcgaggagcagtggtaccggcggccgctgtgggagtcaggccccaccgtggacatgccagttccctccagcttcaatgacatcagccaggactggcgtctgcggcattttgtcggctgggtgtggtacgaacgggaggtgatcctgccggagcgatggacccaggacctgcgcacaagagtggtgctgaggattggcagtgcccattcctatgccatcgtgtgggtgaatggggtcgacacgctagagcatgaggggggctacctccccttcgaggccgacatcagcaacctggtccaggtggggcccctgccctcccggctccgaatcactatcgccatcaacaacacactcacccccaccaccctgccaccagggaccatccaatacctgactgacacctccaagtatcccaagggttactttgtccagaacacatattttgactttttcaactacgctggactgcagcggtctgtacttctgtacacgacacccaccacctacatcgatgacatcaccgtcaccaccagcgtggagcaagacagtgggctggtgaattaccagatctctgtcaagggcagtaacctgttcaagttggaagtgcgtcttttggatgcagaaaacaaagtcgtggcgaatgggactgggacccagggccaacttaaggtgccaggtgtcagcctctggtggccgtacctgatgcacgaacgccctgcctatctgtattcattggaggtgcagctgactgcacagacgtcactggggcctgtgtctgacttctacacactccctgtggggatccgcactgtggctgtcaccaagagccagttcctcatcaatgggaaacctttctatttccacggtgtcaacaagcatgaggatgcggacatccgagggaagggcttcgactggccgctgctggtgaaggacttcaacctgcttcgctggcttggtgccaacgctttccgtaccagccactacccctatgcagaggaagtgatgcagatgtgtgaccgctatgggattgtggtcatcgatgagtgtcccggcgtgggcctggcgctgccgcagttcttcaacaacgtttctctgcatcaccacatgcaggtgatggaagaagtggtgcgtagggacaagaaccaccccgcggtcgtgatgtggtctgtggccaacgagcctgcgtcccacctagaatctgctggctactacttgaagatggtgatcgctcacaccaaatccttggaccctcccggctgtgacctttgtgagcaactctaactatgcagcagacaagggggctccgtatgtggatgtgatctgtttgaacagctactactcttggtatcacgactacgggcacctggagttgattcaggctgcagctggccaccagtttgagaactggtaataagaagtatcaagaagcccattattcagagcgagtatggaagaggaaacgattgcagggtttcaccagggatccaactctgatgtacactgaaggagtaccagaa

SEQ ID NO: 25935 - DNA, 1746 bp, Homo sapiens
tcgaggctcgggttttaatttcgtgcgacgagggggagggcggggaccgggaagcatggcccgggggtcggcggttgcctgggcggcgctcgggccgttgttgtggggctgcgcgctggggctgcagggcgggatgctgtacccccaggagagcccgtcgcgggagtgcaaggagctggacggcctctggagcttccgcgccgacttctctgacaaccgacgccggggcttcgaggagcagtggtaccggcggccgctgtgggagtcaggccccaccgtggacatgccagttccctccagcttcaatgacatcagccaggactggcgtctgcggcattttgtcggctgggtgtggtacgaacgggaggtgatcctgccggagcgatggacccaggacctgcgcacaagagtggtgctgaggattggcagtgcccattcctatgccatcgtgtgggtgaatggggtcgacacgctagagcatgaggggggctacctccccttcgaggccgacatcagcaacctggtccaggtggggcccctgccctcccggctccgaatcactatcgccatcaacaacacactcacccccaccaccctgccaccagggaccatccaatacctgactgacacctccaagtatcccaagggttactttgtccagaacacatattttgactttttcaactacgctggactgcagcggtctgtacttctgtacacgacacccaccacctacatcgatgacatcaccgtcaccaccagcgtggagcaagacagtgggctggtgaattaccagatctctgtcaagggcagtaacctgttcaagttggaagtgcgtcttttggatgcagaaaacaaagtcgtggcgaatgggactgggacccagggccaacttaaggtgccaggtgtcagcctctggtggccgtacctgatgcacgaacgccctgcctatctgtattcattggaggtgcagctgactgcacagacgtcactggggcctgtgtctgacttctacacactccctgtggggatccgcactgtggctgtcaccaagagccagttcctcatcaatgggaaacctttctatttccacggtgtcaacaagcatgaggatgcggacatccgagggaagggcttcgactggccgctgctggtgaaggacttcaacctgcttcgctggcttggtgccaacgctttccgtaccagccactacccctatgcagaggaagtgatgcagatgtgtgaccgctatgggattgtggtcatcgatgagtgtcccggcgtgggcctggcgctgccgcagttcttcaacaacgtttctctgcatcaccacatgcaggtgatggaagaagtggtgcgtagggacaagaaccaccccgcggtcgtgatgtggtctgtggccaacgagcctgcgtcccacctagaatctgctggctactacttgaagatggtgatcgctcacaccaaatccttggaccctcccggctgtgacctttgtgagcaactctaactatgcagcagacaagggggctccgtatgtggatgtgatctgtttgaacagctactactcttggtatcacgactacgggcacctggagttgattcaggctgcagctggccaccagtttgagaactggtaataagaagtatcaagaagcccattattcagagcgagtatggaagaggaaacgattgcagggtttcaccagggatccaactctgatgtacactgaaggagtaccagaa

SEQ ID NO: 25936 - DNA, 958 bp, Homo sapiens
gactgagactgtctcagaagaaaaacatttttttttgatagagatggggtctcagtctgtcaccaggctggtcttcaactcctggactcaagtgatcctcctgccttagcctcccaaagtgtgggaactccaggcatgagccaccttgtcttgtcaaagggaaggccatgttttgaagggcaggttcccagggtcagccagggtagggcagaacctctgattgctgcatctctgcttacaggcccagaggcagctgctggggtgcacgaggggccttcctgctggagggcaggccggatggggctcaggctgtcggggtgctcacacctggtgctttggctgtcataggtgcagctgactgcacagacgtcactggggcctgtgtctgacttctacacactccctgtggggatccgcactgtggctgtcaccaagagccagttcctcatcaatgggaaacctttctatttccacggtgtcaacaagcatgaggatgcggacgtgtgttggggctcctgggtccttgtgggggctgcttctggtcaccctccactttcgccttccctgtgtcctgcagttgagggcagctcagggcaatgaggcaaatggctccaaatggagagggggctcatggggtggctctccagggtcctggctctcagaggaagtgcagcttcgacagggacaggggtcacttggctctgctatctcctagatccgagggaagggcttcgactggccgctgctggtgaaggacttcaacctgcttcgctggcttggtgccaacgctttccgtaccagccactacccctatgcagaggaagtgatgcagatgtgtgaccgctatgggattgtggtcatcgatgagtgtcccggcgtgggcctggcgctgccgtgagtctctgctgtgcacctgctccgcctgcccagcccgggggcgtcaccgtgaccctctgtc

SEQ ID NO: 25937 - DNA, 773 bp, Homo sapiens
gcagatatccttgttcttaggataaagggaaatacacactgaaatatttaagagtaaagaggtctgaggggtgtgatgtccacaacttattttcatatggctcaagaaaatgcctgcgttgtaagtagtaattatgacaaagaacaaaaatgactaaataataaggcaaatatggcaaaataacaattggtgaatctcggtgaagggtatataggtatttttgtactagtcctgcaacttttctgtaagtgtgaaattacttcaaaataaaaaattttttaatgtggctgggcgcagtagctcacatctataatcccagcactttgggaggctgaggcggggtgggatcacttgaactcaggactttgagaccagcctgggcaacatggcaaaaccccatctctacaaaaaatacaaaaaacaaacaaacaaacaaacaaacaaacaaacaaaaacaaattggctgggcgtagaggcacacgcctgcagtcccagctacttgtggggctgaggctggaggatgacttgagcccaggaggttgaagctgcagcgagccgagatcacgtcactgcactccagcctgggtaacaaagtgaaactgtctcaaaataaaagtaaggtggacaaagatggagccctacttttctcccacaagccagtttcctttgtttctcctccaccttctcctccataatcccagccgtcctgccattaacttatatttgcttgtggtacaggtactggtacctgatttgaggatgaagagaaagag

SEQ ID NO: 25938 - DNA, 338 bp, Homo sapiens
gtgtatcttgattctttgtctgtgacatcacttattgtatatctggaaaacagccatgtgttctagtggtctagaagatatgtttacctatcttggttgcagacaatacttgcatgatttcaataggataaaagaaaatttaagtgtgtgaataactgagagatggtgagttaggaaaagttcttagaaattgtaaactttaagtcacagggatgtttcaaggaatcatcagtgttggattagccggtcattgagagaaaggatatgtattatatttaaggaataaaggcaaaaacaccatactttatttatctgcaggtcaactataatttttaaaa

SEQ ID NO: 25939 - DNA, 209 bp, Homo sapiens
aatctgcttgctactaggatcttattcttcactccagtccaggcattgggcggaagggtgaatgcagagtggcacacagcagcagatgggaattagctggctcctcagccttccagggtgggtttttttttgttgtttttgattggagagtccaggtgggtggttgctgtttttccccctttctgtgacacaatttaaggtaaagtaat

SEQ ID NO: 25940 - DNA, 302 bp, Homo sapiens
cctgaaaccagggccagcttcactggcctgcaacctgggcaggcacacagggtcctcattcagaagggccatgtgcccgcttcagtgctctactatagtcatctcgaaactcagtactttttggacaaagggccccacatttttattttgtgtcaggtcctgcaaattatatagctagtcctgcctgaagtatctttgtgtctctcagactaaaaaggatgtagggagaggggtacagttctgtgggtggccctgttctctctgctctgtgcagggcctgcctcccactgtgagctgcaaag

SEQ ID NO: 25941 - DNA, 892 bp, Homo sapiens
tttggtatccccacacttgggtgagagccagcccctcacccaggggaatctgtgctctacttacgtgcaaatctcccggtgaaatgctgctcccttgcaacacacttggacaaaagggagctaagcggggtggcccacctcgaagagagaacaaagagaacaaaaaggaagtttgttggtagtgtctgactaccccccctctgctagcctcctcatctatgccacatcttcacaaacctctgctctcagaggtgtcagctactgcctcttcccacccccatagggtttcagaaagcctgagtggcattcgatttcggcaggtccacaaacagcatctaaaagaggttccgtgtggccaatagggtttcaggctaccctttttgagagcctggcgcagaacaaggtctcctttcacttgaccctcctttgccaatacaaggctgtttggctgggtccagcaccccatggggcaaatgttcaggccaagaatagtcttcattcttcccatgaagctttcaaagtcttctaaagaacacaggaaattgtcagcctctattttctgctgaaaatggctgacactaaactttgaacattctgtggatgaatcccaaattatgggaaccaagtttgcttgaaaagcagcaaaagttttcattaaagatgagagactctgataaaccatctcggcattacttacaaagaatggtgtattttataactccaattactaacacctttcctcttttgaccaaaattaccttatttccatggaagtaactccaaaagactatctctgtgcacaaagaagcagatccagagacttaccatggcaccatgcacatttcctaaaaataaaccgtcactaaaactgagaagaaatactttttggtct

SEQ ID NO: 25942 - DNA, 365 bp, Homo sapiens
ggggcttgggtttctcatcagcgggattgatcgtctgcccagtctaatgattctgaaagctggagatttggaatagtctcacccccgagcccctccatcttgcatgctccccagccacctctgccccaaggcagacctgcagggaagaatttctctctggagaaactgactggggacacagaaaccacctcatcacattgatatttgggattctgcaaaaaaagagggcagaccctctggttgatcatcctagcaagaggcctgccctgcaataagcctcacccaatggaagattgcttcccactaacaatttttgatgcctcactcttggataaaaatggacaaccagtgatttaggagggaaa

SEQ ID NO: 25943 - DNA, 391 bp, Homo sapiens
cctacctctccctgactgatcagttctgcataacaattgatttttagagaagcaacactttatcaagttatacaatataaagttgaatattctttccaagagtcttctatttgcatagttaagaaaattgacttttttgatcccctcgaaacaaaaaaattgctacctaacgatgacttttcttgtttacttcctggtgtttcttatctgggaacattcagtactttgggtgcagcaatccttctttgtatgggactgccacacacatgacagcatctagcttcctgtcaccaacacaaatagtgtctcctagttgttatggtatgttaagacccctacacatttctacctgtcccctatggaggtagtagtgccccctgtttgagaactg

SEQ ID NO: 25944 - DNA, 434 bp, Homo sapiens
ttaaaaaaagggggtagatatggggtgagaggtacagacattaatcaaattatcacaacataaattaagccatggtaaatgttacaaggtaaagctttgaaggcatacaaaatggatgcaggaatgcccagcaggaacagatctaggttatgggatttcaaaaacaaaacacatcatctagtgaggaaagctcatcatctagtgaggaagacttgtacaaagaggtagcttgagtatagtgcaataccaggtaaaagtgcttccttgtgttcgaagcctgacaagatgttctaggcttatctatctcagacacttcctgcttagatttgaaaccagccacttctccaaggagccccaattcctttcactgggaattggccctttcagattagctctgtgccctctgacatggcttgaaagggctcctactggct

SEQ ID NO: 25945 - DNA, 507 bp, Homo sapiens
aaggtggccaatttgaagggtaattctcctttgggatgattgctaagggaaaaaaaaaaatccatgttgaacataaggtttgtaatcaagacaactggatttaaatattggatgcaccattcagctctctaaaactgagtatcttcatcttaaaatgggatgtgcagtgtaaggattaaggcagtaaagtatagaggctaagccgtgtgctatagcactggagctatcttacccaggtttgaatctagcttggccattttctagctatgtggccttgggtatgtttaaccttactttgcttcatcttgctcatttgtacaagcactgctcgttttattgcatttcactttattgcacttcacatatattgcatttcttacaaattgaaagtttttggcaaccttgtgtgggataagtctattggtgccatttttctaacagcatgtactcacttcatgtctctgtgtcagcattttttagcaataaagtattttttaaatcaaaaaa

SEQ ID NO: 25946 - DNA, 637 bp, Homo sapiens
gactaaattgtagggagaccctacatggaaagctgctgatgattatggtgggtgataggactgagtcttgtcagtcagccttgatattacacgtaagagtttggatttacaaaaaaaaaaaaaaagaaaaaagaaaaagacatctaggcattggggtccctttaaagatcaggtggaatgttttcctgatgttcaggattcttcctgcctgcctccctccttgcagaagaaaagataggtaggtataagtagtaggtaggtaaaggtatgtataagcaggtataattcaaaaggtatatgaagtacagcgaagtcattgtgttagataaaagcagaaactacaaaactgtaaggttttgcttattttgtcacagctctgcttctgtttttggtgttctgtggctctttccgccgatcctttgtctcagcctcatttgtaagtgacttgttttttccatttctcaagtgatccgcctgctttggcctcccaaagtgccctgggattacaggtgcaagccaccatgcccggccatttatttttattttattctattttattttttaagatggagtctcgctgtgtcatccactgcattctccagcctgggcaacaggccaagaccctgtctcaaaaaaa

SEQ ID NO: 25947 - DNA, 576 bp, Homo sapiens
gaaagatgtttattttctttcaaacaatattaaaacaaataaattacgtgcagttgagtaacacaatgagcacataatacagttaaccttttaaaaggcacttctggcataatcactaaagtaatgtagacaattagacaattatttgctttgacactttattaatttgaccattcatttcaattttcttttaatgttcttcagtgaattgtttcatttataaacacttcaaagttccatcataaaatatgcctagattaactgacttatcttaattctatttactatggaacctatcaccaaaaaatctaaaggacattttaaaatgttatcctttatttgggtactaaactaatcactcctccacagagtcataagaaagtgtttgaaataaacaaaaataaatgaagtggaactggtgattgatataaatcttctagaaacaaaagttgggtaagccagaggttttttgttattgacactgtttattctttttaagtgattttgttcttttattatttttaattatacaattttaaatagtatgcttttattttaaaatactttaaagtgttt

SEQ ID NO: 25948 - DNA, 576 bp, Homo sapiens
ggatatcataatcctaactccattctacataatcgaggtcagtctcctttgtagtctctaggaagtgcagatggctccaatgatacaacctgagaaactttaattgaggcttaaaaaagaaagggaaagtaacagttaacaacttttttcactgttcctacctaatttgatgctcacaaccaccctttaaaggtaagtggacatagtccccttcatagatgagggggtagacgtttatttgttccggaagaggtaggttttaaccacctgggtgactggtagcctttgctcctcttactactctactgcatggttctctgagcctctttaagtcatttcggccattcaggtctgaaggaagcatctttgccagaagtgatgcagattcaggaatggaggagagagattattttaggtttcagtcagggggcggaagctccaagcaaccagccaccttttgagatgattttggagccttggtgctccaagaatggtgcacttcatgttacaatgttctaaacttgctggagggtttacagtggcattttgaatctggagacatttcgattgggaatc

SEQ ID NO: 25949 - DNA, 458 bp, Homo sapiens
agaggaacctggaaaattattagtaccaatattgaattagaaactatttaagtaatatgaaatataatgtaaaaatttggctttttaagtaatacataaatcacaaacttgattcaaacaaattagagaatgcttcatttgtttgtacatcattcattaaatgaagttaagggatgaaagcatttgtccagttcaggaagattatatgattaaggctagaaaaagtggtatgccttttttttatattatacattgggggactttaaagggaattttttgttattttcattccagagtacatggatggtctttagtagtcctgttaggtttatataaaagttactagacaatttgtagttttaaataatgcaacttttttttaaaagtagttcttgttagcccattgtaaggtcaacagaatgtaaaggtattactagtaagaacaaatcactgagtta

SEQ ID NO: 25950 - DNA, 142 bp, Homo sapiens
aatagtgtttatcctgatgacttaggtatttggcatccccttagcttttttatttttttttgagacagggttcttactctgtcacccacgctggagcgcagtggtgtgacttcggctcactgaagcctcgacctcccaggct

SEQ ID NO: 25951 - DNA, 267 bp, Homo sapiens
aattatttttaagtgaatggcaggtggaacactacaacatccataattttgcaagctgagaaagagctgaacgtctttttattgccaaaaaaattgctggtgttagtgacaacagtttttttctggatctgattgaagacatttatgaaaaatcagtcctaaatatgaatattcccataaggaaactgcttctaaggagacttaaaaatactcctgaagtcagatgtgtatcaatttctatttttgtgacttccccccttaacttcc

SEQ ID NO: 25952 - DNA, 197 bp, Homo sapiens
ggccagtttcacctgatttttttttggaatattaaagccttgaggttaaagaaaataataagagttgttaaaaggcagaattgtgtttaggagactcaatatgtagtgttgcaacactaggaggaaaaactacaggtacatattattcactcagtttaaaacttgcggatctgtttatacaacttcagctatagcca

SEQ ID NO: 25953 - DNA, 421 bp, Homo sapiens
gagacagggtcttgctctgttgcccaggcttgagtacagtggcacaagcacagctcactgcagccttgacccccaggctcaagggatcctcccacctcagcctgctcaagtagctgggaccacaggcatatgccactacacctgggtaacttttttatttttagcagagatagggtcttgctatgttgctcaggcaggtctcaaattcctgggttcaagagatcctcccaccttggcctcccagtgtgctgggattacaggcatacaccactgtgcccagcctataaatttcttaacagcaatccagtcattcaatagtttagtccattgggctctgcatagaagctgttcatttttcagttatatggacttaagtggtatggaagttacatatagcagtcaacacatggctacgtaaaga

SEQ ID NO: 25954 - DNA, 347 bp, Homo sapiens
ctgttaaggtggaatgactctctccctatctcactcctctgtccatgcctttattagtgtacatataaatgacatttggggctggagaatcgaatgaattgagtcatcagcatctgctgcatgggggatgcggatcaagaaggaaggagcaataaaaaaccaagacaagctgagaagggcaccatcagggcgctcaactctagttaagaagacagaagcatctgggcacagtggctcacacctgtaatcccagcattttgggaggccgaggcgggtggatcacttgaggtcaggagttctagaccagcctggccagaatggtgaaaccaggtctatactaaaaatac

SEQ ID NO: 25955 - DNA, 391 bp, Homo sapiens
ggcaaccaagtgagatcctgtctcaaaaaaaaaaaaaaaattgaattaataattttggtaaatatatatgtattcagatacgttaaaggatagcattttgcatacttgtctggtagaatgagttggacataatttttagttacagtaaaaagttctttagagagctaaaaagttttagtggtatttttgcttttccaaatcccacatgtcccagaatttggcaaggaaatagaaaaaggaaatagaaatcacagtgctgtagtaacagaggtgcaaaaaaaaatgataatgttggtcaaaatgtataatgttaagaaaaacagtgtttgtggttaataaaagtgtattgattttgttcaaattttgttgagaaaatattctctccttttct

SEQ ID NO: 25956 - DNA, 893 bp, Homo sapiens
  misc_feature (775)..(775): n is a, c, g, or t
  misc_feature (805)..(806): n is a, c, g, or t
ggcacgagggtgacgcgaggctctgcggagaccaggagtcagactgtaggacgacctcgggtcccacgtgtccccggtactcgccggccggagcccccggcttcccggggccgggggaccttagcggcacccacacacagcctactttccaagcggagccatgtctggtaacggcaatgcggctgcaacggcggaagaaaacagcccaaagatgagagtgattcgcgtgggtacccgcaagagccagcttgctcgcatacagacggacagtgtggtggcaacattgaaagcctcgtaccctggcctgcagtttgaaatcattgctatgtccaccacaggggacaagattcttgatactgcactctctaagattggagagaaaagcctgtttaccaaggagcttgaacatgccctggagaagaatgaagtggacctggttgttcactccttgaaggacctgcccactgtgcttcctcctggcttcaccatcggagccatctgcaagcgggaaaaccctcatgatgctgttgtctttcacccaaaatttgttgggaagaccctagaaaccctgccagagaagagtgtggtgggaaccagctccctgcgaagagcagcccagctgcagagaaagttcccgcatctggagttcaggagtattcggggaaacctcaacacccggcttcggaagctggacgagcagcaggagttcagtgccatcatcctggcaacagctggcctgcagcgcatgggctggcacaaccgggtggggcaggtnagggcctgccctatctctcccaagtcattnnatctctttctggcttaaagtcatccccattggatcttagacttacgatcgtgtgaagcgaaaccgtcagaaatggttgtcctacagc

SEQ ID NO: 25957 - DNA, 1481 bp, Homo sapiens
ggcacgagggtgacgcgaggctctgcggagaccaggagtcagactgtaggacgacctcgggtcccacgtgtccccggtactcgccggccggagcccccggcttcccggggccgggggaccttagcggcacccacacacagcctactttccaagcggagccatgtctggtaacggcaatgcggctgcaacggcggtgagtgctgagccggtgaccagcacactttgggcttctggacgagccgtgcagcgattggccccaggttgccatcctcagtcgtctattggaagaaaacagcccaaagatgagagtgattcgcgtgggtacccgcaagagccagcttgctcgcatacagacggacagtgtggtggcaacattgaaagcctcgtaccctggcctgcagtttgaaatcattgctatgtccaccacaggggacaagattcttgatactgcactctctaagattggagagaaaagcctgtttaccaaggagcttgaacatgccctggagaagaatgaagtggacctggttgttcactccttgaaggacctgcccactgtgcttcctcctggcttcaccatcggagccatctgcaagcgggaaaaccctcatgatgctgttgtctttcacccaaaatttgttgggaagaccctagaaaccctgccagagaagagtgtggtgggaaccagctccctgcgaagagcagcccagctgcagagaaagttcccgcatctggagttcaggagtattcggggaaacctcaacacccggcttcggaagctggacgagcagcaggagttcagtgccatcatcctggcaacagctggcctgcagcgcatgggctggcacaaccgggtggggcagatcctgcaccctgaggaatgcatgtatgctgtgggccaggaaggaggctgcagtgtgccagtagccgtgcatacagctatgaaggatgggcaactgtacctgactggaggagtctggagtctagacggctcagatagcatacaagagaccatgcaggctaccatccatgtccctgcccagcatgaagatggccctgaggatgacccacagttggtaggcatcactgctcgtaacattccacgagggccccagttggctgcccagaacttgggcatcagcctggccaacttgttgctgagcaaaggagccaaaaacatcctggatgttgcacggcagcttaacgatgcccattaactggtttgtggggcacagatgcctgggttgctgctgtccagtgcctacatcccgggcctcagtgccccattctcactgctatctggggagtgattaccccgggagactgaactgcagggttcaagccttccagggatttgcctcaccttggggccttgatgactgccttgcctcctcagtatgtgggggcttcatctctttagagaagtccaagcaacagcctttgaatgtaaccaatcctactaataaaccagttctgaaggt

SEQ ID NO: 25958 - DNA, 1390 bp, Homo sapiens
ggcacgagggtgacgcgaggctctgcggagaccaggagtcagactgtaggacgacctcgggtcccacgtgtccccggtactcgccggccggagcccccggcttcccggggccgggggaccttagcggcacccacacacagcctactttccaagcggagccatgtctggtaacggcaatgcggctgcaacggcggaagaaaacagcccaaagatgagagtgattcgcgtgggtacccgcaagagccagcttgctcgcatacagacggacagtgtggtggcaacattgaaagcctcgtaccctggcctgcagtttgaaatcattgctatgtccaccacaggggacaagattcttgatactgcactctctaagattggagagaaaagcctgtttaccaaggagcttgaacatgccctggagaagaatgaagtggacctggttgttcactccttgaaggacctgcccactgtgcttcctcctggcttcaccatcggagccatctgcaagcgggaaaaccctcatgatgctgttgtctttcacccaaaatttgttgggaagaccctagaaaccctgccagagaagagtgtggtgggaaccagctccctgcgaagagcagcccagctgcagagaaagttcccgcatctggagttcaggagtattcggggaaacctcaacacccggcttcggaagctggacgagcagcaggagttcagtgccatcatcctggcaacagctggcctgcagcgcatgggctggcacaaccgggtggggcagatcctgcaccctgaggaatgcatgtatgctgtgggccaggaaggaggctgcagtgtgccagtagccgtgcatacagctatgaaggatgggcaactgtacctgactggaggagtctggagtctagacggctcagatagcatacaagagaccatgcaggctaccatccatgtccctgcccagcatgaagatggccctgaggatgacccacagttggtaggcatcactgctcgtaacattccacgagggccccagttggctgcccagaacttgggcatcagcctggccaacttgttgctgagcaaaggagccaaaaacatcctggatgttgcacggcagcttaacgatgcccattaactggtttgtggggcacagatgcctgggttgctgctgtccagtgcctacatcccgggcctcagtgccccattctcactgctatctggggagtgattaccccgggagactgaactgcagggttcaagccttccagggatttgcctcaccttggggccttgatgactgccttgcctcctcagtatgtgggggcttcatctctttagagaagtccaagcaacagcctttgaatgtaaccaatcctactaataaaccagttctgaaggt

SEQ ID NO: 25959 - DNA, 1534 bp, Homo sapiens
ggcacgagggtgacgcgaggctctgcggagaccaggagtcagactgtaggacgacctcgggtcccacgtgtccccggtactcgccggccggagcccccggcttcccggggccgggggaccttagcggcacccacacacagcctactttccaagcggagccatgtctggtaacggcaatgcggctgcaacggcggaagaaaacagcccaaagatgagagtgattcgcgtgggtacccgcaagagccagcttgctcgcatacagacggacagtgtggtggcaacattgaaagcctcgtaccctggcctgcagtttgaaatcagtgagttttctggaaaggagtggaagctaatgggaagcccagtaccccgagaggagagaacacaacatttctggctttgcctatagctaaagcccgtcccgctgccccgagattccttctgggctgctcccagttctgaagttgctatgtccaccacaggggacaagattcttgatactgcactctctaagattggagagaaaagcctgtttaccaaggagcttgaacatgccctggagaagaatgaagtggacctggttagttcactccttgaaggacctggcccacatgtgcttcctcctggcttcaccatcggagccatctgcaagcgggaaaaccctcatgatgctgttgtctttcacccaaaatttgttgggaagaccctagaaaccctgccagagaagagtgtggtgggaaccagctccctgcgaagagcagcccagctgcagagaaagttcccgcatctggagttcaggagtattcggggaaacctcaacacccggcttcggaagctggacgagcagcaggagttcagtgccatcatcctggcaacagctggcctgcagcgcatgggctggcacaaccgggtggggcagatcctgcaccctgaggaatgcatgtatgctgtgggccaggaaggaggctgcagtgtgccagtagccgtgcatacagctatgaaggatgggcaactgtacctgactggaggagtctggagtctagacggctcagatagcatacaagagaccatgcaggctaccatccatgtccctgcccagcatgaagatggccctgaggatgacccacagttggtaggcatcactgctcgtaacattccacgagggccccagttggctgcccagaacttgggcatcagcctggccaacttgttgctgagcaaaggagccaaaaacatcctggatgttgcacggcagcttaacgatgcccattaactggtttgtggggcacagatgcctgggttgctgctgtccagtgcctacatcccgggcctcagtgccccattctcactgctatctggggagtgattaccccgggagactgaactgcagggttcaagccttccagggatttgcctcaccttggggccttgatgactgccttgcctcctcagtatgtgggggcttcatctctttagagaagtccaagcaacagcctttgaatgtaaccaatcctactaataaaccagttctgaaggt

SEQ ID NO: 25960 - DNA, 1418 bp, Homo sapiens
ggcacgagggtgacgcgaggctctgcggagaccaggagtcagactgtaggacgacctcgggtcccacgtgtccccggtactcgccggccggagcccccggcttcccggggccgggggaccttagcggcacccacacacagcctactttccaagcggagccatgtctggtaacggcaatgcggctgcaacggcgcttgctcgcatacagacggacagtgtggtggcaacattgaaagcctcgtaccctggcctgcagtttgaaatcattgctatgtccaccacaggggacaagattcttgatactgcactctctaagattggagagaaaagcctgtttaccaaggagcttgaacatgccctggagaagaatgaagtggacctggttgttcactccttgaaggacctgcccactgtgcttcctcctggcttcaccatcggagccatctgcaagcgggaaaaccctcatgatgctgttgtctttcacccaaaatttgttgggaagaccctagaaaccctgccagagaagagtgtggtgggaaccagctccctgcgaagagcagcccagctgcagagaaagttcccgcatctggagttcaggagtattcggggaaacctcaacacccggcttcggaagctggacgagcagcaggagttcagtgccatcatcctggcaacagctggcctgcagcgcatgggctggcacaaccgggtggggcaggggggccttgggcgtggaagtgcgagccaaggaccaggacatcttggatctggtgggtgtgctgcacgatcccgagactctgcttcgctgcatcgctgaaagggccttcctgaggcacctggaaggaggctgcagtgtgccagtagccgtgcatacagctatgaaggatgggcaactgtacctgactggaggagtctggagtctagacggctcagatagcatacaagagaccatgcaggctaccatccatgtccctgcccagcatgaagatggccctgaggatgacccacagttggtaggcatcactgctcgtaacattccacgagggccccagttggctgcccagaacttgggcatcagcctggccaacttgttgctgagcaaaggagccaaaaacatcctggatgttgcacggcagcttaacgatgcccattaactggtttgtggggcacagatgcctgggttgctgctgtccagtgcctacatcccgggcctcagtgccccattctcactgctatctggggagtgattaccccgggagactgaactgcagggttcaagccttccagggatttgcctcaccttggggccttgatgactgccttgcctcctcagtatgtgggggcttcatctctttagagaagtccaagcaacagcctttgaatgtaaccaatcctactaataaaccagttctgaaggt

SEQ ID NO: 25961 - DNA, 1764 bp, Homo sapiens
ggcacgagggtgacgcgaggctctgcggagaccaggagtcagactgtaggacgacctcgggtcccacgtgtccccggtactcgccggccggagcccccggcttcccggggccgggggaccttagcggcacccacacacagcctactttccaagcggagccatgtctggtaacggcaatgcggctgcaacggcggaagaaaacagcccaaagatgagagtgattcgcgtgggtacccgcaagagccagcttgctcgcatacagacggacagtgtggtggcaacattgaaagcctcgtaccctggcctgcagtttgaaatcagtgagttttctggaaaggagtggaagctaatgggaagcccagtaccccgagaggagagaacacaacatttctggctttgcctatagctaaagcccgtcccgctgccccgagattccttctgggctgctcccagttctgaaggtgctttcctctgaatacctccagctctgactacctggattagcctggcatttaacatcttgagctttgggtctttttatgagtgtttctggtcttcctgctcgattgtatatactcagagggcaggaaccagggattatgtgcctctgtccccatcatgaatcgtagcacagtgctaggctcagtaaatgctgatcaataatgagcacctgattgattgactctctcctcagttgctatgtccaccacaggggacaagattcttgatactgcactctctaagattggagagaaaagcctgtttaccaaggagcttgaacatgccctggagaagaatgaagtggacctggttgttcactccttgaaggacctgcccactgtgcttcctcctggcttcaccatcggagccatctgcaagcgggaaaaccctcatgatgctgttgtctttcacccaaaatttgttgggaagaccctagaaaccctgccagagaagagtgtggtgggaaccagctccctgcgaagagcagcccagctgcagagaaagttcccgcatctggagttcaggagtattcggggaaacctcaacacccggcttcggaagctggacgagcagcaggagttcagtgccatcatcctggcaacagctggcctgcagcgcatgggctggcacaaccgggtggggcagatcctgcaccctgaggaatgcatgtatgctgtgggccaggaaggaggctgcagtgtgccagtagccgtgcatacagctatgaaggatgggcaactgtacctgactggaggagtctggagtctagacggctcagatagcatacaagagaccatgcaggctaccatccatgtccctgcccagcatgaagatggccctgaggatgacccacagttggtaggcatcactgctcgtaacattccacgagggccccagttggctgcccagaacttgggcatcagcctggccaacttgttgctgagcaaaggagccaaaaacatcctggatgttgcacggcagcttaacgatgcccattaactggtttgtggggcacagatgcctgggttgctgctgtccagtgcctacatcccgggcctcagtgccccattctcactgctatctggggagtgattaccccgggagactgaactgcagggttcaagccttccagggatttgcctcaccttggggccttgatgactgccttgcctcctcagtatgtgggggcttcatctctttagagaagtccaagcaacagcctttgaatgtaaccaatcctactaataaaccagttctgaaggt

SEQ ID NO: 25962 - DNA, 1468 bp, Homo sapiens
ctcagtgtcctggttactgcagcggcagcaacagcaggtcctactatcgcctccctctagtctctgcttctctggatccctgaggagggcagaaggtactgaggaaggttaaagggaccagccttggagtatttccccactctgagactcagctggccacaggccaggttctgaagttcctttcttccaagccagtgattctggttcttggacaaggtgttgaggaacactagaaacagaggggactgtgacctggggactttttctgcaggaagaaaacagcccaaagatgagagtgattcgcgtgggtacccgcaagagccagcttgctcgcatacagacggacagtgtggtggcaacattgaaagcctcgtaccctggcctgcagtttgaaatcattgctatgtccaccacaggggacaagattcttgatactgcactctctaagattggagagaaaagcctgtttaccaaggagcttgaacatgccctggagaagaatgaagtggacctggttgttcactccttgaaggacctgcccactgtgcttcctcctggcttcaccatcggagccatctgcaagcgggaaaaccctcatgatgctgttgtctttcacccaaaatttgttgggaagaccctagaaaccctgccagagaagagtgtggtgggaaccagctccctgcgaagagcagcccagctgcagagaaagttcccgcatctggagttcaggagtattcggggaaacctcaacacccggcttcggaagctggacgagcagcaggagttcagtgccatcatcctggcaacagctggcctgcagcgcatgggctggcacaaccgggtggggcagatcctgcaccctgaggaatgcatgtatgctgtgggccaggaaggaggctgcagtgtgccagtagccgtgcatacagctatgaaggatgggcaactgtacctgactggaggagtctggagtctagacggctcagatagcatacaagagaccatgcaggctaccatccatgtccctgcccagcatgaagatggccctgaggatgacccacagttggtaggcatcactgctcgtaacattccacgagggccccagttggctgcccagaacttgggcatcagcctggccaacttgttgctgagcaaaggagccaaaaacatcctggatgttgcacggcagcttaacgatgcccattaactggtttgtggggcacagatgcctgggttgctgctgtccagtgcctacatcccgggcctcagtgccccattctcactgctatctggggagtgattaccccgggagactgaactgcagggttcaagccttccagggatttgcctcaccttggggccttgatgactgccttgcctcctcagtatgtgggggcttcatctctttagagaagtccaagcaacagcctttgaatgtaaccaatcctactaataaaccagttctgaaggt

SEQ ID NO: 25963 - DNA, 1510 bp, Homo sapiens
ggcacgagggtgacgcgaggctctgcggagaccaggagtcagactgtaggacgacctcgggtcccacgtgtccccggtactcgccggccggagcccccggcttcccggggccgggggaccttagcggcacccacacacagcctactttccaagcggagccatgtctggtaacggcaatgcggctgcaacggcggaagaaaacagcccaaagatgagagtgattcgcgtgggtacccgcaagagccagcttgctcgcatacagacggacagtgtggtggcaacattgaaagcctcgtaccctggcctgcagtttgaaatcattgctatgtccaccacaggggacaagattcttgatactgcactctctaagattggagagaaaagcctgtttaccaaggagcttgaacatgccctggagaagaatgaagtggacctggttgttcactccttgaaggacctgcccactgtgcttcctcctggcttcaccatcggagccatctgcaagcgggaaaaccctcatgatgctgttgtctttcacccaaaatttgttgggaagaccctagaaaccctgccagagaagagtgtggtgggaaccagctccctgcgaagagcagcccagctgcagagaaagttcccgcatctggagttcaggagtattcggggaaacctcaacacccggcttcggaagctggacgagcagcaggagttcagtgccatcatcctggcaacagctggcctgcagcgcatgggctggcacaaccgggtggggcagatcctgcaccctgaggaatgcatgtatgctgtgggccagggggccttgggcgtggaagtgcgagccaaggaccaggacatcttggatctggtgggtgtgctgcacgatcccgagactctgcttcgctgcatcgctgaaagggccttcctgaggcacctggaaggaggctgcagtgtgccagtagccgtgcatacagctatgaaggatgggcaactgtacctgactggaggagtctggagtctagacggctcagatagcatacaagagaccatgcaggctaccatccatgtccctgcccagcatgaagatggccctgaggatgacccacagttggtaggcatcactgctcgtaacattccacgagggccccagttggctgcccagaacttgggcatcagcctggccaacttgttgctgagcaaaggagccaaaaacatcctggatgttgcacggcagcttaacgatgcccattaactggtttgtggggcacagatgcctgggttgctgctgtccagtgcctacatcccgggcctcagtgccccattctcactgctatctggggagtgattaccccgggagactgaactgcagggttcaagccttccagggatttgcctcaccttggggccttgatgactgccttgcctcctcagtatgtgggggcttcatctctttagagaagtccaagcaacagcctttgaatgtaaccaatcctactaataaaccagttctgaaggt

SEQ ID NO: 25964 - DNA, 881 bp, Homo sapiens
ctcagtgtcctggttactgcagcggcagcaacagcaggtcctactatcgcctccctctagtctctgcttctctggatccctgaggagggcagaagtgattctggttcttggacaaggtgttgaggaacactagaaacagaggggactgtgacctggggactttttctgcaggaagaaaacagcccaaagatgagagtgattcgcgtgggtacccgcaagagccagcttgctcgcatacagacggacagtgtggtggcaacattgaaagcctcgtaccctggcctgcagtttgaaatcattgctatgtccaccacaggggacaagattcttgatactgcactctctaagattggagagaaaagcctgtttaccaaggagcttgaacatgccctggagaagaatgaagtggacctggttgttcactccttgaaggacctgcccactgtgcttcctcctggcttcaccatcggagccatctgcaagcgggaaaaccctcatgatgctgttgtctttcacccaaaatttgttgggaagaccctagaaaccctgccagagaagagtgtggtgggaaccagctccctgcgaagagcagcccagctgcagagaaagttcccgcatctggagttcaggagtattcggggaaacctcaacacccggcttcggaagctggacgagcagcaggagttcagtgccatcatcctggcaacagctggcctgcagcgcatgggctggcacaaccgggtggggcagatcctgcaccctgaggaatgcatgtatgctgtgggccaggtacaccttgaccagggaagccatatggtggacatttgctttccctttgttctcaaccagaagcttgtctcacaactctgaattgtttcccg

SEQ ID NO: 25965 - DNA, 1427 bp, Homo sapiens
ggcacgagggtgacgcgaggctctgcggagaccaggagtcagactgtaggacgacctcgggtcccacgtgtccccggtactcgccggccggagcccccggcttcccggggccgggggaccttagcggcacccacacacagcctactttccaagcggagccatgtctggtaacggcaatgcggctgcaacggcggtgagtgctgagccggtgaccagcacactttgggcttctggacgagccgtgcagcgattggccccaggttgccatcctcagtcgtctattgcttgctcgcatacagacggacagtgtggtggcaacattgaaagcctcgtaccctggcctgcagtttgaaatcattgctatgtccaccacaggggacaagattcttgatactgcactctctaagattggagagaaaagcctgtttaccaaggagcttgaacatgccctggagaagaatgaagtggacctggttgttcactccttgaaggacctgcccactgtgcttcctcctggcttcaccatcggagccatctgcaagcgggaaaaccctcatgatgctgttgtctttcacccaaaatttgttgggaagaccctagaaaccctgccagagaagagtgtggtgggaaccagctccctgcgaagagcagcccagctgcagagaaagttcccgcatctggagttcaggagtattcggggaaacctcaacacccggcttcggaagctggacgagcagcaggagttcagtgccatcatcctggcaacagctggcctgcagcgcatgggctggcacaaccgggtggggcagatcctgcaccctgaggaatgcatgtatgctgtgggccaggaaggaggctgcagtgtgccagtagccgtgcatacagctatgaaggatgggcaactgtacctgactggaggagtctggagtctagacggctcagatagcatacaagagaccatgcaggctaccatccatgtccctgcccagcatgaagatggccctgaggatgacccacagttggtaggcatcactgctcgtaacattccacgagggccccagttggctgcccagaacttgggcatcagcctggccaacttgttgctgagcaaaggagccaaaaacatcctggatgttgcacggcagcttaacgatgcccattaactggtttgtggggcacagatgcctgggttgctgctgtccagtgcctacatcccgggcctcagtgccccattctcactgctatctggggagtgattaccccgggagactgaactgcagggttcaagccttccagggatttgcctcaccttggggccttgatgactgccttgcctcctcagtatgtgggggcttcatctctttagagaagtccaagcaacagcctttgaatgtaaccaatcctactaataaaccagttctgaaggt

SEQ ID NO: 25966 - DNA, 1347 bp, Homo sapiens
ggcacgagggtgacgcgaggctctgcggagaccaggagtcagactgtaggacgacctcgggtcccacgtgtccccggtactcgccggccggagcccccggcttcccggggccgggggaccttagcggcacccacacacagcctactttccaagcggagccatgtctggtaacggcaatgcggctgcaacggcggaagaaaacagcccaaagatgagagtgattcgcgtgggtacccgcaagagccagcttgctcgcatacagacggacagtgtggtggcaacattgaaagcctcgtaccctggcctgcagtttgaaatcattgctatgtccaccacaggggacaagattcttgatactgcactctctaagattggagagaaaagcctgtttaccaaggagcttgaacatgccctggagaagaatgacttcctcctggcttcaccatcggagccatctgcaagcgggaaaaccctcatgatgctgttgtctttcacccaaaatttgttgggaagaccctagaaaccctgccagagaagagtgtggtgggaaccagctccctgcgaagagcagcccagctgcagagaaagttcccgcatctggagttcaggagtattcggggaaacctcaacacccggcttcggaagctggacgagcagcaggagttcagtgccatcatcctggcaacagctggcctgcagcgcatgggctggcacaaccgggtggggcagatcctgcaccctgaggaatgcatgtatgctgtgggccaggaaggaggctgcagtgtgccagtagccgtgcatacagctatgaaggatgggcaactgtacctgactggaggagtctggagtctagacggctcagatagcatacaagagaccatgcaggctaccatccatgtccctgcccagcatgaagatggccctgaggatgacccacagttggtaggcatcactgctcgtaacattccacgagggccccagttggctgcccagaacttgggcatcagcctggccaacttgttgctgagcaaaggagccaaaaacatcctggatgttgcacggcagcttaacgatgcccattaactggtttgtggggcacagatgcctgggttgctgctgtccagtgcctacatcccgggcctcagtgccccattctcactgctatctggggagtgattaccccgggagactgaactgcagggttcaagccttccagggatttgcctcaccttggggccttgatgactgccttgcctcctcagtatgtgggggcttcatctctttagagaagtccaagcaacagcctttgaatgtaaccaatcctactaataaaccagttctgaaggt

SEQ ID NO: 25967 - DNA, 1456 bp, Homo sapiens
ggcacgagggtgacgcgaggctctgcggagaccaggagtcagactgtaggacgacctcgggtcccacgtgtccccggtactcgccggccggagcccccggcttcccggggccgggggaccttagcggcacccacacacagcctactttccaagcggagccatgtctggtaacggcaatgcggctgcaacggcgcttgctcgcatacagacggacagtgtggtggcaacattgaaagcctcgtaccctggcctgcagtttgaaatcattgctatgtccaccacaggggacaagattcttgatactgcactctctaagattggagagaaaagcctgtttaccaaggagcttgaacatgccctggagaagaatgaagtggacctggttgttcactccttgaaggacctgcccactgtgcttcctcctggcttcaccatcggagccatctgcaagcgggaaaaccctcatgatgctgttgtctttcacccaaaatttgttgggaagaccctagaaaccctgccagagaagagtgtggtgggaaccagctccctgcgaagagcagcccagctgcagagaaagttcccgcatctggagttcaggagtattcggggaaacctcaacacccggcttcggaagctggacgagcagcaggagttcagtgccatcatcctggcaacagctggcctgcagcgcatgggctggcacaaccgggtggggcagatcctgcaccctgaggaatgcatgtatgctgtgggccagggggccttgggcgtggaagtgcgagccaaggaccaggacatcttggatctggtgggtgtgctgcacgatcccgagactctgcttcgctgcatcgctgaaagggccttcctgaggcacctggaaggaggctgcagtgtgccagtagccgtgcatacagctatgaaggatgggcaactgtacctgactggaggagtctggagtctagacggctcagatagcatacaagagaccatgcaggctaccatccatgtccctgcccagcatgaagatggccctgaggatgacccacagttggtaggcatcactgctcgtaacattccacgagggccccagttggctgcccagaacttgggcatcagcctggccaacttgttgctgagcaaaggagccaaaaacatcctggatgttgcacggcagcttaacgatgcccattaactggtttgtggggcacagatgcctgggttgctgctgtccagtgcctacatcccgggcctcagtgccccattctcactgctatctggggagtgattaccccgggagactgaactgcagggttcaagccttccagggatttgcctcaccttggggccttgatgactgccttgcctcctcagtatgtgggggcttcatctctttagagaagtccaagcaacagcctttgaatgtaaccaatcctactaataaaccagttctgaaggt

SEQ ID NO: 25968 - DNA, 1593 bp, Homo sapiens
ggcacgagggtgacgcgaggctctgcggagaccaggagtcagactgtaggacgacctcgggtcccacgtgtccccggtactcgccggccggagcccccggcttcccggggccgggggaccttagcggcacccacacacagcctactttccaagcggagccatgtctggtaacggcaatgcggctgcaacggcgtcattccagagccctggactaggagtaggaagatctgaattgtggccccaactctctttcggttattagctctgtgaccctaggaagaaaacagcccaaagatgagagtgattcgcgtgggtacccgcaagagccagcttgctcgcatacagacggacagtgtggtggcaacattgaaagcctcgtaccctggcctgcagtttgaaatcattgctatgtccaccacaggggacaagattcttgatactgcactctctaagattggagagaaaagcctgtttaccaaggagcttgaacatgccctggagaagaatgaagtggacctggttgttcactccttgaaggacctgcccactgtgcttcctcctggcttcaccatcggagccatctgcaagcgggaaaaccctcatgatgctgttgtctttcacccaaaatttgttgggaagaccctagaaaccctgccagagaagagtgtggtgggaaccagctccctgcgaagagcagcccagctgcagagaaagttcccgcatctggagttcaggagtattcggggaaacctcaacacccggcttcggaagctggacgagcagcaggagttcagtgccatcatcctggcaacagctggcctgcagcgcatgggctggcacaaccgggtggggcagatcctgcaccctgaggaatgcatgtatgctgtgggccagggggccttgggcgtggaagtgcgagccaaggaccaggacatcttggatctggtgggtgtgctgcacgatcccgagactctgcttcgctgcatcgctgaaagggccttcctgaggcacctggaaggaggctgcagtgtgccagtagccgtgcatacagctatgaaggatgggcaactgtacctgactggaggagtctggagtctagacggctcagatagcatacaagagaccatgcaggctaccatccatgtccctgcccagcatgaagatggccctgaggatgacccacagttggtaggcatcactgctcgtaacattccacgagggccccagttggctgcccagaacttgggcatcagcctggccaacttgttgctgagcaaaggagccaaaaacatcctggatgttgcacggcagcttaacgatgcccattaactggtttgtggggcacagatgcctgggttgctgctgtccagtgcctacatcccgggcctcagtgccccattctcactgctatctggggagtgattaccccgggagactgaactgcagggttcaagccttccagggatttgcctcaccttggggccttgatgactgccttgcctcctcagtatgtgggggcttcatctctttagagaagtccaagcaacagcctttgaatgtaaccaatcctactaataaaccagttctgaaggt

SEQ ID NO: 25969 - DNA, 309 bp, Homo sapiens
ggttttctagatgagcagtctcttaagcagtttctctgtttaagaggacttgggtaccttaagcagagctgatgctctatttcatgttctaagacacttttttggggttgtgttttaatgtatccaaaattgagatctgattcacagttgatgtggtgggaaggcattgtatcaaagtttaaatggccacatttttttcatttcttggtggtccataaaataatgacatattttataaattaaaggcagctgatatttgatgaaatctgatagatcactttcagaacaggctgcagagatcatttctat

SEQ ID NO: 25970 - DNA, 1058 bp, Homo sapiens
aaaagcaaaatctgagcaggcttccgaggtttcctatgcaggagtgattggggcagatgtgagagggcacggcctcatctgtgaggggcagccagtgacgtcacggctggctgtcatctgtggaacgtcttcttgtcacatggggatcagcaaagacccgatttttgtaccaggcgtctgggggccttatttctcagccatggtacctgggttctggctgaatgaaggtggtcagagcgttactggaaaattgatagaccacatggtacaaggccatgctgcttttccagaactacaagtaaaggccacagccagatgccagagtatatatgcatatttgaacagtcacctggatctgattaagaaggctcagcctgtgggtttccttactgttgatttacatgtttggccagatttccatggcaaccggtctcccttagcagatctgacactaaagggcatggtcaccggattgaaactgtctcaggaccttgatgatcttgccattctctacctggccacagttcaagccattgctttggggactcgcttcattatagaagccatggaggcagcagggcactcaatcagtactcttttcctatgtggaggcctcagcaagaatcccctttttgtgcaaatgcatgcggacattactggcatgcctgtggtcctgtcgcaagaggtggagtccgttcttgtgggtgctgctgttctgggtgcctgtgcctcaggggatttcgcttctgtacaggaagcaatggcaaaaatgagcaaagttgggaaagttgtgttcccgagactacaggataaaaaatactatgataagaaataccaagtattcctgaagctggttgaacaccagaaggagtatttggcgatcatgaatgatgactgaacagggcttgcaggtgctgatgccagaagcttctgtgccattgcattaaagacttctgtcatttgatccatgttcaagacccttgaggtattgtttcatcatttctgtattgtctttcaataaagaaaaaacaaacatgtgcaaccagaattaaagtctt

SEQ ID NO: 25971 - DNA, 361 bp, Homo sapiens
  misc_feature (19)..(19): n is a, c, g, or t
tttatttttttatattttnaaagtaagattgtgcgttcgtgtaaaagattatgctcggaagcaatggcaaaaatgagcaaagttgggaaagttgtgttcccgagactacaggataaaaaatactatgataagaaataccaagtattcctgaagctggttgaacaccagaaggagtatttggcgatcatgaatgatgactgaacagggcttgcaggtgctgatgccagaagcttctgtgccattgcattaaagacttctgtcatttgatccatgttcaagacccttgaggtattgtttcatcatttctgtattgtctttcaataaagaaaaaacaaacatgtgcaaccagaattaaagtctt

SEQ ID NO: 25972 - DNA, 355 bp, Homo sapiens
taagtaaggtgacttgacgaattaacaacaaaaacaaaaggctcgagtgaggaagcaatggcaaaaatgagcaaagttgggaaagttgtgttcccgagactacaggataaaaaatactatgataagaaataccaagtattcctgaagctggttgaacaccagaaggagtatttggcgatcatgaatgatgactgaacagggcttgcaggtgctgatgccagaagcttctgtgccattgcattaaagacttctgtcatttgatccatgttcaagacccttgaggtattgtttcatcatttctgtattgtctttcaataaagaaaaaacaaacatgtgcaaccagaattaaagtctt

SEQ ID NO: 25973 - DNA, 241 bp, Homo sapiens
  misc_feature (16)..(16): n is a, c, g, or t
tcgtcagcaggatctnaataaatgttggtcattgatgcccatgcaggaggactaggtaatctcttatttgttgcctacagccaaaaccgtattcaaatggaatattccctagaaccgaagacactccttttctgtttttaaaacaaaggtcaaggactttggtgtttcaggatataataatgaaaagcccttttacagctaggcatttggatagaattacagaacttttcatcaatgacca

SEQ ID NO: 25974 - DNA, 1182 bp, Homo sapiens
ggccagtctttcccatgctgttctcgtgatagtaagtctcacaagatctgatgggtttatcaggcttttctgcgttgcttcttcctcattctttcttgctgccaccatgtaagaagtgcctttgccctccaccatgattatgagacctcccagccgtgtggaactgagtgattggggcagatgtgagagggcacggcctcatctgtgaggggcagccagtgacgtcacggctggctgtcatctgtggaacgtcttcttgtcacatggggatcagcaaagacccgatttttgtaccaggcgtctgggggccttatttctcagccatggtacctgggttctggctgaatgaaggtggtcagagcgttactggaaaattgatagaccacatggtacaaggccatgctgcttttccagaactacaagtaaaggccacagccagatgccagagtatatatgcatatttgaacagtcacctggatctgattaagaaggctcagcctgtgggtttccttactgttgatttacatgtttggccagatttccatggcaaccggtctcccttagcagatctgacactaaagggcatggtcaccggattgaaactgtctcaggaccttgatgatcttgccattctctacctggccacagttcaagccattgctttggggactcgcttcattatagaagccatggaggcagcagggcactcaatcagtactcttttcctatgtggaggcctcagcaagaatcccctttttgtgcaaatgcatgcggacattactggcatgcctgtggtcctgtcgcaagaggtggagtccgttcttgtgggtgctgctgttctgggtgcctgtgcctcaggggatttcgcttctgtacaggaagcaatggcaaaaatgagcaaagttgggaaagttgtgttcccgagactacaggataaaaaatactatgataagaaataccaagtattcctgaagctggttgaacaccagaaggagtatttggcgatcatgaatgatgactgaacagggcttgcaggtgctgatgccagaagcttctgtgccattgcattaaagacttctgtcatttgatccatgttcaagacccttgaggtattgtttcatcatttctgtattgtctttcaataaagaaaaaacaaacatgtgcaaccagaattaaagtctt

SEQ ID NO: 25975 - DNA, 1208 bp, Homo sapiens
  misc_feature (1156)..(1156): n is a, c, g, or t
ggccagtctttcccatgctgttctcgtgatagtaagtctcacaagatctgatgggtttatcaggcttttctgcgttgcttcttcctcattctttcttgctgccaccatgtaagaagtgcctttgccctccaccatgattatgagacctcccagccgtgtggaactgagtgattggggcagatgtgagagggcacggcctcatctgtgaggggcagccagtgacgtcacggctggctgtcatctgtggaacgtcttcttgtcacatggggatcagcaaagacccgatttttgtaccaggcgtctgggggccttatttctcagccatggtacctgggttctggctgaatgaaggtggtcagagcgttactggaaaattgatagaccacatggtacaaggccatgctgcttttccagaactacaagtaaaggccacagccagatgccagagtatatatgcatatttgaacagtcacctggatctgattaagaaggctcagcctgtgggtttccttactgttgatttacatgtttggccagatttccatggcaaccggtctcccttagcagatctgacactaaagggcatggtcaccggattgaaactgtctcaggaccttgatgatcttgccattctctacctggccacagttcaagccattgctttggggactcgcttcattatagaagccatggaggcagcagggcactcaatcagtactcttttcctatgtggaggcctcagcaagaatcccctttttgtgcaaatgcatgcggacattactggcatgcctgtggtcctgtcgcaagaggtggagtccgttcttgtgggtgctgctgttctgggtgcctgtgcctcaggggatttcgcttctgtacaggaagcaatggcaaaaatgagcaaagttgggaaagttgtgttcccgagactacaggataaaaaatactatgataagaaataccaagtattcctgaagctggttgaacaccagaaggagtatttggcgatcatgaatgatgactgaacagggcttgcaggtgctgatgccagaagcttctgtgccattgcattaaagacttctgtcatttgatccatgttcaagacccttgaggtattgtttcatcatttctgtattgtctttcaataaagaaaaaacgntgcggccgaagcccccttcctccgtcaattggcccagtattaggaggcagag

SEQ ID NO: 25976 - DNA, 1679 bp, Homo sapiens
cgcacgcccagaaagaggcttctccaacccggcccggcccttccttcccctttcccgcagtcgttgcctcctcctcccctgcctcctcctccccttcctcctcctggccgcttagtctcacacccgccgggccgttgttcccgagacgttgttgagtcccctgtgtcctcttctgggggattcccatcgaaacgtcatcatgtggctggaccatcgagcagtcagtcaagttaacaggatcaatgagaccaagcacagtgtcctccagtacgtcgggggggtgatgtctgtggaaatgcaggccccgaaacttctgtggctgaaagagaacttgagagagatttgctgggataaggcgggacatttctttgatctcccggacttcttatcgtggaaggcaacaggtgtcacagcacggtctctctgctccctggtgtgtaagtggacatattcagcagagaaaggctgggacgacagtttctggaaaatgattggtttggaagactttgttgcagataattacagcaaaataggaaaccaagtgctacctcctggagcttctcttggaaatgggctcacaccagaggcagcaagagaccttggccttctccctgggattgcggtcgcagcttcactcattgatgcccatgcaggaggactaggagtgattggggcagatgtgagagggcacggcctcatctgtgaggggcagccagtgacgtcacggctggctgtcatctgtggaacgtcttcttgtcacatggggatcagcaaagacccgatttttgtaccaggcgtctgggggccttatttctcagccatggtacctgggttctggctgaatgaaggtggtcagagcgttactggaaaattgatagaccacatggtacaaggccatgctgcttttccagaactacaagtaaaggccacagccagatgccagagtatatatgcatatttgaacagtcacctggatctgattaagaaggctcagcctgtgggtttccttactgttgatttacatgtttggccagatttccatggcaaccggtctcccttagcagatctgacactaaagggcatggtcaccggattgaaactgtctcaggaccttgatgatcttgccattctctacctggccacagttcaagccattgctttggggactcgcttcattatagaagccatggaggcagcagggcactcaatcagtactcttttcctatgtggaggcctcagcaagaatcccctttttgtgcaaatgcatgcggacattactggcatgcctgtggtcctgtcgcaagaggtggagtccgttcttgtgggtgctgctgttctgggtgcctgtgcctcaggggatttcgcttctgtacaggaagcaatggcaaaaatgagcaaagttgggaaagttgtgttcccgagactacaggataaaaaatactatgataagaaataccaagtattcctgaagctggttgaacaccagaaggagtatttggcgatcatgaatgatgactgaacagggcttgcaggtgctgatgccagaagcttctgtgccattgcattaaagacttctgtcatttgatccatgttcaagacccttgaggtattgtttcatcatttctgtattgtctttcaataaagaaaaaacaaacatgtgcaaccagaattaaagtctt

SEQ ID NO: 25977 - DNA, 1207 bp, Homo sapiens
ggccagtctttcccatgctgttctcgtgatagtaagtctcacaagatctgatgggtttatcaggcttttctgcgttgcttcttcctcattctttcttgctgccaccatgtaagaagtgcctttgccctccaccatgattatgagacctcccagccgtgtggaactgagtgattggggcagatgtgagagggcacggcctcatctgtgaggggcagccagtgacgtcacggctggctgtcatctgtggaacgtcttcttgtcacatggggatcagcaaagacccgatttttgtaccaggcgtctgggggccttatttctcagccatggtacctgggttctggctgaatgaaggtggtcagagcgttactggaaaattgatagaccacatggtacaaggccatgctgcttttccagaactacaagtaaaggccacagccagatgccagagtatatatgcatatttgaacagtcacctggatctgattaagaaggctcagcctgtgggtttccttactgttgatttacatgtttggccagatttccatggcaaccggtctcccttagcagatctgacactaaagggcatggtcaccggattgaaactgtctcaggaccttgatgatcttgccattctctacctggccacagttcaagccattgctttggggactcgcttcattatagaagccatggaggcagcagggcactcaatcagtactcttttcctatgtggaggcctcagcaagaatcccctttttgtgcaaatgcatgcggacattactggcatgcctgtggtcctgtcgcaagaggtggagtccgttcttgtgggtgctgctgttctgggtgcctgtgcctcaggggatttcgcttctgtacaggaagcaatggcaaaaatgagcaaagttgggaaagttgtgttcccgagactacaggataaaaaatactatgataagaaataccaagtattcctgaagctggttgaacaccagaaggagtatttggcgatcatgaatgatgactgaacagggcttgcaggtgctgatgccagaagcttctgtgccattgcattaaagacttctgtcatttgatccatgttcaagacccttgaggtattgtttcatcatttctgtattgtctttcaataaagaaagatgcgccccgcctactctcatatacaaacctactattctgtcatggcgagaagtgt

SEQ ID NO: 25978 - DNA, 1208 bp, Homo sapiens
ggccagtctttcccatgctgttctcgtgatagtaagtctcacaagatctgatgggtttatcaggcttttctgcgttgcttcttcctcattctttcttgctgccaccatgtaagaagtgcctttgccctccaccatgattatgagacctcccagccgtgtggaactgagtgattggggcagatgtgagagggcacggcctcatctgtgaggggcagccagtgacgtcacggctggctgtcatctgtggaacgtcttcttgtcacatggggatcagcaaagacccgatttttgtaccaggcgtctgggggccttatttctcagccatggtacctgggttctggctgaatgaaggtggtcagagcgttactggaaaattgatagaccacatggtacaaggccatgctgcttttccagaactacaagtaaaggccacagccagatgccagagtatatatgcatatttgaacagtcacctggatctgattaagaaggctcagcctgtgggtttccttactgttgatttacatgtttggccagatttccatggcaaccggtctcccttagcagatctgacactaaagggcatggtcaccggattgaaactgtctcaggaccttgatgatcttgccattctctacctggccacagttcaagccattgctttggggactcgcttcattatagaagccatggaggcagcagggcactcaatcagtactcttttcctatgtggaggcctcagcaagaatcccctttttgtgcaaatgcatgcggacattactggcatgcctgtggtcctgtcgcaagaggtggagtccgttcttgtgggtgctgctgttctgggtgcctgtgcctcaggggatttcgcttctgtacaggaagcaatggcaaaaatgagcaaagttgggaaagttgtgttcccgagactacaggataaaaaatactatgataagaaataccaagtattcctgaagctggttgaacaccagaaggagtatttggcgatcatgaatgatgactgaacagggcttgcaggtgctgatgccagaagcttctgtgccattgcattaaagacttctgtcatttgatccatgttcaagacccttgaggtattgtttcatcatttctgtattgtctttcaataaagaaagatgtcggccgaaactctctaccccaccaaaatcattatttaacgcatgggcaacact

SEQ ID NO: 25979 - DNA, 1015 bp, Homo sapiens
gaagtgccttttgctcttcgccatgattatgagacctccccagccatgtggaactgagtgattggggcagatgtgagagggcacggcctcatctgtgaggggcagccagtgacgtcacggctggctgtcatctgtggaacgtcttcttgtcacatggggatcagcaaagacccgatttttgtaccaggcgtctgggggccttatttctcagccatggtacctgggttctggctgaatgaaggtggtcagagcgttactggggccacagccagatgccagagtatatatgcatatttgaacagtcacctggatctgattaagaaggctcagcctgtgggtttccttactgttgatttacatgtttggccagatttccatggcaaccggtctcccttagcagatctgacactaaagggcatggtcaccggattgaaactgtctcaggaccttgatgatcttgccattctctacctggccacagttcaagccattgctttggggactcgcttcattatagaagccatggaggcagcagggcactcaatcagtactcttttcctatgtggaggcctcagcaagaatcccctttttgtgcaaatgcatgcggacattactggcatgcctgtggtcctgtcgcaagaggtggagtccgttcttgtgggtgctgctgttctgggtgcctgtgcctcaggggatttcgcttctgtacaggaagcaatggcaaaaatgagcaaagttgggaaagttgtgttcccgagactacaggataaaaaatactatgataagaaataccaagtattcctgaagctggttgaacaccagaaggagtatttggcgatcatgaatgatgactgaacagggcttgcaggtgctgatgccagaagcttctgtgccattgcattaaagacttctgtcatttgatccatgttcaagacccttgaggtattgtttcatcatttctgtattgtctttcaataaagaaaaaacaaacatgtgcaaccagaattaaagtctt

SEQ ID NO: 25980 - DNA, 1206 bp, Homo sapiens
  misc_feature (15)..(15): n is a, c, g, or t
  misc_feature (63)..(63): n is a, c, g, or t
  misc_feature (79)..(79): n is a, c, g, or t
ggggggggggtttanaggggggggggtttaaaggggggggggtttagaggggggggggtttanaggggggggggtttanagggggggggggggggggggggggatgggggggaaggggggggtgtagggggggggggaggggggtggtgaggcgccgtggggttcggcgcggctacgtgcagaatccgtctagctaaaatgtaatttcagattggacaagtactgtggaggaactgcaatgtctggtggagaacagaaaccagagaggtactatgtgggtgtggacgttggaacaggcagtgtccgtgcagctctggtggaccagagtggggtcctgttggcttttgcagaccagccaattaagaattgggagccccagttcaaccaccatgagcagtcctccgaggacatctgggctgcgtgctgtgttgtcacaaagaaagttgtacaagggattgatttaaaccaaattcgaggacttgggtttgatgccacgtgttctctggttgttttggataagcagtttcacccattaccagtcaaccaggaaggggattcccatcgaaacgtcatcatgtggctggaccatcgagcagtcagtcaagttaacaggatcaatgagaccaagcacagtgtcctccagtacgtcgggggggtgatgtctgtggaaatgcaggccccgaaacttctgtggctgaaagagaacttgagagagatttgctgggataaggcgggacatttctttgatctcccggacttcttatcgtggaaggcaacaggtgtcacagcacgggaactctctgctccctggtgttgtaacgtggacattattcagcagagcataggctgggacccacagaaactggcagaactgattcggctgggacagacttcgcttgcacattaatttccggggaaaagtagggaaacccaacgttgctagccttcctggaggacgtaccacttggcacaatggggctccgtgcgcgtcacggtaggcatgcaggacctgtggccttcctcccctgtcgaattgcgggtccgcacgtttcacctcatttggatgccgccattccgcgcggtccttggagctgcatctggcggcccccatcttccgacggccccggccctactcgtgtctcgggtgccttcccgcttcccttcccggttgggcctccccctgtcgccgcgccctctgtgcccacg

SEQ ID NO: 25981 - DNA, 739 bp, Homo sapiens
tgggaatccataattgttcccttgaattagaaggaagagaatgtgtgtccatctgcatctccctctcgtttctgctaggggattcccatcgaaacgtcatcatgtggctggaccatcgagcagtcagtcaagttaacaggatcaatgagaccaagcacagtgtcctccagtacgtcgggggggtgatgtctgtggaaatgcaggccccgaaacttctgtggctgaaagaggtgagtgcatagggtctaagagaagataccaacaatagtagaggattcctgttactgtggacctgtaggtaccaggcaccctgctaaaatcggttatgtttgatttttcccagcaactaggaggaaggttgatcccattttattgattacagtgtagttaaatcacacctgtttttatgtgcctaactcatactaggcactgtgacaagtattgtacacattatctctttgaaggccaacgaccctatgaagtgtttgtgtgtggtgtttattttagggtgtctgttttgtagacaagaaaacgaatgttcatagagataaaacaactcactcaaagtgacaaagtaaatatgtgacagaaccagaatttgaacctaagactggctgactccaaaatcatttttttttaattttaaaatgtttcttttgtagagacttggtctcactattttggccaggctgatttcgaactcctggccttatgtgatcctgcaaaagtgatatgatta

SEQ ID NO: 25982 - DNA, 271 bp, Homo sapiens
agggaagccctgtggcagttttgtcttgagatcattcaacatatttatatttctcccacagatactatgataagaaataccaagtattcctgaagctggttgaacaccagaaggagtatttggcgatcatgaatgatgactgaacagggcttgcaggtgctgatgccagaagcttctgtgccattgcattaaagacttctgtcatttgatccatgttcaagacccttgaggtattgtttcatcatttctgtattgtctttcaataaagaaa

SEQ ID NO: 25983 - DNA, 2006 bp, Homo sapiens
cgcacgcccagaaagaggcttctccaacccggcccggcccttccttcccctttcccgcagtcgttgcctcctcctcccctgcctcctcctccccttcctcctcctggccgcttagtctcacacccgccgggccgttgttcccgagacgttgttgagtcccctgtgtcctcttctgggtggaggaactgcaatgtctggtggagaacagaaaccagagaggtactatgtgggtgtggacgttggaacaggcagtgtccgtgcagctctggtggaccagagtggggtcctgttggcttttgcagaccagccaattaagaattgggagccccagttcaaccaccatgagcagtcctccgaggacatctgggctgcgtgctgtgttgtcacaaagaaagttgtacaagggattgatttaaaccaaattcgaggacttgggtttgatgccacgtgttctctggttgttttggataagcagtttcacccattaccagtcaaccaggaaggggattcccatcgaaacgtcatcatgtggctggaccatcgagcagtcagtcaagttaacaggatcaatgagaccaagcacagtgtcctccagtacgtcgggggggtgatgtctgtggaaatgcaggccccgaaacttctgtggctgaaagagaacttgagagagatttgctgggataaggcgggacatttctttgatctcccggacttcttatcgtggaaggcaacaggtgtcacagcacggtctctctgctccctggtgtgtaagtggacatattcagcagagaaaggctgggacgacagtttctggaaaatgattggtttggaagactttgttgcagataattacagcaaaataggaaaccaagtgctacctcctggagcttctcttggaaatgggctcacaccagaggcagcaagagaccttggccttctccctgggattgcggtcgcagcttcactcattgatgcccatgcaggaggactaggagtgattggggcagatgtgagagggcacggcctcatctgtgaggggcagccagtgacgtcacggctggctgtcatctgtggaacgtcttcttgtcacatggggatcagcaaagacccgatttttgtaccaggcgtctgggggccttatttctcagccatggtacctgggttctggctgaatgaaggtggtcagagcgttactggaaaattgatagaccacatggtacaaggccatgctgcttttccagaactacaagtaaaggccacagccagatgccagagtatatatgcatatttgaacagtcacctggatctgattaagaaggctcagcctgtgggtttccttactgttgatttacatgtttggccagatttccatggcaaccggtctcccttagcagatctgacactaaagggcatggtcaccggattgaaactgtctcaggaccttgatgatcttgccattctctacctggccacagttcaagccattgctttggggactcgcttcattatagaagccatggaggcagcagggcactcaatcagtactcttttcctatgtggaggcctcagcaagaatcccctttttgtgcaaatgcatgcggacattactggcatgcctgtggtcctgtcgcaagaggtggagtccgttcttgtgggtgctgctgttctgggtgcctgtgcctcaggggatttcgcttctgtacaggaagcaatggcaaaaatgagcaaagttgggaaagttgtgttcccgagactacaggataaaaaatactatgataagaaataccaagtattcctgaagctggttgaacaccagaaggagtatttggcgatcatgaatgatgactgaacagggcttgcaggtgctgatgccagaagcttctgtgccattgcattaaagacttctgtcatttgatccatgttcaagacccttgaggtattgtttcatcatttctgtattgtctttcaataaagaaaaaacaaacatgtgcaaccagaattaaagtctt

SEQ ID NO: 25984 - DNA, 1956 bp, Homo sapiens
cgcacgcccagaaagaggcttctccaacccggcccggcccttccttcccctttcccgcagtcgttgcctcctcctcccctgcctcctcctccccttcctcctcctggccgcttagtctcacacccgccgggccgttgttcccgagacgttgttgagtcccctgtgtcctcttctgggtggaggaactgcaatgtctggtggagaacagaaaccagagaggtactatgtgggtgtggacgttggaacaggcagtgtccgtgcagctctggtggaccagagtggggtcctgttggcttttgcagaccagccaattaagaattgggagccccagttcaaccaccatgagcagtcctccgaggacatctgggctgcgtgctgtgttgtcacaaaggggattcccatcgaaacgtcatcatgtggctggaccatcgagcagtcagtcaagttaacaggatcaatgagaccaagcacagtgtcctccagtacgtcgggggggtgatgtctgtggaaatgcaggccccgaaacttctgtggctgaaagagaacttgagagagatttgctgggataaggcgggacatttctttgatctcccggacttcttatcgtggaaggcaacaggtgtcacagcacggtctctctgctccctggtgtgtaagtggacatattcagcagagaaaggctgggacgacagtttctggaaaatgattggtttggaagactttgttgcagataattacagcaaaataggaaaccaagtgctacctcctggagcttctcttggaaatgggctcacaccagaggcagcaagagaccttggccttctccctgggattgcggtcgcagcttcactcattgatgcccatgcaggaggactaggagtgattggggcagatgtgagagggcacggcctcatctgtgaggggcagccagtgacgtcacggctggctgtcatctgtggaacgtcttcttgtcacatggggatcagcaaagacccgatttttgtaccaggcgtctgggggccttatttctcagccatggtacctgggttctggctgaatgaaggtggtcagagcgttactggaaaattgatagaccacatggtacaaggccatgctgcttttccagaactacaagtaaaggccacagccaggtaactgctgtctctgttccctctaaaattttccttgtgtgactgtattgagagaattcacgttgggcagttgggtgattttcagatcctacagacaatgaaaatgcctgttagtgcttgaaagatagtcacctggatgatccagaagatagatgtattaattctttaaatgaggtaagagaacttagagaacctagagataccccaagaatatacccagggactatagataagaaactctgatgtagaagaaggaccatggattctggagtcaaaacttcttagtttcacatcccagccatactccttaatagatacaggaccttgagctagttacttaacctctttatgcctgtctcttcatctgtaaaactgaagataataactgatatggagtgatttctagaatattttgaagcaagctgagtgcaaaaaaaatttacgatatactccctttcatgtaaaaagaaagacataggaaaatacatgtgtatctgttcatttttgcaaaagaaatataggaagtggccaggtgcggtggctcactcctgtaaccccagcaccttgggaggccgaggcgggcagatcacgagttcagagatcgagaccagcctggccaacatggtgaaaccccatctctactaaaaatacaaaagttagccgggcatggtgatgtatgcctataatcccagttacttgggaggttgaggcaggagaattgctcaaacccgggaggtggaggttgcagtgagcagagatcgtgccactgcactccagcctgggcaataaagtgagactccgtctc

SEQ ID NO: 25985 - DNA, 2054 bp, Homo sapiens
  misc_feature (15)..(15): n is a, c, g, or t
  misc_feature (63)..(63): n is a, c, g, or t
  misc_feature (79)..(79): n is a, c, g, or t
ggggggggggtttanaggggggggggtttaaaggggggggggtttagaggggggggggtttanaggggggggggtttanagggggggggggggggggggggggatgggggggaaggggggggtgtagggggggggggaggggggtggtgaggcgccgtggggttcggcgcggctacgtgcagaatccgtctagctaaaatgtaatttcagattggacaagtactgtggaggaactgcaatgtctggtggagaacagaaaccagagaggtactatgtgggtgtggacgttggaacaggcagtgtccgtgcagctctggtggaccagagtggggtcctgttggcttttgcagaccagccaattaagaattgggagccccagttcaaccaccatgagcagtcctccgaggacatctgggctgcgtgctgtgttgtcacaaagaaagttgtacaagggattgatttaaaccaaattcgaggacttgggtttgatgccacgtgttctctggttgttttggataagcagtttcacccattaccagtcaaccaggaaggggattcccatcgaaacgtcatcatgtggctggaccatcgagcagtcagtcaagttaacaggatcaatgagaccaagcacagtgtcctccagtacgtcgggggggtgatgtctgtggaaatgcaggccccgaaacttctgtggctgaaagagaacttgagagagatttgctgggataaggcgggacatttctttgatctcccggacttcttatcgtggaaggcaacaggtgtcacagcacggtctctctgctccctggtgtgtaagtggacatattcagcagagaaaggctgggacgacagtttctggaaaatgattggtttggaagactttgttgcagataattacagcaaaataggaaaccaagtgctacctcctggagcttctcttggaaatgggctcacaccagaggcagcaagagaccttggccttctccctgggattgcggtcgcagcttcactcattgatgcccatgcaggaggactaggagtgattggggcagatgtgagagggcacggcctcatctgtgaggggcagccagtgacgtcacggctggctgtcatctgtggaacgtcttcttgtcacatggggatcagcaaagacccgatttttgtaccaggcgtctgggggccttatttctcagccatggtacctgggttctggctgaatgaaggtggtcagagcgttactggaaaattgatagaccacatggtacaaggccatgctgcttttccagaactacaagtaaaggccacagccagatgccagagtatatatgcatatttgaacagtcacctggatctgattaagaaggctcagcctgtgggtttccttactgttgatttacatgtttggccagatttccatggcaaccggtctcccttagcagatctgacactaaagggcatggtcaccggattgaaactgtctcaggaccttgatgatcttgccattctctacctggccacagttcaagccattgctttggggactcgcttcattatagaagccatggaggcagcagggcactcaatcagtactcttttcctatgtggaggcctcagcaagaatcccctttttgtgcaaatgcatgcggacattactggcatgcctgtggtcctgtcgcaagaggtggagtccgttcttgtgggtgctgctgttctgggtgcctgtgcctcaggggatttcgcttctgtacaggaagcaatggcaaaaatgagcaaagttgggaaagttgtgttcccgagactacaggataaaaaatactatgataagaaataccaagtattcctgaagctggttgaacaccagaaggagtatttggcgatcatgaatgatgactgaacagggcttgcaggtgctgatgccagaagcttctgtgccattgcattaaagacttctgtcatttgatccatgttcaagacccttgaggtattgtttcatcatttctgtattgtctttcaataaagaaaaaacaaacatgtgcaaccagaattaaagtctt

SEQ ID NO: 25986 - DNA, 1894 bp, Homo sapiens
cgcacgcccagaaagaggcttctccaacccggcccggcccttccttcccctttcccgcagtcgttgcctcctcctcccctgcctcctcctccccttcctcctcctggccgcttagtctcacacccgccgggccgttgttcccgagacgttgttgagtcccctgtgtcctcttctgggtggaggaactgcaatgtctggtggagaacagaaaccagagaggtactatgtgggtgtggacgttggaacaggcagtgtccgtgcagctctggtggaccagagtggggtcctgttggcttttgcagaccagccaattaagaattgggagccccagttcaaccaccatgagcagtcctccgaggacatctgggctgcgtgctgtgttgtcacaaaggggattcccatcgaaacgtcatcatgtggctggaccatcgagcagtcagtcaagttaacaggatcaatgagaccaagcacagtgtcctccagtacgtcgggggggtgatgtctgtggaaatgcaggccccgaaacttctgtggctgaaagagaacttgagagagatttgctgggataaggcgggacatttctttgatctcccggacttcttatcgtggaaggcaacaggtgtcacagcacggtctctctgctccctggtgtgtaagtggacatattcagcagagaaaggctgggacgacagtttctggaaaatgattggtttggaagactttgttgcagataattacagcaaaataggaaaccaagtgctacctcctggagcttctcttggaaatgggctcacaccagaggcagcaagagaccttggccttctccctgggattgcggtcgcagcttcactcattgatgcccatgcaggaggactaggagtgattggggcagatgtgagagggcacggcctcatctgtgaggggcagccagtgacgtcacggctggctgtcatctgtggaacgtcttcttgtcacatggggatcagcaaagacccgatttttgtaccaggcgtctgggggccttatttctcagccatggtacctgggttctggctgaatgaaggtggtcagagcgttactggaaaattgatagaccacatggtacaaggccatgctgcttttccagaactacaagtaaaggccacagccagatgccagagtatatatgcatatttgaacagtcacctggatctgattaagaaggctcagcctgtgggtttccttactgttgatttacatgtttggccagatttccatggcaaccggtctcccttagcagatctgacactaaagggcatggtcaccggattgaaactgtctcaggaccttgatgatcttgccattctctacctggccacagttcaagccattgctttggggactcgcttcattatagaagccatggaggcagcagggcactcaatcagtactcttttcctatgtggaggcctcagcaagaatcccctttttgtgcaaatgcatgcggacattactggcatgcctgtggtcctgtcgcaagaggtggagtccgttcttgtgggtgctgctgttctgggtgcctgtgcctcaggggatttcgcttctgtacaggaagcaatggcaaaaatgagcaaagttgggaaagttgtgttcccgagactacaggataaaaaatactatgataagaaataccaagtattcctgaagctggttgaacaccagaaggagtatttggcgatcatgaatgatgactgaacagggcttgcaggtgctgatgccagaagcttctgtgccattgcattaaagacttctgtcatttgatccatgttcaagacccttgaggtattgtttcatcatttctgtattgtctttcaataaagaaaaaacaaacatgtgcaaccagaattaaagtctt

SEQ ID NO: 25987 - DNA, 1727 bp, Homo sapiens
  misc_feature (15)..(15): n is a, c, g, or t
  misc_feature (63)..(63): n is a, c, g, or t
  misc_feature (79)..(79): n is a, c, g, or t
ggggggggggtttanaggggggggggtttaaaggggggggggtttagaggggggggggtttanaggggggggggtttanagggggggggggggggggggggggatgggggggaaggggggggtgtagggggggggggaggggggtggtgaggcgccgtggggttcggcgcggctacgtgcagaatccgtctagctaaaatgtaatttcagattggacaagtactgggattcccatcgaaacgtcatcatgtggctggaccatcgagcagtcagtcaagttaacaggatcaatgagaccaagcacagtgtcctccagtacgtcgggggggtgatgtctgtggaaatgcaggccccgaaacttctgtggctgaaagagaacttgagagagatttgctgggataaggcgggacatttctttgatctcccggacttcttatcgtggaaggcaacaggtgtcacagcacggtctctctgctccctggtgtgtaagtggacatattcagcagagaaaggctgggacgacagtttctggaaaatgattggtttggaagactttgttgcagataattacagcaaaataggaaaccaagtgctacctcctggagcttctcttggaaatgggctcacaccagaggcagcaagagaccttggccttctccctgggattgcggtcgcagcttcactcattgatgcccatgcaggaggactaggagtgattggggcagatgtgagagggcacggcctcatctgtgaggggcagccagtgacgtcacggctggctgtcatctgtggaacgtcttcttgtcacatggggatcagcaaagacccgatttttgtaccaggcgtctgggggccttatttctcagccatggtacctgggttctggctgaatgaaggtggtcagagcgttactggaaaattgatagaccacatggtacaaggccatgctgcttttccagaactacaagtaaaggccacagccagatgccagagtatatatgcatatttgaacagtcacctggatctgattaagaaggctcagcctgtgggtttccttactgttgatttacatgtttggccagatttccatggcaaccggtctcccttagcagatctgacactaaagggcatggtcaccggattgaaactgtctcaggaccttgatgatcttgccattctctacctggccacagttcaagccattgctttggggactcgcttcattatagaagccatggaggcagcagggcactcaatcagtactcttttcctatgtggaggcctcagcaagaatcccctttttgtgcaaatgcatgcggacattactggcatgcctgtggtcctgtcgcaagaggtggagtccgttcttgtgggtgctgctgttctgggtgcctgtgcctcaggggatttcgcttctgtacaggaagcaatggcaaaaatgagcaaagttgggaaagttgtgttcccgagactacaggataaaaaatactatgataagaaataccaagtattcctgaagctggttgaacaccagaaggagtatttggcgatcatgaatgatgactgaacagggcttgcaggtgctgatgccagaagcttctgtgccattgcattaaagacttctgtcatttgatccatgttcaagacccttgaggtattgtttcatcatttctgtattgtctttcaataaagaaaaaacaaacatgtgcaaccagaattaaagtctt

SEQ ID NO: 25988 - DNA, 1296 bp, Homo sapiens
ggattttgctctgctgtctccatggaaaagtcaggtctctctgctccctggtgtgtaagtggacatattcagcagagaaaggctgggacgacagtttctggaaaatgattggtttggaagactttgttgcagataattacagcaaaataggaaaccaagtgctacctcctggagcttctcttggaaatgggctcacaccagaggcagcaagagaccttggccttctccctgggattgcggtcgcagcttcactcattgatgcccatgcaggaggactaggagtgattggggcagatgtgagagggcacggcctcatctgtgaggggcagccagtgacgtcacggctggctgtcatctgtggaacgtcttcttgtcacatggggatcagcaaagacccgatttttgtaccaggcgtctgggggccttatttctcagccatggtacctgggttctggctgaatgaaggtggtcagagcgttactggaaaattgatagaccacatggtacaaggccatgctgcttttccagaactacaagtaaaggccacagccagatgccagagtatatatgcatatttgaacagtcacctggatctgattaagaaggctcagcctgtgggtttccttactgttgatttacatgtttggccagatttccatggcaaccggtctcccttagcagatctgacactaaagggcatggtcaccggattgaaactgtctcaggaccttgatgatcttgccattctctacctggccacagttcaagccattgctttggggactcgcttcattatagaagccatggaggcagcagggcactcaatcagtactcttttcctatgtggaggcctcagcaagaatcccctttttgtgcaaatgcatgcggacattactggcatgcctgtggtcctgtcgcaagaggtggagtccgttcttgtgggtgctgctgttctgggtgcctgtgcctcaggggatttcgcttctgtacaggaagcaatggcaaaaatgagcaaagttgggaaagttgtgttcccgagactacaggataaaaaatactatgataagaaataccaagtattcctgaagctggttgaacaccagaaggagtatttggcgatcatgaatgatgactgaacagggcttgcaggtgctgatgccagaagcttctgtgccattgcattaaagacttctgtcatttgatccatgttcaagacccttgaggtattgtttcatcatttctgtattgtctttcaataaagaaaaaacaaacatgtgcaaccagaattaaagtctt

SEQ ID NO: 25989 - DNA, 1911 bp, Homo sapiens
cgcacgcccagaaagaggcttctccaacccggcccggcccttccttcccctttcccgcagtcgttgcctcctcctcccctgcctcctcctccccttcctcctcctggccgcttagtctcacacccgccgggccgttgttcccgagacgttgttgagtcccctgtgtcctcttctgggtggaggaactgcaatgtctggtggagaacagaaaccagagaggtactatgtgggtgtggacgttggaacaggcagtgtccgtgcagctctggtggaccagagtggggtcctgttggcttttgcagaccagccaattaagaattgggagccccagttcaaccaccatgagcagtcctccgaggacatctgggctgcgtgctgtgttgtcacaaagaaagttgtacaagggattgatttaaaccaaattcgaggacttgggtttgatgccacgtgttctctggttgttttggataagcagtttcacccattaccagtcaaccaggaaggggattcccatcgaaacgtcatcatgtggctggaccatcgagcagtcagtcaagttaacaggatcaatgagaccaagcacagtgtcctccagtacgtcgggggggtgatgtctgtggaaatgcaggccccgaaacttctgtggctgaaagagaacttgagagagatttgctgggataaggcgggacatttctttgatctcccggacttcttatcgtggaaggcaacaggtgtcacagcacggtctctctgctccctggtgtgtaagtggacatattcagcagagaaaggctgggacgacagtttctggaaaatgattggtttggaagactttgttgcagataattacagcaaaataggaaaccaagtgctacctcctggagcttctcttggaaatgggctcacaccagaggcagcaagagaccttggccttctccctgggattgcggtcgcagcttcactcattgatgcccatgcaggaggactaggagtgattggggcagatgtgagagggcacggcctcatctgtgaggggcagccagtgacgtcacggctggctgtcatctgtggaacgtcttcttgtcacatggggatcagcaaagacccgatttttgtaccaggcgtctgggggccttatttctcagccatggtacctgggttctggctgaatgaaggtggtcagagcgttactggaaaattgatagaccacatggtacaaggccatgctgcttttccagaactacaagtaaaggccacagccagatgccagagtatatatgcatatttgaacagtcacctggatctgattaagaaggctcagcctgtgggtttccttactgttgatttacatgtttggccagatttccatggcaaccggtctcccttagcagatctgacactaaagggcatggtcaccggattgaaactgtctcaggaccttgatgatcttgccattctctacctggccacagttcaagccattgctttggggactcgcttcattatagaagccatggaggcagcagggcactcaatcagtactcttttcctatgtggaggcctcagcaagaatcccctttttgtgcaaatgcatgcggacattactggaagcaatggcaaaaatgagcaaagttgggaaagttgtgttcccgagactacaggataaaaaatactatgataagaaataccaagtattcctgaagctggttgaacaccagaaggagtatttggcgatcatgaatgatgactgaacagggcttgcaggtgctgatgccagaagcttctgtgccattgcattaaagacttctgtcatttgatccatgttcaagacccttgaggtattgtttcatcatttctgtattgtctttcaataaagaaaaaacaaacatgtgcaaccagaattaaagtctt

SEQ ID NO: 25990 - DNA, 340 bp, Homo sapiens
attttctttgttctgaagtctagttaatctgacattgatatagtctctttctttttgtttaatgtttgggcagtatatcttttttcatttttttgagacagggtctggctgtctcacccagactggagtacagtggtgtgatttcggctcactgcaacctccacctcccacgttcaagtgattctcatgcctcagccttccaagtagctgggattacaggcatgtgccaccaagctcagctaattgttgtatttttagtaaagacaggttttcgccgtgttggccaggctggtctcgaactcctgacctcaagcaatcctcctgccttggcctcccaaaa

SEQ ID NO: 25991 - DNA, 725 bp, Homo sapiens
tcccggctgtccctgcactccgtggcggaaggcggctagagcggctccctctgagctctccgagagattggtcgggacctgaagcgttgaggttaagggcaaggcaaggagcaacgaggagtttttcgttacgttagaaaaatttcgttgcgtgctgaagcgcttttacctgtgttgtatgatttaaccttatgaaaatggacagtattccagttttacaagtgaggaaagaagattaagaaacttgcctccgccaggcgtggtggttcactcctgtaatcccagcactttcggcggcgaggcaggcggatcacttgaggtcaggagttcgagaccagcctggccaacatggtgaaaccccggctctactaaaaatgcaaaaattagccgggcgtagtggcacgcgcctgtaatcccagctactctggaggctgaggcaggagaatcgcttgaacctaggaggcggaggttgcagtgagccgagatcgcgccactacactccagcctgggcgacagcgcgagactccgtctcaaaaaaaagaaacttgccttgagtcctacatatagtttgctgtagtagcagaatttgaactcggaccgactaatggtctacttaataaaatgctatttggattctctataaaattaataatatagaagtaatgttaattatagaaaacttggaaaatattaaattcattcgataaagattgaatatgtagcac

SEQ ID NO: 25992 - DNA, 402 bp, Homo sapiens
ctcaagaccatctggctactattcctctcagagagttaaagcgacttgcccagtagggttaaagctatgtttgaaaccagggttttcctgttttaaaaatccattctcctttcactatcctaggctctagagttctgctgtgaaatacggtggctatttaaatttaaatctaatttattcaagttaactaaaattaacaattcagttcctcactcagactaagtacatttcaagtgtagctagtaacctgctgatgtggacagctcagatacaggaagttttcatcacctcagcaagttttattgaacaggcattttctagagtttccagagtaattctcttgctatgaatctctttgtatattagagcaccaccccaaatcctgacgttattatccccatt

SEQ ID NO: 25993 - DNA, 398 bp, Homo sapiens
taaaaaccactttcttagggctgtttttaattacaagtcacatcatcaattcagtaagtaaagatcagcatttgtttgaaaaatctggaaataggccaggtgcggtggctcacgcctgtaatcccagcactttgggaggctgaggtgggcggatcagttgaggtcaggagttcaagaccagcctggccaacatggtgaaatcccatctttaccaaaaatacgaaaattaactgggcgtggtggtgcatgcctgtaatcccagctacttgggagactgaggcaggagaatcgcttgaaccctgggggtggaggttgcagtgagcctagatcgcaccaccacactccagcctgggtgacagagtgaatctccatctcaaaaaaaaaaaaaaaaaatcagg

SEQ ID NO: 25994 - DNA, 390 bp, Homo sapiens
ggatgaaagaataatagcactcttaattcaggcactttcaagatgaaaggataatgaagaaaagttattaagatatatttctgaactggaaggaaagaaactaacatttagttgcagttaaacaatatttagtacaaactgagttgacatccccgggttataattttatttctatcttggggttaattgaagcatgtctgccattccccagtaatatatgtgaaaatggctacatttacattaagccagatttattgctatgcttatcctgatatttcatagaaattgtgttatttttcttttgtactttagtagaaagttaaaagcaaatatttaattgctgacctcagaatttcttgtttttttgagatggtcttgctctgtcctcca

SEQ ID NO: 25995 - DNA, 470 bp, Homo sapiens
tgaacagaggagcaacatgatctgacttacatttctaaaaggattccttcgcctgctgtattgagagtagactattggaagaggaggagcaggggaggatggtcaacaagggcagaaaagtgggggtagttaagaggccagtgtaataatccggtattactatgtccatcttaatgggctaatcatgtgttctgccactgaaatgagggaggtttttctgtgcccctgctgtgtttatacacactgggaggcatgaaagtcatatcattgtggaagtcatccatgctggtgttttactgtcatctagtagattgtgagacctaacagtcacatttgcatataactttatctgtgccctgcttgtctgggaaattttcttgtaagagaaaggagcactttacaaaatggactctctttgtcagttgtcatgctggagtgatctgtggtgattgtccctacggggaagtgct

SEQ ID NO: 25996 - DNA, 1185 bp, Homo sapiens
tgatgggtagaaacgaagtaagtttcctttatttctgggattacaaaaattactttcctacgacagtaactacttttagtcactggaaagcttctttctctgaagattatcataagtctctcaggaataaacacatattgtccagagcttggagaggatccttaaaaacattttttatttcattttttagagacaggatctctttctgtcacccaggctggagtgtggtggcatgattaggattcactgcatgctccaccttctgggctcaagcaatcctcccatctcagcctcccaagtagctgggactataggcttgtaccgtcactctgggctaatttttttttttttttttggtagagatgaggtctcaaaatatggccccatctcaaactctgggctcaagcagtcctccagcctcagcctcccaaaatggtgagatttaaagacctattgaatttaatttaacaaagaaagtttgcttctatccatatctagatatataatgcaaaatttatctgcaacctttcaatctgataaagaaatgacactttatgaaagaacatttagcattgtttagatcaaagtcagtgaataagtctttttcctgacacaaaagaggctttggttctttataaatttacaatgactcattaaacatcaatttgacattaaaacaaagtaagtaaattgaaagctagtttaagaagaaaataagaaacctggatgcatgcatcagccttgtattgctataggagctcccacacataatcttatctcacgtcactcgtgcttacctgacgaatgcagctttagctctcagttcaatgaacagataaatttgctataaacagtgtttataatcaacactgtttataatctataataagagcagcacagacttcttaactgagctttctgtaaacaggaacattttaataagcgataaatttttcttccctcccttcgtctgtatgtatgtatgtatgtatgtatgtatgtatctatctatctatatagatagatagatagatagatagaattttattaaattaatacttaacaattgaaaagttgtcagatctggtgcccagagaagaaaaattgagtttgtagttattattgctgcttggtgttaggtgaagatgaataagagcgacctaatgaaagaatgagtttaaaaaa

SEQ ID NO: 25997 - DNA, 1173 bp, Homo sapiens
accaaaacgttgaagaaaaatacggaatataaaatacagtgtgaaagtttgccttgacaactttactcttaacagtttggtgtgtacctcttcagatctttactagtgactatatagtgtagatgtgattcattgtctttgtctctaacaaatgtgtatttttctgcattgtacttaatggagctatttccgtttcccattctttcctctgccctcttccccagaagtaatcaatagttttaattttgtgtttcattctttatatttttataacttattacatatatgtttttcagtatattgaggtacatcttttttatgtattgtgtggcaattttttggaaagtggtgccccatattttattattttgagtaggaaaaatcataatttccagcccacttaagaccctaaacaatttcctagatatagctaaagtactcaacacctacttgataattcaccaaggatttctgcataatacagagtatttaaaatacaaactacttaatataaacagaaacaaatgaatcactaagtatatttccatttagtatgtactgtattcagataatactttttcttttatactgcaataaaattgtaattgtaaataaacagttaagtgtatttcctttcttttattgttaagtggcacattattgaacatgtttctctctctgaagtcaggatgcatcttacagctgatggtgacttcaagtcatagttgtgacaaacagtaccagcaccaaagcatcttagaatctatgatatatagtatgttaaagatatataatgaatataaagaacacttaataaaataaaatcatagctgagtgtagtgctgtgcacctgtagtcctagctactggagaggctgaggcgggagattagcttgagccccagagtttgaggctgcagtgagctatcatcacaccactgcactccagcctgtgtgacagagcaagaccctcagtcagtcgattgatagatagatagatagatagatagatagatagatagatagatagaattttattaaattaatacttaacaattgaaaagttgtcagatctggtgcccagagaagaaaaattgagtttgtagttattattgctgcttggtgttaggtgaagatgaataagagcgacctaatgaaagaatgagtttaaaaaa

SEQ ID NO: 25998 - DNA, 784 bp, Homo sapiens
tcgggaataggggcggagcctggcttaggaaggggagctgaggtccggggcccagttttccggagttgcgggttctccaaaaaatgtggaatcctttgcatctatgctgagacattctcctcttacacagatgggacctgcaaaggataaactggtcattggacggatctttcatattgtggagaatgatctgtacatagattttggtggaaagtttcattgtgtatgtagaagaccagaagtggatggagagaaataccagaaaggaaccagggtccggttgcggctattagatcttgaacttacgtctaggttcctgggagcaacaacagatacaactgtactagaggctaatgcagttctcttgggaatccaggagagtaaagactcaagatcgaaagaagaacatcatgaaaaataaatgaactttgcttagtggattgactcctttgctgaagtcagttattcatcaagaatgcaattagactaattgtgaataaatgattgaatgaagatataataaataaaagctataattaccaaagagagaaagaaatcacagaagaaacaaaacttggttgggccgcgccgaggcccctgagaaaaactttataaccccatctgtgggggcggggggcccagtagataggacactggccagaggggtccgcaaaggaacccgggcagagcaagtgctgggtccccccaaaaaacgccggggacacggggttgacaaccagtggctctggcaacgcggcttcaccggcaggaccgcatcccacgg

SEQ ID NO: 25999 - DNA, 336 bp, Homo sapiens
tgggattagtgaactggctagttagttaatctatgaaccagaaccaggtcttcatgacactaaatatgcttgtgccttgatcctggacttccagcctctagaactatgagaaagaagtttctgctgtttataagataccctcatttatggtgttttgttattcagatcgaacagactaggaaatagtatggtaagttggaatagtgtaacccccaataagctaataactatcaggtctaggctttgttttgtaatggatctgtatcataattgtggtaagacctctagtcacaggacctggttaatatcagtatgcctcatgttatttgggaatga

SEQ ID NO: 26000 - DNA, 1153 bp, Homo sapiens
gcgcgcttgcggaggggaggtcaaaggtcagaggtaaagaagtcatggcggcgctgtgtcggacccgtgctgtggctgccgagagccattttctgcgagtgtttctcttcttcaggccctttcggggtgtaggcactgagagtggatccgaaagtggtagttccaatgccaaggagcctaagacgcgcgcaggcggtttcgcgagcgcgttggagcggcactcggagcttctacagaaggtggagcccctacagaagggttctccaaaaaatgtggaatcctttgcatctatgctgagacattctcctcttacacagatgggacctgcaaaggataaactggtcattggacggatctttcatattgtggagaatgatctgtacatagattttggtggaaagtttcattgtgtatgtagaagaccagaagtggatggagagaaataccagaaaggaaccagggtccggttgcggctattagatcttgaacttacgtctaggttcctgggagcaacaacagatacaactgtactagaggctaatgcagttctcttgggaatccaggagagtaaagactcaagatcgaaagaagaacatcatgaaaaataaatgaactttgcttagtggattgactcctttgctgaagtcagttattcatcaagaatgcaattagactaattgtgaataaatgattgaatgaagatataataaataaaagctataattatagataactcttattagaattttctttagcaatattcccaccccccaccccttgttttgctcttaatgtttttttcctttggtggggatagtatacactgtactaagaaattgtcattcaataaatacgttttgagtgctgtctaaaaaaaaaaacctcaaaaaaaaaataacaaataaaaaaaaaaaaaatactcacttcataatcttaactatattcatccattataaaaaactcttccaatttccatacctccactcaacactttataatcccattacacctcctttaacttcaagacccattcaatttgcgagtaaccccctttaccaatttgctataaaggggtccgtttaaacacaaatggccgccttataaaagggactctttgggtcaatatgcttattcctccactccctggctttct

SEQ ID NO: 26001 - DNA, 811 bp, Homo sapiens
gcgcgcttgcggaggggaggtcaaaggtcagaggtaaagaagtcatggcggcgctgtgtcggacccgtgctgtggctgccgagagccattttctgcgagtgtttctcttcttcaggccctttcggggtgtaggcactgagagtggatccgaaagtggtagttccaatgccaaggagcctaagacgcgcgcaggcggtttcgcgagcgcgttggagcggcactcggagcttctacagaaggtggagcccctacagaagatgggacctgcaaaggataaactggtcattggacggatctttcatattgtggagaatgatctgtacatagattttggtggaaagtttcattgtgtatgtagaagaccagaagtggatggagagaaataccagaaaggaaccagggtccggttgcggctattagatcttgaacttacgtctaggttcctgggagcaacaacagatacaactgtactagaggctaatgcagttctcttgggaatccaggagagtaaagactcaagatcgaaagaagaacatcatgaaaaataaatgaactttgcttagtggattgactcctttgctgaagtcagttattcatcaagaatgcaattagactaattgtgaataaatgattgaatgaagatataataaataaaagctataattatagataactcttattagaattttctttagcaatattcccaccccccaccccttgttttgctcttaatgtttttttcctttggtggggatagtatacactgtactaagaaattgtcattcaataaatacgttttgagtgctgtcta

SEQ ID NO: 26002 - DNA, 726 bp, Homo sapiens
tcgggaataggggcggagcctggcttaggaaggggagctgaggtccggggcccagttttccggagttgcgagatggggttttgccatgttgcccaggctggtcttgaactcctgggttcaagtgatcctcctgcgttggcctcccaaagtgctgggattacagatgacagatatgggacctgcaaaggataaactggtcattggacggatctttcatattgtggagaatgatctgtacatagattttggtggaaagtttcattgtgtatgtagaagaccagaagtggatggagagaaataccagaaaggaaccagggtccggttgcggctattagatcttgaacttacgtctaggttcctgggagcaacaacagatacaactgtactagaggctaatgcagttctcttgggaatccaggagagtaaagactcaagatcgaaagaagaacatcatgaaaaataaatgaactttgcttagtggattgactcctttgctgaagtcagttattcatcaagaatgcaattagactaattgtgaataaatgattgaatgaagatataataaataaaagctataattatagataactcttattagaattttctttagcaatattcccaccccccaccccttgttttgctcttaatgtttttttcctttggtggggatagtatacactgtactaagaaattgtcattcaataaatacgttttgagtgctgtcta

SEQ ID NO: 26003 - DNA, 1050 bp, Homo sapiens
gcgcgcttgcggaggggaggtcaaaggtcagaggtaaagaagtcatggcggcgctgtgtcggacccgtgctgtggctgccgagagccattttctgcgagtgtttctcttcttcaggccctttcggggtgtaggcactgagagtggatccgaaagtggtagttccaatgccaaggagcctaagacgcgcgcaggcggtttcgcgagcgcgttggagcggcactcggagcttctacagaaggtggagcccctacagaagggttctccaaaaaatgtggaatcctttgcatctatgctgagacattctcctcttacacagatgggacctgcaaaggataaactggtcattggacggatctttcatattgtggagaatgatctgtacatagattttggtggaaagtttcattgtgtatgtagaagaccagaagtggatggagagagtcccatttcgtggtatgctgtttggaggagattttcacaagtgatgataacctgtttttcttccaactctgactttggaaaacatcgtaaaagataaagaagttgtaatacaacatggatgaaccctgaaaacattatgccaaatgaaagaagccattcacaaaagatcatatattgaaataccagaaaggaaccagggtccggttgcggctattagatcttgaacttacgtctaggttcctgggagcaacaacagatacaactgtactagaggctaatgcagttctcttgggaatccaggagagtaaagactcaagatcgaaagaagaacatcatgaaaaataaatgaactttgcttagtggattgactcctttgctgaagtcagttattcatcaagaatgcaattagactaattgtgaataaatgattgaatgaagatataataaataaaagctataattatagataactcttattagaattttctttagcaatattcccaccccccaccccttgttttgctcttaatgtttttttcctttggtggggatagtatacactgtactaagaaattgtcattcaataaatacgttttgagtgctgtcta

SEQ ID NO: 26004 - DNA, 1152 bp, Homo sapiens
gcgcgcttgcggaggggaggtcaaaggtcagaggtaaagaagtcatggcggcgctgtgtcggacccgtgctgtggctgccgagagccattttctgcgagtgtttctcttcttcaggccctttcggggtgtaggcactgagagtggatccgaaagtggtagttccaatgccaaggagcctaagacgcgcgcaggcggtttcgcgagcgcgttggagcggcactcggagcttctacagaaggtggagcccctacagaagagatggggttttgccatgttgcccaggctggtcttgaactcctgggttcaagtgatcctcctgcgttggcctcccaaagtgctgggattacagatgacagatggttctccaaaaaatgtggaatcctttgcatctatgctgagacattctcctcttacacagatgggacctgcaaaggataaactggtcattggacggatctttcatattgtggagaatgatctgtacatagattttggtggaaagtttcattgtgtatgtagaagaccagaagtggatggagagagtcccatttcgtggtatgctgtttggaggagattttcacaagtgatgataacctgtttttcttccaactctgactttggaaaacatcgtaaaagataaagaagttgtaatacaacatggatgaaccctgaaaacattatgccaaatgaaagaagccattcacaaaagatcatatattgaaataccagaaaggaaccagggtccggttgcggctattagatcttgaacttacgtctaggttcctgggagcaacaacagatacaactgtactagaggctaatgcagttctcttgggaatccaggagagtaaagactcaagatcgaaagaagaacatcatgaaaaataaatgaactttgcttagtggattgactcctttgctgaagtcagttattcatcaagaatgcaattagactaattgtgaataaatgattgaatgaagatataataaataaaagctataattatagataactcttattagaattttctttagcaatattcccaccccccaccccttgttttgctcttaatgtttttttcctttggtggggatagtatacactgtactaagaaattgtcattcaataaatacgttttgagtgctgtcta

SEQ ID NO: 26005 - DNA, 801 bp, Homo sapiens
tgggattagtgaactggctagttagttaatctatgaaccagaaccaggtcttcatgacactaaatatgcttgtgccttgatcctggacttccagcctctagaactatgagaaagaagtttctgctgtttataagataccctcatttatggtgttttgttattcagatcgaacagactaggaaatagtatggagtcccatttcgtggtatgctgtttggaggagattttcacaagtgatgataacctgtttttcttccaactctgactttggaaaacatcgtaaaagataaagaagttgtaatacaacatggatgaaccctgaaaacattatgccaaatgaaagaagccattcacaaaagatcatatattgaaataccagaaaggaaccagggtccggttgcggctattagatcttgaacttacgtctaggttcctgggagcaacaacagatacaactgtactagaggctaatgcagttctcttgggaatccaggagagtaaagactcaagatcgaaagaagaacatcatgaaaaataaatgaactttgcttagtggattgactcctttgctgaagtcagttattcatcaagaatgcaattagactaattgtgaataaatgattgaatgaagatataataaataaaagctataattatagataactcttattagaattttctttagcaatattcccaccccccaccccttgttttgctcttaatgtttttttcctttggtggggatagtatacactgtactaagaaattgtcattcaataaatacgttttgagtgctgtcta

SEQ ID NO: 26006 - DNA, 622 bp, Homo sapiens
tgggattagtgaactggctagttagttaatctatgaaccagaaccaggtcttcatgacactaaatatgcttgtgccttgatcctggacttccagcctctagaactatgagaaagaagtttctgctgtttataagataccctcatttatggtgttttgttattcagatcgaacagactaggaaatagtatggaaataccagaaaggaaccagggtccggttgcggctattagatcttgaacttacgtctaggttcctgggagcaacaacagatacaactgtactagaggctaatgcagttctcttgggaatccaggagagtaaagactcaagatcgaaagaagaacatcatgaaaaataaatgaactttgcttagtggattgactcctttgctgaagtcagttattcatcaagaatgcaattagactaattgtgaataaatgattgaatgaagatataataaataaaagctataattatagataactcttattagaattttctttagcaatattcccaccccccaccccttgttttgctcttaatgtttttttcctttggtggggatagtatacactgtactaagaaattgtcattcaataaatacgttttgagtgctgtcta

SEQ ID NO: 26007 - DNA, 477 bp, Homo sapiens
  misc_feature (38)..(38): n is a, c, g, or t
gggggacccgttctggccagcgggtttggttttttccngatgctgggtgaatcagctacgttacagggtccggttgcggctattagatcttgaacttacgtctaggttcctgggagcaacaacagatacaactgtactagaggctaatgcagttctcttgggaatccaggagagtaaagactcaagatcgaaagaagaacatcatgaaaaataaatgaactttgcttagtggattgactcctttgctgaagtcagttattcatcaagaatgcaattagactaattgtgaataaatgattgaatgaagatataataaataaaagctataattatagataactcttattagaattttctttagcaatattcccaccccccaccccttgttttgctcttaatgtttttttcctttggtggggatagtatacactgtactaagaaattgtcattcaataaatacgttttgagtgctgtcta

SEQ ID NO: 26008 - DNA, 470 bp, Homo sapiens
tggttcccgtacgccactttagcaggcccccgaacccttagagtacacaaggaccttagggtccggttgcggctattagatcttgaacttacgtctaggttcctgggagcaacaacagatacaactgtactagaggctaatgcagttctcttgggaatccaggagagtaaagactcaagatcgaaagaagaacatcatgaaaaataaatgaactttgcttagtggattgactcctttgctgaagtcagttattcatcaagaatgcaattagactaattgtgaataaatgattgaatgaagatataataaataaaagctataattatagataactcttattagaattttctttagcaatattcccaccccccaccccttgttttgctcttaatgtttttttcctttggtggggatagtatacactgtactaagaaattgtcattcaataaatacgttttgagtgctgtcta

SEQ ID NO: 26009 - DNA, 896 bp, Homo sapiens
gcgcgcttgcggaggggaggtcaaaggtcagaggtaaagaagtcatggcggcgctgtgtcggacccgtgctgtggctgccgagagccattttctgcgagtgtttctcttcttcaggccctttcggggtgtaggcactgagagtggatccgaaagtggtagttccaatgccaaggagcctaagacgcgcgcaggcggtttcgcgagcgcgttggagcggcactcggagcttctacagaaggtggagcccctacagaagggttctccaaaaaatgtggaatcctttgcatctatgctgagacattctcctcttacacagatgggacctgcaaaggataaactggtcattggacggatctttcatattgtggagaatgatctgtacatagattttggtggaaagtttcattgtgtatgtagaagaccagaagtggatggagagagtcccatttcgtggtatgctgtttggaggagattttcacaagtgatgataacctgtttttcttccaactctgactttggaaaacatcgtaaaagataaagaagttgtaatacaacatggatgaaccctgaaaacattatgccaaatgaaagaagccattcacaaaagatcatatattgtatgattccatttatatgaaatgttcagaatagacaaatccacagagacagaaagtagattagtcatccccagagtctagaataggggagggggagagattgctaatgagtacagggtttcttttttggggtgatgaaaatgttctaaaattaggttatggtaaaagctgtacagctctgagaatatattcaaagtcactgaattatacactttgggtagattttatgatatgtgaattatatctcaataaagctgttaaagttttagtataccact

SEQ ID NO: 26010 - DNA, 871 bp, Homo sapiens
gcgcgcttgcggaggggaggtcaaaggtcagaggtaaagaagtcatggcggcgctgtgtcggacccgtgctgtggctgccgagagccattttctgcgagtgtttctcttcttcaggccctttcggggtgtaggcactgagagtggatccgaaagtggtagttccaatgccaaggagcctaagacgcgcgcaggcggtttcgcgagcgcgttggagcggcactcggagcttctacagaaggtggagcccctacagaagggttctccaaaaaatgtggaatcctttgcatctatgctgagacattctcctcttacacagatgggacctgcaaaggataaactggtcattggacggatctttcatattgtggagaatgatctgtacatagattttggtggaaagtttcattgtgtatgtagaagaccagaagtggatggagagaaataccagaaaggaaccagggtccggttgcggctattagatcttgaacttacgtctaggttcctgggagcaacaacagatacaactgtactagaggctaatgcagttctcttgggaatccaggagagtaaagactcaagatcgaaagaagaacatcatgaaaaataaatgaactttgcttagtggattgactcctttgctgaagtcagttattcatcaagaatgcaattagactaattgtgaataaatgattgaatgaagatataataaataaaagctataattatagataactcttattagaattttctttagcaatattcccaccccccaccccttgttttgctcttaatgtttttttcctttggtggggatagtatacactgtactaagaaattgtcattcaataaatacgttttgagtgctgtcta

SEQ ID NO: 26011 - DNA, 1277 bp, Homo sapiens
  misc_feature (939)..(939): n is a, c, g, or t
  misc_feature (1053)..(1053): n is a, c, g, or t
  misc_feature (1084)..(1084): n is a, c, g, or t
  misc_feature (1168)..(1168): n is a, c, g, or t
gcgcgcttgcggaggggaggtcaaaggtcagaggtaaagaagtcatggcggcgctgtgtcggacccgtgctgtggctgccgagagccattttctgcgagtgtttctcttcttcaggccctttcggggtgtaggcactgagagtggatccgaaagtggtagttccaatgccaaggagcctaagacgcgcgcaggcggtttcgcgagcgcgttggagcggcactcggagcttctacagaaggtggagcccctacagaagggttctccaaaaaatgtggaatcctttgcatctatgctgagacattctcctcttacacagatgggacctgcaaaggataaactggtcattggacggatctttcatattgtggagaatgatctgtacatagattttggtggaaagtttcattgtgtatgtagaagaccagaagtggatggagagaaataccagaaaggaaccagggtccggttgcggctattagatcttgaacttacgtctaggttcctgggagcaacaacagatacaactgtactagaggctaatgcagttctcttgggaatccaggagagtaaagactcaagatcgaaagaagaacatcatgaaaaataaatgaactttgcttagtggattgactcctttgctgaagtcagttattcatcaagaatgcaattagactaattgtgaataaatgattgaatgaagatataataaataaaagctataattatagataactcttattagaattttctttagcaatattcccaccccccaccccttgttttgctcttaatgtttttttcctttggtggggatagtatacactgtactaagaaattgtcattcaataaatacgttttgagtgctgtctaaaaaaaaagcaaaaatattataactgactttagcgatcaaggatatacacgtacaaacgtcaacgggntatggccgatctgtggccgcgccctcttgcgcccccgtcgctgggtggggggttgttggctggctcgcccctgcctgacggaccccacgtcgcttccacacgctcggaacgtcntgtggccgcgacgtttccactagtgtgatcnctcggcgggccacacgccctgaagggagtccggggaatctctggaactagtagtactcagagggcccagtcctcgagagtggcntcaaggtggggtgggcggataccgtctcgttggccccctctaatgttttaaggacccacacgccacggcccggggaccctcgagtgagggggttaagggcggatacttg

SEQ ID NO: 26012 - DNA, 870 bp, Homo sapiens
tcgggaataggggcggagcctggcttaggaaggggagctgaggtccggggcccagttttccggagttgcggtgcgttgtggctcagccctcggcccctagaatctgtgcttggtgtttttcttcctttcgttgtccttttgtgtggcatttgcgtactgggccgggtctgtccacactgcgcttgttttcctgggattgaatgctggtgggaagagatggggttttgccatgttgcccaggctggtcttgaactcctgggttcaagtgatcctcctgcgttggcctcccaaagtgctgggattacagatgacagatatgggacctgcaaaggataaactggtcattggacggatctttcatattgtggagaatgatctgtacatagattttggtggaaagtttcattgtgtatgtagaagaccagaagtggatggagagaaataccagaaaggaaccagggtccggttgcggctattagatcttgaacttacgtctaggttcctgggagcaacaacagatacaactgtactagaggctaatgcagttctcttgggaatccaggagagtaaagactcaagatcgaaagaagaacatcatgaaaaataaatgaactttgcttagtggattgactcctttgctgaagtcagttattcatcaagaatgcaattagactaattgtgaataaatgattgaatgaagatataataaataaaagctataattatagataactcttattagaattttctttagcaatattcccaccccccaccccttgttttgctcttaatgtttttttcctttggtggggatagtatacactgtactaagaaattgtcattcaataaatacgttttgagtgctgtcta

SEQ ID NO: 26013 - DNA, 689 bp, Homo sapiens
gcgcgcttgcggaggggaggtcaaaggtcagaggtaaagaagtcatggcggcgctgtgtcggacccgtgctgtggctgccgagagccattttctgcgagtgtttctcttcttcaggccctttcggggtgtaggcactgagagtggatccgaaagtggtagttccaatgccaaggagcctaagacgcgcgcaggcggtttcgcgagcgcgttggagcggcactcggagcttctacagaaggtggagcccctacagaaggaaataccagaaaggaaccagggtccggttgcggctattagatcttgaacttacgtctaggttcctgggagcaacaacagatacaactgtactagaggctaatgcagttctcttgggaatccaggagagtaaagactcaagatcgaaagaagaacatcatgaaaaataaatgaactttgcttagtggattgactcctttgctgaagtcagttattcatcaagaatgcaattagactaattgtgaataaatgattgaatgaagatataataaataaaagctataattatagataactcttattagaattttctttagcaatattcccaccccccaccccttgttttgctcttaatgtttttttcctttggtggggatagtatacactgtactaagaaattgtcattcaataaatacgttttgagtgctgtcta

SEQ ID NO: 26014 - DNA, 1222 bp, Homo sapiens
  misc_feature (884)..(884): n is a, c, g, or t
  misc_feature (998)..(998): n is a, c, g, or t
  misc_feature (1029)..(1029): n is a, c, g, or t
  misc_feature (1113)..(1113): n is a, c, g, or t
gcgcgcttgcggaggggaggtcaaaggtcagaggtaaagaagtcatggcggcgctgtgtcggacccgtgctgtggctgccgagagccattttctgcgagtgtttctcttcttcaggccctttcggggtgtaggcactgagagtggatccgaaagtggtagttccaatgccaaggagcctaagacgcgcgcaggcggtttcgcgagcgcgttggagcggcactcggagcttctacagaaggtggagcccctacagaagggttctccaaaaaatgtggaatcctttgcatctatgctgagacattctcctcttacacagatgggacctgcaaaggataaactggtcattggacggatctttcatattgtggagaatgatctgtacatagattttggtggaaagtttcattgtgtatgtagaagaccagaagtggatggagagaaataccagaaaggaaccagggtccggttgcggctattagatcttgaacttacgtctaggttcctgggagcaacaacagatacaactgtactagaggctaatgcagttctcttgggaatccaggagagtaaagactcaagatcgaaagaagaacatcatgaaaaataaatgaactttgcttagtggattgactcctttgctgaagtcagttattcatcaagaatgcaattagactaattgtgaataaatgattgaatgaagatataataaatcccccaccccttgttttgctcttaatgtttttttcctttggtggggatagtatacactgtactaagaaattgtcattcaataaatacgttttgagtgctgtctaaaaaaaaagcaaaaatattataactgactttagcgatcaaggatatacacgtacaaacgtcaacgggntatggccgatctgtggccgcgccctcttgcgcccccgtcgctgggtggggggttgttggctggctcgcccctgcctgacggaccccacgtcgcttccacacgctcggaacgtcntgtggccgcgacgtttccactagtgtgatcnctcggcgggccacacgccctgaagggagtccggggaatctctggaactagtagtactcagagggcccagtcctcgagagtggcntcaaggtggggtgggcggataccgtctcgttggccccctctaatgttttaaggacccacacgccacggcccggggaccctcgagtgagggggttaagggcggatacttg

SEQ ID NO: 26015 - DNA, 542 bp, Homo sapiens
agatttaaaattctggctcataatgtccttgattcaatgttaaaccattttgcctaaatggcagcatgttctaaatgtgagcgcgctcagcttttcaagctgctcccgagtgacagaaattgacaagctgtcattcaagacctttcggtggctgcctggggctctgtttgaattgtatctgtctgatactttaccatggagagtgaaaaatttgatcacatgccatgcttttaattttctaaagcaaatatgttggaaggagccaattaatgcaaagatggactgctggtctcatgcaactgatttaggggaagggtttgcctaaattaataaaagatctgaattatagatcttaacaaatacatagaatgtaaaggcttaaaaggaaactgagcagcagcaggcctggggttggcttttaagtatctatatttaactaatagacatgaatgttttgatttgatattagaaatgctagtgctggagtctctgagcctactctggctcgagaggatgccctatctaaaaaacaaaaaacaaaa

SEQ ID NO: 26016 - DNA, 317 bp, Homo sapiens
tactctaaagaacgtttatagtcatcaacttgttccccctttcccttgcaattccaattttttaaaaaatcctcatatataggggtgattttcagaatgatagagaacagagccaaaatgatttggccacgtaaggagtgggtttcctacttaatgtccaagggacagacctaagcctgcgaaactcagcgtggtgatagagacctgtgaggcaggtaactcgggacccttagagataaagaagaatctggataaaagggctatgagacttattttagaaattgcctaatgacagattcagggttttgaataggaaa

SEQ ID NO: 26017 - DNA, 414 bp, Homo sapiens
ctgggtatgttctgggacccaagtccattctccctgtagcccctgctccccagtcctgaagaccctctcaggctcttcccactttgcactgccagaagcccctgtgggctcacagctcttgccctcttctctcttaagtgcaccagcattcaagctcctccctgggctgctgggaggacagattgcttcataaattcttaagaacgtatttggaactaacagcttaatcattataatgcattattcaatcaaccaacagtgttttttggagggaaaaaaatacaccatgaaatatatcttcattttaagtacatctgttgtttcttgaaagccatcagctgtcagtgaatcatcaattttgtttcgttgtgtggctaagactatttgttctaattaaagaccatgcacgaatct

SEQ ID NO: 26018 - DNA, 480 bp, Homo sapiens
acacacctgtaaccccagctacttgggaggttgaggcagaaggattacttgaaccaggagcttgacagttcaaaagtttgagtccagcctgggcaacatagtaagactgaatctctgaaggaaaaaaaaagaaagatgtggacatataccattttacgatctcttagcctccatttcccttcttttgggactggtactctgtgtttcctttgaagatcaaataacccttgcttcagcaacattgattcgatcagcgtgaacacataacacttgactctttgagaatcaagcttggaactttcgtgtaggcttttgttcaaactgttgagagagagaagctctcttaagcccatgggtgtgagtctgaagttaagggctaccaccataaggaaaaaaattatgtataaattttaaaccagcagaagataattcagcctattcaatggaaagcagaaatggagattaaaaataaaaaaagaa

SEQ ID NO: 26019 - DNA, 267 bp, Homo sapiens
gtttaaagggggtagattaagaaggtatttgtactatgtacgttgaataaacagagtgtacaaaggcagagaaaagaaaaatgtgaagtatggagttgtacaaatggcaagtcgactctttcggatagagcggattataggaacgagagatgggaggacagggtagggcagctggggctttgaaagcagtccgagggctcaggacttggacatctacaatagcatcgaggcagccaccagcgctgggcatgagcataaatgccccct

SEQ ID NO: 26020 - DNA, 475 bp, Homo sapiens
aaactgatttctagttgactttggctattactaaattgtgacatgcatgcacttctttttaatttaacagttgttttctgctgttttctcagtttgaaagtagtaattatgaataagaattcctagaaatattcttcttccataatgatatgtcacagatgtttgagtgctacacacacactcctctccatttttaagtcaatttagtggagataaaatgtagataatagctgtgtgttgtaatgactctgggcccactccccagaggctctgtatttccataagttatgggacccctctgatctttctgaaatggccaccatcagatcattgagacttgacatgcagtttaaaatgtgtgtttctgagatttctatatatgatttggacacagaataacttgtgctgtttccaaaaccacattctttgtcctcttatagaacccaatgaaaggaggaagctgtgccttaaatgt

SEQ ID NO: 26021 - DNA, 570 bp, Homo sapiens
gtctcaggaatggagagtccaaattagcctgaaaaacataatctcttccgcttcctaaggtttcaggtgcaaattcgttgtgtttgagcagccttatgtgcagggcgaaagtgcccatccctctatcaagagtggagactgcattcctgtcctctgagcttacggagcatgacattttctgtctggaagcctgtacaggttgctcgccagcctgcttttacaatggaagtgcttttacaataagtttacttccttgggtcatcatgattctaaattccaggtagagagagttgcttaactattcctctgcttgatacatttgctggaggaggaaatcgctattttgtgattcagaaatcagctcaggaattttagccctgatagtgatacataatttcgggaaaagatttgtgaatcccttagtcagaaatcagtctccaaagtccggctcagtggctcacacttgtaatcccagcgcttgggaggccaaggtgggaggatcacttgagactaggggtttaagaccagtctgggcaatatagggagaccctgtctgtacacaaaaaaaaa

SEQ ID NO: 26022 - DNA, 430 bp, Homo sapiens
gctgcctttgtacacagcccttaacccctggccttctgtttccttacctgttgacttggggatattaattcccgacttgcatgttccacagggtcgttacatgaactgactcatgcaaaaagcacacccatactgtaagcagtacaaatgaaatgtgctgttatgattatggttattcctgaagcgttcctgggatgaaagattcagcattagggcactaaaggtctaagtcaattaactaactggtaataccagtttgttccagaaataattggaggtatctatcgaagaagcagacatcaaggttaaagaaaactaaactgagaaaagtgatgctgtacaataatatgcatatagttaacaataatgtactctccacttcaaaatgtgttaagagggtagattttacgttatgtgttttttaccacag

SEQ ID NO: 26023 - DNA, 354 bp, Homo sapiens
cgcggccgcgtcgacggacattttacaggttaatgactgtgggagaggagaataaaatcaaaactgcaagaacccatttttgtcttcataagcattgcattttaaaatacgagggcttgaagacttctcagaagagacactcactactggagttaaagttatatgaagtccctgagcccttaatcatccaagactggacctaagcagtcctcttcgtttgtagtctctttcaatatctgcttatcaaggacaacgagaatatcttagtctactaattaatcttttttatcaccatagtctaccaagaaagaaagctgataagataataaagatgattcattcctcagagtagga

SEQ ID NO: 26024 - DNA, 1121 bp, Homo sapiens
  misc_feature (1081)..(1081): n is a, c, g, or t
  misc_feature (1117)..(1117): n is a, c, g, or t
ggcaactaaagtctaggaaagaagcaaaatagcttgcctaaagtcacacataagtaaatggtggctcacgcctgtaaacccagcactttgggaggctgaggcaagtggatcatttgaggtcaggagttcaagaccagcctggccaacatggtgaaagcccacctctactaaaaatacaaaaattagctgggcatggtggcatgtgcctgtaatcccagctactcgggaggctgagacaggagaattgcttgaaccagggaggtggaggttgcagtgagccaagatcgctctactgcattccagcgtgggcaacagagcaagactccatcttaaaaaaaaaaaaaaaaaaaagctaaagctgggatttaaacctgattatgttggctccagagcctatgctctagaccagtggttctaaactttaatggtcaataggaaccgcttgaggatcttgttaaaacgcaaatattggtagtatagatatcaggtaaggcctggatcctatagtcttaacaggcccccaggtgatgttgatggtgctggtcattacatactacagttcacatcttcccttttctcctaaccgtatttattttgcagtcagaaactacctttcccatgctgcctgtgactgctttatagtctcaaatgttcccaacatgctcttccttaaggattagactcaaactttttcctcaaaaagcttatcctgcccctgtctttccctctaggataagacagacatccctgcctctgctcccctaccacttagtgtacaccttgttacagagctcagaacactgaattatggccatttatttgaaaatcttcctgggccgggcatggtggctcatgcctgtattcccagtactttgggaggccgaggtgggctgatcacttgaggtcaggagttcaagaccagcttggccaacatggtgaaatcccgtctatactaaagatagaaaaattagccggtcatggtgttgtgcatctgtagtcctaggtactctactcgagaggctgaggcaggagaatctcttgaacccaggaggtggaggttgcagtgagctgagattgcgcnactgcacttcagcctgggcgacagagcaagactctntctc

SEQ ID NO: 26025 - DNA, 350 bp, Homo sapiens
ctagctgatggaacaggggatatatggagtccagactccaaaagattaaaatatattaagaaactatgcattatcaaagaaaggaaactgtgcattgtggtgaatcttaagtgaaaaggtgggtttaataaagcatgtgggtattcgttttcaaacaacagggtatttaacattttatttgaggctgggtgcagtggctcatgcctgtaattccagcactttgggaggccaaggtgggaggatcacttgaggccaggaatttgagaccagtctgggcaaaataaggaggccctgtttctaaaacaaacaaaaattagccgggtatggtggtgcatgcctgtggttccagc

SEQ ID NO: 26026 - DNA, 359 bp, Homo sapiens
gaggccgacttgaggagcttctgggcccggagaggccgccggaagggaaaaactgggccgggaaaggccgttgtgaggaatgagccccatgggcctgaggaggccactggcaggcgggagctgggcctgccgaagcggcggagaggccggagctttggactcgggaggccgcaggcgagagcgagctgggcgtggagagtccgctgtgaggcagaggctgggcctgtgcaagctttcgggaggcaggaggccaggcctgcagaggccgactggaggtcaagttcggggcctgcagaggccgcggaaagtcagaagcggggcctgggaaggccgccgggaggcatgagctgggctgggct

SEQ ID NO: 26027 - DNA, 511 bp, Homo sapiens
aggaataagaaaaataggaagatgagaattgagctcaggcacataacctaggcagagaaatgtcaccaaactataaaatatataccctgcaatccagctggcagactacataagtctccttgctcaagtactgaaacacagaggcccatgtgctgtctaacacagtgtcaccaaacctttttgatcatgcactctatcagtgaaccaattttaagctctcccccaccatatatgtttattcatttataagttgcaaacatgcactaatgtactattgtgtatattataaaatatctaaaatataaatttttaaaagctgagagaccaataaatatcaaggggtcctccaatagttcctccttttttttttttttgagacttctttgctggtctgtctgtgggactgggtttgaaagaggccattctgaaccaaaagaccatatagacaaggtaatcctaagcaaaacagaacaaagttggaggcatcatgctacctgacttcaaactatac

SEQ ID NO: 26028 - DNA, 315 bp, Homo sapiens
gaaaaatgaactaaagaacttcagaacatagagtccctgaacagtttggttatgctaccatgattcagctttaaaagagcgtccaaaacagaatcctacctgtaactgaaattttttactgttatttaacaaaatatgaaacattgttcatgtacgttatttaatgtgaaaaaaataaaaataaatggaaaatgtcctttctgttattgaccttaataaatttatgtagttttaaaaacgaagaggtttaggagaaaatatcaatgccagttttgaagactcacaatgagtctagttagaatcaaaagtttcaaa

SEQ ID NO: 26029 - DNA, 464 bp, Homo sapiens
aacattttaaaaaataaaattatagcactgtctacctgagtaaaactacaggatatgctttttatactttagaatttcttttttattatatatatcaagaaatatatatcaatatcttcattctctactaggcatattttaaagaaataaaaacagctgtatttatttaatagaccagtcatatttacttagacaatttcttctcgattgttattctttgttgtcaagctgtgtagctaattttaaaaacatgtctgagcacaaataaaaaattttgtatatgtagatttgtaacatgtagattaacaagttaatcatttagtaatgattaaacgttaccaaacattaacaattgttttttaaaacaaggataaaaacaaatgtcaatcttagtattcattgggaaagctagttaaaatggtttcccaaaaataaagataaatattgcttttactggacttttt

SEQ ID NO: 26030 - DNA, 476 bp, Homo sapiens
cagacactgaatctgctggtgtcctgatcttgaatataccagcctccagaactagtcttgctcttgtcatccaggctggagtgcaatggtgccatttcagctcgctgcaacctccacctcctgggttcaagtgattctcctgcatcagcctcccgagtagctgggattacaggcgcccaccaccatgcccagctaatttttgtatttttagcagagacagggtttcaccatgttgtccaggctggtctcaaactcctgacctgaggtgatccacccgcttcagtctcccaaagtactgggattacaggcgtaagccaccacgcccggccgaaatttatgttttattgtacataatatttattttttggatgattggagaacaatgatgccagtttgatggactcttcatatgaaatgccccaaaacacagtatcattaccttaaaggttagtagagatatgcatgcatttacattg

SEQ ID NO: 26031 - DNA, 193 bp, Homo sapiens
cttacttgtaaccagaagaaaactaaagtttaatggcaagttttcaattgcatttaaaatacccccaggccaggcttagtggctcacgcctgtaattctaacactttgggaggctgaagtgggagaatcacttgagcccaggagttcaagaccagcctgggcaacttagtgagacgctgtctctattttatta

SEQ ID NO: 26032 - DNA, 506 bp, Homo sapiens
tgtcatctccttgtaccctccccagctgtttccagtggcagtcagcctcatccttctagaagggtacccaaagaagtgatatgatttgcctcttactagcatggacatttggctcactttccccatctgtaatttggggatgacaatagtgttcacctgacatagaggtgttatgagcaccaagtggcctaaatgccaatgacagtctcctctgatactaggggtagtactgtcacaaggccctggggtaacccggtccctgtgagcctccgccaaccctccctggttctctgagtcatggcgcactgtccttcagtaccatggctcctggctccagggttgggggttggttctgaaatccagtttgcccacattttccctcatctgactccaactcatccttcagttcttggctcagccttagttccttgggaaagcccccggagcacctggcttggtccattcccacacgtgcccagtacctgtcctgtccttcgaggctatct

SEQ ID NO: 26033 - DNA, 555 bp, Homo sapiens
tctcaagtaagactagtaaatgagccactatgtcaaattgacagacattgctcaaggaaaatatgctttctaaacaaaagctgaagaaagaaatgacacgaaccctgagcagagcccagccggcagccccgtgaccttctatatcaatgaggtggccacaggactgaactggctcctgggaaagcaggagacagacacctcaacaggcaccagaaccaggggatggacaagtctcaggtttactgatgactcttgactctcccagtgatcaacagccaccaagagcagtcacttctgatctgaagtgtaagaatcccctgatcacctcctgaagcaaataggacaatagacatgatgtcttaagtcctcaaataggatataaacacttacctgtcctgtcctgagcaaaggagagttttagatttaggaaaaccaacactggagacacatttctcacaatcaactcagaggcagacagtaacaaccatccctactgctgggcactaacctggcatatctccctcagcccaacgcagtcatgcaggagaagccacg

SEQ ID NO: 26034 - DNA, 247 bp, Homo sapiens
ctcatgccatgatatttttcttccataagaatgttttcatttatttcgtttcctttttccattttgtatacgttttcctttttttttttcagggcccttttgtcaaattctctcaacctcagaagggatcacatgatcccatttcctcattttttaattctaaaaatatcgtgtttcctactttgatttattttgctttttaaactgtgacttttatttatatgtgcacattctttgggagggtgtt

SEQ ID NO: 26035 - DNA, 190 bp, Homo sapiens
tttaatcaattaaactaccactgtgtttaccaacaatcctcaaactttaatgtgcatagaagttatgtgcagaacttcattttaaaatgcagatatctaactcctgcacacatagattctaattcagtaggctatgcagtctgtgactgtgcatctaacaaggacaccagtgtttctcatttggagcaaa

SEQ ID NO: 26036 - DNA, 595 bp, Homo sapiens
aaccctaaatagaggaaaacataatcatgccattatgcccgctgctggagaggaatgtccctatgttaagataggaaaggagaagaaaacgagctaagataggaagaaaaggactttttaattcggtgccggtataaattgtttctcttttatctcaaggcaccacagacccaaggctgaataaggcctgaattttgatgcctttctctttcatgtagctgtaaatccttttatcttactaccaggagcattttctaagctggctggccaaattaagtgtgtattctaaggcgaagaaatggaaaggtaactaacccctcacccacccagcactatgcccaggatcgtcctaacccccactctatcagtccttaactcagtaatttatagacccaacaaagctaagacccacttccttcttttgccaaatctcagtttacacgctgtcccaaaggagacattttagaaccatatcggcaaaagtcagtgttttctactaatgtgtttcatgaccccatgctttacaattgattattgatttaaaaaatctttaagtttggttaaattagcaacaataaaccttgtaaattccctg

SEQ ID NO: 26037 - DNA, 2406 bp, Homo sapiens
attgcaaccggaaccattttttttcctgttaccatctaagaactctgtggtttattattaatattataattattatttggcaataatgggggtgggaaccaagaaaaatatttattttgtggatctttgaaaaggtaatacaagacttcttttgatagtatagaatgaaggggaaataacacataccctaacttagctgtgtggacatggtacacatccagaaggtaaagaaatacattttctttttctcaaatatgccatcatatgggatgggtaggttccagttgaaagagggtggtagaaatctattcacaattcagcttctatgaccaaaatgagttgtaaattctctggtgcaagataaaaggtcttgggaaaacaaaacaaaacaaaacaaacctcccttccccagcagggctgctagcttgctttctgcattttcaaaatgataatttacaatggaaggacaagaatgtcatattctcaaggaaaaaaggtatatcacatgtctcattctcctcaaatattccatttgcagacagaccgtcatattctaatagctcatgaaatttgggcagcagggaggaaagtccccagaaattaaaaaatttaaaactcttatgtcaagatgttgatttgaagctgttataagaattaggattccagattgtaaaaagatccccaaatgattctggacactagatttttttgtttggggaggttggcttgaacataaatgaaaatatcctgttattttcttagggatacttggttagtaaattataatagtaaaaataatacatgaatcccattcacaggttctcagcccaagcaacaaggtaattgcgtgccattcagcactgcaccagagcagacaacctatttgaggaaaaacagtgaaatccaccttcctcttcacactgagccctctctgattcctccgtgttgtgatgtgatgctggccacgtttccaaacggcagctccactgggtcccctttggttgtaggacaggaaatgaaacattaggagctctgcttggaaaacagttcactacttagggatttttgtttcctaaaacttttattttgaggagcagtagttttctatgttttaatgacagaacttggctaatggaattcacagaggtgttgcagcgtatcactgttatgatcctgtgtttagattatccactcatgcttctcctattgtactgcaggtgtaccttaaaactgttcccagtgtacttgaacagttgcatttataaggggggaaatgtggtttaatggtgcctgatatctcaaagtcttttgtacataacatatatatatatatacatatatataaatataaatataaatatatctcattgcagccagtgatttagatttacagtttactctggggttatttctctgtctagagcattgttgtccttcactgcagtccagttgggattattccaaaagttttttgagtcttgagcttgggctgtggccctgctgtgatcataccttgagcacgacgaagcaaccttgtttctgaggaagcttgagttctgactcactgaaatgcgtgttgggttgaagatatcttttttcttttctgcctcacccctttgtctccaacctccatttctgttcactttgtggagagggcattacttgttcgttatagacatggacgttaagagatattcaaaactcagaagcatcagcaatgtttctcttttcttagttcattctgcagaatggaaacccatgcctattagaaatgacagtacttattaattgagtccctaaggaatattcagcccactacatagatagctttttttttttttttttaataaggacacctctttccaaacagtgccatcaaatatgttcttatctcagacttacgttgttttaaaagtttggaaagatacacatctttcataccccccttaggcaggttggctttcatatcacctcagccaactgtggctcttaatttattgcataatgatattcacatcccctcagttgcagtgaattgtgagcaaaagatcttgaaagcaaaaagcactaattagtttaaaatgtcacttttttggtttttattatacaaaaaccatgaagtactttttttatttgctaaatcagattgttcctttttagtgactcatgtttatgaagagagttgagtttaacaatcctagcttttaaaagaaactatttaatgtaaaatattctacatgtcattcagatattatgtatatcttctagcctttattctgtacttttaatgtacatatttctgtcttgcgtgatttgtatatttcactggtttaaaaaacaaacatcgaaaggcttatgccaaatggaagatagaatataaaataaaacgttacttgtatattggta

SEQ ID NO: 26038 - DNA, 4098 bp, Homo sapiens
attgcaaccggaaccattttttttcctgttaccatctaagaactctgtggtttattattaatattataattattatttggcaataatgggggtgggaaccaagaaaaatatttattttgtggatctttgaaaaggtaatacaagacttcttttgatagtatagaatgaaggggaaataacacataccctaacttagctgtgtggacatggtacacatccagaaggtaaagaaatacattttctttttctcaaatatgccatcatatgggatgggtaggttccagttgaaagagggtggtagaaatctattcacaattcagcttctatgaccaaaatgagttgtaaattctctggtgcaagataaaaggtcttgggaaaacaaaacaaaacaaaacaaacctcccttccccagcagggctgctagcttgctttctgcattttcaaaatgataatttacaatggaaggacaagaatgtcatattctcaaggaaaaaaggtatatcacatgtctcattctcctcaaatattccatttgcagacagaccgtcatattctaatagctcatgaaatttgggcagcagggaggaaagtccccagaaattaaaaaatttaaaactcttatgtcaagatgttgatttgaagctgttataagaattaggattccagattgtaaaaagatccccaaatgattctggacactagatttttttgtttggggaggttggcttgaacataaatgaaaatatcctgttattttcttagggatacttggttagtaaattataatagtaaaaataatacatgaatcccattcacaggttctcagcccaagcaacaaggtaattgcgtgccattcagcactgcaccagagcagacaacctatttgaggaaaaacagtgaaatccaccttcctcttcacactgagccctctctgattcctccgtgttgtgatgtgatgctggccacgtttccaaacggcagctccactgggtcccctttggttgtaggacaggaaatgaaacattaggagctctgcttggaaaacagttcactacttagggatttttgtttcctaaaacttttattttgaggagcagtagttttctatgttttaatgacagaacttggctaatggaattcacagaggtgttgcagcgtatcactgttatgatcctgtgtttagattatccactcatgcttctcctattgtactgcaggtgtaccttaaaactgttcccagtgtacttgaacagttgcatttataaggggggaaatgtggtttaatggtgcctgatatctcaaagtcttttgtacataacatatatatatatatacatatatataaatataaatataaatatatctcattgcagccagtgatttagatttacagtttactctggggttatttctctgtctagagcattgttgtccttcactgcagtccagttgggattattccaaaagttttttgagtcttgagcttgggctgtggccctgctgtgatcataccttgagcacgacgaagcaaccttgtttctgaggaagcttgagttctgactcactgaaatgcgtgttgggttgaagatatcttttttcttttctgcctcacccctttgtctccaacctccatttctgttcactttgtggagagggcattacttgttcgttatagacatggacgttaagagatattcaaaactcagaagcatcagcaatgtttctcttttcttagttcattctgcagaatggaaacccatgcctattagaaatgacagtacttattaattgagtccctaaggaatattcagcccactacatagatagctttttttttttttttttaataaggacacctctttccaaacagtgccatcaaatatgttcttatctcagacttacgttgttttaaaagtttggaaagatacacatctttcataccccccttaggcaggttggctttcatatcacctcagccaactgtggctcttaatttattgcataatgatattcacatcccctcagttgcagtgaattgtgagcaaaagatcttgaaagcaaaaagcactaattagtttaaaatgtcacttttttggtttttattatacaaaaaccatgaagtactttttttatttgctaaatcagattgttcctttttagtgactcatgtttatgaagagagttgagtttaacaatcctagcttttaaaagaaactatttaatgtaaaatattctacatgtcattcagatattatgtatatcttctagcctttattctgtacttttaatgtacatatttctgtcttgcgtgatttgtatatttcactggtttaaaaaacaaacatcgaaaggcttatgccaaatggaagatagaatataaaataaaacgttacttgtatattggtaagtggtttcaattgtccttcagataattcatgtggagatttttggagaaaccatgacggatagtttaggatgactacatgtcaaagtaataaaagagtggtgaattttaccaaaaccaagctatttggaagcttcaaaaggtttctatatgtaatggaacaaaaggggaattctcttttcctatatatgttccttacaaaaaaaaaaaaaaagaaatcaagcagatggcttaaagctggttataggattgctcacattcttttagcattatgcatgtaacttaattgttttagagcgtgttgctgttgtaacatcccagagaagaatgaaaactggttggaaactaaaggttcattgtgttaagtgcaattaatacaagttattgtgcttttcaaaaatgtacacggaaatctggacagtgctgcacagattgatacattagcctttgctttttctctttccggataaccttgtaacatattgaaaccttttaaggatgccaagaatgcattattccacaaaaaaacagcagaccaacatatagagtgtttaaaatagcatttctgggcaaattcaaactcttgtggttctaggactcacatctgtttcagtttttcctcagttgtatattgaccagtgttctttattgcaaaaacatatacccgatttagcagtgtcagcgtattttttcttctcatcctggagcgtattcaagatcttcccaatacaagaaaattaataaaaaatttatatataggcagcagcaaaagagccatgttcaaaatagtcattatgggctcaaatagaaagaagacttttaagttttaatccagtttatctgttgagttctgtgagctactgacctcctgagactggcactgtgtaagttttagttgcctaccctagctcttttctcgtacaattttgccaataccaagtttcaatttgtttttacaaaacattattcaagccactagaattatcaaatatgacgctatagcagagtaaatactctgattaagagaccggtactagctaactccaagagatcgttagcagcatcagtccacaaacacttagtggcccacaatatatagagagatagaaaaggtagttataacttgaagcatgtatttaatgcaaataggcacgaaggcacaggtctaaaatactacattgtcactgtaagctatacttttaaaatatttattttttttaaagtattttctagtcttttctctctctgtggaatggtgaaagagagatgccgtgttttgaaagtaagatgatgaaatgaatttttaattcaagaaacattcagaaacataggaattaaaacttagagaaatgatctaatttccctgttcacacaaactttacactttaatctgatgattggatattttattttagtgaaacatcatcttgttagctaactttaaaaaatggatgtagaatgattaaaggttggtatgatttttttttaatgtatcagtttgaacctagaatattgaattaaaatgctgtctcagtattttaaaagcaaaaaaggaatggaggaaaattgcatcttagaccatttttatatgcagtgtacaatttgctgggctagaaatgagataaagattatttatttttgttcatatcttgtacttttctattaaaatcattttatgaaatccaaaaaaaagt

SEQ ID NO: 26039 - DNA, 506 bp, Homo sapiens
aggcagccgcgagacggccttcacatacgcggtgagcgcagcaggggtggtgaacgccatgagccgggcgtgccgcgagggcgagctgtccacctgcggctgcagccgcgccgcgcgccccaaggacctgccgcgggactggctctggggcggctgcggcgacaacatcgactatggctaccgctttgccaaggagttcgtggacgcccgcgagcgggagcgcatccacgccaagggctcctacgagagtgctcgcatcctcatgaacctgcacaacaacgaggccggccgcaggacggtgtacaacctggctgatgtggcctgcaagtgccatggggtgtccggctcatgtagcctgaagacatgctggctgcagctggcagacttccgcaaggtgggtgatgccctgaaggagaagtacgacactggtttaaaaaacaaacatcgaaaggcttatgccaaatggaagatagaatataaaataaaacgttacttgtatattggta

SEQ ID NO: 26040 - DNA, 4277 bp, Homo sapiens
attgcaaccggaaccattttttttcctgttaccatctaagaactctgtggtttattattaatattataattattatttggcaataatgggggtgggaaccaagaaaaatatttattttgtggatctttgaaaaggtaatacaagacttcttttgatagtatagaatgaaggggaaataacacataccctaacttagctgtgtggacatggtacacatccagaaggtaaagaaatacattttctttttctcaaatatgccatcatatgggatgggtaggttccagttgaaagagggtggtagaaatctattcacaattcagcttctatgaccaaaatgagttgtaaattctctggtgcaagataaaaggtcttgggaaaacaaaacaaaacaaaacaaacctcccttccccagcagggctgctagcttgctttctgcattttcaaaatgataatttacaatggaaggacaagaatgtcatattctcaaggaaaaaaggtatatcacatgtctcattctcctcaaatattccatttgcagacagaccgtcatattctaatagctcatgaaatttgggcagcagggaggaaagtccccagaaattaaaaaatttaaaactcttatgtcaagatgttgatttgaagctgttataagaattaggattccagattgtaaaaagatccccaaatgattctggacactagatttttttgtttggggaggttggcttgaacataaatgaaaatatcctgttattttcttagggatacttggttagtaaattataatagtaaaaataatacatgaatcccattcacaggttctcagcccaagcaacaaggtaattgcgtgccattcagcactgcaccagagcagacaacctatttgaggaaaaacagtgaaatccaccttcctcttcacactgagccctctctgattcctccgtgttgtgatgtgatgctggccacgtttccaaacggcagctccactgggtcccctttggttgtaggacaggaaatgaaacattaggagctctgcttggaaaacagttcactacttagggatttttgtttcctaaaacttttattttgaggagcagtagttttctatgttttaatgacagaacttggctaatggaattcacagaggtgttgcagcgtatcactgttatgatcctgtgtttagattatccactcatgcttctcctattgtactgcaggtgtaccttaaaactgttcccagtgtacttgaacagttgcatttataaggggggaaatgtggtttaatggtgcctgatatctcaaagtcttttgtacataacatatatatatatatacatatatataaatataaatataaatatatctcattgcagccagtgatttagatttacagtttactctggggttatttctctgtctagagcattgttgtccttcactgcagtccagttgggattattccaaaagttttttgagtcttgagcttgggctgtggccctgctgtgatcataccttgagcacgacgaagcaaccttgtttctgaggaagcttgagttctgactcactgaaatgcgtgttgggttgaagatatcttttttcttttctgcctcacccctttgtctccaacctccatttctgttcactttgtggagagggcattacttgttcgttatagacatggacgttaagagatattcaaaactcagaagcatcagcaatgtttctcttttcttagttcattctgcagaatggaaacccatgcctattagaaatgacagtacttattaattgagtccctaaggaatattcagcccactacatagatagctttttttttttttttttaataaggacacctctttccaaacagtgccatcaaatatgttcttatctcagacttacgttgttttaaaagtttggaaagatacacatctttcataccccccttaggcaggttggctttcatatcacctcagccaactgtggctcttaatttattgcataatgatattcacatcccctcagttgcagtgaattgtgagcaaaagatcttgaaagcaaaaagcactaattagtttaaaatgtcacttttttggtttttattatacaaaaaccatgaagtactttttttatttgctaaatcagattgttcctttttagtgactcatgtttatgaagagagttgagtttaacaatcctagcttttaaaagaaactatttaatgtaaaatattctacatgtcattcagatattatgtatatcttctagcctttattctgtacttttaatgtacatatttctgtcttgcgtgatttgtatatttcactggtttaaaaaacaaacatcgaaaggcttatgccaaatggaagatagaatataaaataaaacgttacttgtatattggtaagtggtttcaattgtccttcagataattcatgtggagatttttggagaaaccatgacggatagtttaggatgactacatgtcaaagtaataaaagagtggtgaattttaccaaaaccaagctatttggaagcttcaaaaggtttctatatgtaatggaacaaaaggggaattctcttttcctatatatgttccttacaaaaaaaaaaaaaaagaaatcaagcagatggcttaaagctggttataggattgctcacattcttttagcattatgcatgtaacttaattgttttagagcgtgttgctgttgtaacatcccagagaagaatgaaaaggcacatgcttttatccgtgaccagatttttagtccaaaaaaatgtatttttttgtgtgtttaccactgcaactattgcacctctctatttgaatttactgtggaccatgtgtggtgtctctatgccctttgaaagcagtttttataaaaagaaagcccgggtctgcagagaatgaaaactggttggaaactaaaggttcattgtgttaagtgcaattaatacaagttattgtgcttttcaaaaatgtacacggaaatctggacagtgctgcacagattgatacattagcctttgctttttctctttccggataaccttgtaacatattgaaaccttttaaggatgccaagaatgcattattccacaaaaaaacagcagaccaacatatagagtgtttaaaatagcatttctgggcaaattcaaactcttgtggttctaggactcacatctgtttcagtttttcctcagttgtatattgaccagtgttctttattgcaaaaacatatacccgatttagcagtgtcagcgtattttttcttctcatcctggagcgtattcaagatcttcccaatacaagaaaattaataaaaaatttatatataggcagcagcaaaagagccatgttcaaaatagtcattatgggctcaaatagaaagaagacttttaagttttaatccagtttatctgttgagttctgtgagctactgacctcctgagactggcactgtgtaagttttagttgcctaccctagctcttttctcgtacaattttgccaataccaagtttcaatttgtttttacaaaacattattcaagccactagaattatcaaatatgacgctatagcagagtaaatactctgattaagagaccggtactagctaactccaagagatcgttagcagcatcagtccacaaacacttagtggcccacaatatatagagagatagaaaaggtagttataacttgaagcatgtatttaatgcaaataggcacgaaggcacaggtctaaaatactacattgtcactgtaagctatacttttaaaatatttattttttttaaagtattttctagtcttttctctctctgtggaatggtgaaagagagatgccgtgttttgaaagtaagatgatgaaatgaatttttaattcaagaaacattcagaaacataggaattaaaacttagagaaatgatctaatttccctgttcacacaaactttacactttaatctgatgattggatattttattttagtgaaacatcatcttgttagctaactttaaaaaatggatgtagaatgattaaaggttggtatgatttttttttaatgtatcagtttgaacctagaatattgaattaaaatgctgtctcagtattttaaaagcaaaaaaggaatggaggaaaattgcatcttagaccatttttatatgcagtgtacaatttgctgggctagaaatgagataaagattatttatttttgttcatatcttgtacttttctattaaaatcattttatgaaatccaaaaaaaagt

SEQ ID NO: 26041 - DNA, 3807 bp, Homo sapiens
attgcaaccggaaccattttttttcctgttaccatctaagaactctgtggtttattattaatattataattattatttggcaataatgggggtgggaaccaagaaaaatatttattttgtggatctttgaaaaggtaatacaagacttcttttgatagtatagaatgaaggggaaataacacataccctaacttagctgtgtggacatggtacacatccagaaggtaaagaaatacattttctttttctcaaatatgccatcatatgggatgggtaggttccagttgaaagagggtggtagaaatctattcacaattcagcttctatgaccaaaatgagttgtaaattctctggtgcaagataaaaggtcttgggaaaacaaaacaaaacaaaacaaacctcccttccccagcagggctgctagcttgctttctgcattttcaaaatgataatttacaatggaaggacaagaatgtcatattctcaaggaaaaaaggtatatcacatgtctcattctcctcaaatattccatttgcagacagaccgtcatattctaatagctcatgaaatttgggcagcagggaggaaagtccccagaaattaaaaaatttaaaactcttatgtcaagatgttgatttgaagctgttataagaattaggattccagattgtaaaaagatccccaaatgattctggacactagatttttttgtttggggaggttggcttgaacataaatgaaaatatcctgttattttcttagggatacttggttagtaaattataatagtaaaaataatacatgaatcccattcacaggttctcagcccaagcaacaaggtaattgcgtgccattcagcactgcaccagagcagacaacctatttgaggaaaaacagtgaaatccaccttcctcttcacactgagccctctctgattcctccgtgttgtgatgtgatgctggccacgtttccaaacggcagctccactgggtcccctttggttgtaggacaggaaatgaaacattaggagctctgcttggaaaacagttcactacttagggatttttgtttcctaaaacttttattttgaggagcagtagttttctatgttttaatgacagaacttggctaatggaattcacagaggtgttgcagcgtatcactgttatgatcctgtgtttagattatccactcatgcttctcctattgtactgcaggtgtaccttaaaactgttcccagtgtacttgaacagttgcatttataaggggggaaatgtggtttaatggtgcctgatatctcaaagtcttttgtacataacatatatatatatatacatatatataaatataaatataaatatatctcattgcagccagtgatttagatttacagtttactctggggttatttctctgtctagagcattgttgtccttcactgcagtccagttgggattattccaaaagttttttgagtcttgagcttgggctgtggccctgctgtgatcataccttgagcacgacgaagcaaccttgtttctgaggaagcttgagttctgactcactgaaatgcgtgttgggttgaagatatcttttttcttttctgcctcacccctttgtctccaacctccatttctgttcactttgtggagagggcattacttgttcgttatagacatggacgttaagagatattcaaaactcagaagcatcagcaatgtttctcttttcttagttcattctgcagaatggaaacccatgcctattagaaatgacagtacttattaattgagtccctaaggaatattcagcccactacatagatagctttttttttttttttttaataaggacacctctttccaaacagtgccatcaaatatgttcttatctcagacttacgttgttttaaaagtttggaaagatacacatctttcataccccccttaggcaggttggctttcatatcacctcagccaactgtggctcttaatttattgcataatgatattcacatcccctcagttgcagtgaattgtgagcaaaagatcttgaaagcaaaaagcactaattagtttaaaatgtcacttttttggtttttattatacaaaaaccatgaagtactttttttatttgctaaatcagattgttcctttttagtgactcatgtttatgaagagagttgagtttaacaatcctagcttttaaaagaaactatttaatgtaaaatattctacatgtcattcagatattatgtatatcttctagcctttattctgtacttttaatgtacatatttctgtcttgcgtgatttgtatatttcactggtttaaaaaacaaacatcgaaaggcttatgccaaatggaagatagaatataaaataaaacgttacttgtatattggtaagtggtttcaattgtccttcagataattcatgtggagatttttggagaaaccatgacggatagtttaggatgactacatgtcaaagtaataaaagagtggtgaattttaccaaaaccaagctatttggaagcttcaaaaggtttctatatgtaatggaacaaaaggggaattctcttttcctatatatgttccttacaaaaaaaaaaaaaaagaaatcaagcagatggcttaaagctggttataggattgctcacattcttttagcattatgcatgtaacttaattgttttagagcgtgttgctgttgtaacatcccagagaagaatgaaaaggcacatgcttttatccgtgaccagatttttagtccaaaaaaatgtatttttttgtgtgtttaccactgcaactattgcacctctctatttgaatttactgtggaccatgtgtggtgtctctatgccctttgaaagcagtttttataaaaagaaagcccgggtctgcagagaatgaaaactggttggaaactaaaggttcattgtgttaagtgcaattaatacaagttattgtgcttttcaaaaatgtacacggaaatctggacagtgctgcacagattgatacattagcctttgctttttctctttccggataaccttgtaacatattgaaaccttttaaggatgccaagaatgcattattccacaaaaaaacagcagaccaacatatagagtgtttaaaatagcatttctgggcaaattcaaactcttgtggttctaggactcacatctgtttcagtttttcctcagttgtatattgaccagtgttctttattgcaaaaacatatacccgatttagcagtgtcagcgtattttttcttctcatcctggagcgtattcaagatcttcccaatacaagaaaattaataaaaaatttatatataggcagcagcaaaagagccatgttcaaaatagtcattatgggctcaaatagaaagaagacttttaagttttaatccagtttatctgttgagttctgtgagctactgacctcctgagactggcactgtgtaagttttagttgcctaccctagctcttttctcgtacaattttgccaataccaagtttcaatttgtttttacaaaacattattcaagccactagaattatcaaatatgacgctatagcagagtaaatactctgattaagagaccggtactagctaactccaagagatcgttagcagcatcagtccacaaacacttagtggcccacaatatatagagagatagaaaaggtagttataacttacagtgacaatgtagtattttagacctgtgccttcgtgcctatttgcattaaatacatgcttcaagttatagtcgacgcggccgttaatttagtagtag

SEQ ID NO: 26042 - DNA, 1281 bp, Homo sapiens
  misc_feature (248)..(248): n is a, c, g, or t
tacacatgcgataagctgggcgcatactagaaggctttgtgaggatgcccatagcttgtttcttccgcgatccatggtgatgacctagtgtatggagttgtcaccaaattagcataacgcggccgcgcagagtacacacagcatcctgtgtcgtgatctagagtacctaccgatgtcctggttctcgagggtcatccatctggtatgctatactaagacggccagtgcactcgattgcgatatcatanttacggattgacctgtgtcagcgtattttttcttctcatcctggagcgtattcaagatcttcccaatacaagaaaattaataaaaaatttatatataggcagcagcaaaagagccatgttcaaaatagtcattatgggctcaaatagaaagaagacttttaagttttaatccagtttatctgttgagttctgtgagctactgacctcctgagactggcactgtgtaagttttagttgcctaccctagctcttttctcgtacaattttgccaataccaagtttcaatttgtttttacaaaacattattcaagccactagaattatcaaatatgacgctatagcagagtaaatactctgattaagagaccggtactagctaactccaagagatcgttagcagcatcagtccacaaacacttagtggcccacaatatatagagagatagaaaaggtagttataacttgaagcatgtatttaatgcaaataggcacgaaggcacaggtctaaaatactacattgtcactgtaagctatacttttaaaatatttattttttttaaagtattttctagtcttttctctctctgtggaatggtgaaagagagatgccgtgttttgaaagtaagatgatgaaatgaatttttaattcaagaaacattcagaaacataggaattaaaacttagagaaatgatctaatttccctgttcacacaaactttacactttaatctgatgattggatattttattttagtgaaacatcatcttgttagctaactttaaaaaatggatgtagaatgattaaaggttggtatgatttttttttaatgtatcagtttgaacctagaatattgaattaaaatgctgtctcagtattttaaaagcaaaaaaggaatggaggaaaattgcatcttagaccatttttatatgcagtgtacaatttgctgggctagaaatgagataaagattatttatttttgttcatatcttgtacttttctattaaaatcattttatgaaatccaaaaaaaagt

SEQ ID NO: 26043 - DNA, 2377 bp, Homo sapiens
aggcagccgcgagacggccttcacatacgcggtgagcgcagcaggggtggtgaacgccatgagccgggcgtgccgcgagggcgagctgtccacctgcggctgcagccgcgccgcgcgccccaaggacctgccgcgggactggctctggggcggctgcggcgacaacatcgactatggctaccgctttgccaaggagttcgtggacgcccgcgagcgggagcgcatccacgccaagggctcctacgagagtgctcgcatcctcatgaacctgcacaacaacgaggccggccgcaggacggtgtacaacctggctgatgtggcctgcaagtgccatggggtgtccggctcatgtagcctgaagacatgctggctgcagctggcagacttccgcaaggtgggtgatgccctgaaggagaagtacgacactggtttaaaaaacaaacatcgaaaggcttatgccaaatggaagatagaatataaaataaaacgttacttgtatattggtaagtggtttcaattgtccttcagataattcatgtggagatttttggagaaaccatgacggatagtttaggatgactacatgtcaaagtaataaaagagtggtgaattttaccaaaaccaagctatttggaagcttcaaaaggtttctatatgtaatggaacaaaaggggaattctcttttcctatatatgttccttacaaaaaaaaaaaaaaagaaatcaagcagatggcttaaagctggttataggattgctcacattcttttagcattatgcatgtaacttaattgttttagagcgtgttgctgttgtaacatcccagagaagaatgaaaaggcacatgcttttatccgtgaccagatttttagtccaaaaaaatgtatttttttgtgtgtttaccactgcaactattgcacctctctatttgaatttactgtggaccatgtgtggtgtctctatgccctttgaaagcagtttttataaaaagaaagcccgggtctgcagagaatgaaaactggttggaaactaaaggttcattgtgttaagtgcaattaatacaagttattgtgcttttcaaaaatgtacacggaaatctggacagtgctgcacagattgatacattagcctttgctttttctctttccggataaccttgtaacatattgaaaccttttaaggatgccaagaatgcattattccacaaaaaaacagcagaccaacatatagagtgtttaaaatagcatttctgggcaaattcaaactcttgtggttctaggactcacatctgtttcagtttttcctcagttgtatattgaccagtgttctttattgcaaaaacatatacccgatttagcagtgtcagcgtattttttcttctcatcctggagcgtattcaagatcttcccaatacaagaaaattaataaaaaatttatatataggcagcagcaaaagagccatgttcaaaatagtcattatgggctcaaatagaaagaagacttttaagttttaatccagtttatctgttgagttctgtgagctactgacctcctgagactggcactgtgtaagttttagttgcctaccctagctcttttctcgtacaattttgccaataccaagtttcaatttgtttttacaaaacattattcaagccactagaattatcaaatatgacgctatagcagagtaaatactctgattaagagaccggtactagctaactccaagagatcgttagcagcatcagtccacaaacacttagtggcccacaatatatagagagatagaaaaggtagttataacttgaagcatgtatttaatgcaaataggcacgaaggcacaggtctaaaatactacattgtcactgtaagctatacttttaaaatatttattttttttaaagtattttctagtcttttctctctctgtggaatggtgaaagagagatgccgtgttttgaaagtaagatgatgaaatgaatttttaattcaagaaacattcagaaacataggaattaaaacttagagaaatgatctaatttccctgttcacacaaactttacactttaatctgatgattggatattttattttagtgaaacatcatcttgttagctaactttaaaaaatggatgtagaatgattaaaggttggtatgatttttttttaatgtatcagtttgaacctagaatattgaattaaaatgctgtctcagtattttaaaagcaaaaaaggaatggaggaaaattgcatcttagaccatttttatatgcagtgtacaatttgctgggctagaaatgagataaagattatttatttttgttcatatcttgtacttttctattaaaatcattttatgaaatccaaaaaaaagt

SEQ ID NO: 26044 - DNA, 302 bp, Homo sapiens
ccccgttctgggcccccaagtaagcattctccccagcatagcacctggcaaggaagactcacagaaaccactggctgaatggagtcaagtccactcctgggcctgaagtgacaccaccgaggacagcaaaaggatgactcaccctttcactaaaggcccccaactgccaggtagtggtagcttcccctcctttttgtgcacttcggcccatcccctgctgcactgatctgacggaactaaggaaggcccgagacagctctgccgctccgagaagttcagctttcttacagctacagacagca

SEQ ID NO: 26045 - DNA, 273 bp, Homo sapiens
agtaaattaaagcaatatagtaaaacaatgcacatcttgatggaatctcaggatcacaaggttgtggtgaaggaaatttgaagatgtccaggaaagaaagacaaatgagatgaatcttgcagctgcccttcaagggggcatgggccgggtggccatgattctccgtgatgttgcaggaattctggctgggtcctcaggagcctttttttcttgtccacattcaccttcggtgggtggtccctggtggtcatgaccgcactcagggcccggggc

SEQ ID NO: 26046 - DNA, 282 bp, Homo sapiens
ccaagctcctctcaagtgataggcatgagccactgcatctggccaaaaggcactttttatacttaattcatcctttcagcatcctatgaaaagagtctgggctgggtgcagtggctcacgcctgtaatcccagcactctgggaggctgaggcgggcggatcacttgaagtcaggcgttcgagaccagactggccaacatgatgaaaccccatctctactaaaaatacaaaaatcagccaggcgtggtggtgggcacctgtagtcccaggtactcaggaggcc

SEQ ID NO: 26047 - DNA, 416 bp, Homo sapiens
ttttctcagggatcactgtccttcgttgcccaattcccagcgtctggtaaactgttgtttcatgtccattgttttttgggtttgtggttgctgctgcttcgggtgggaggggatagattcaatccctgtgactctatcttggccagaagccacactctctaatctcatgctgatgttttctgtgttgacctgtcctgctgccacctgtcctgtgagctccttcaaggcagggctgtgctgatgccaagggatttagcaccatttttgtgctattcataaagtccacaaatgtttgttgaataaagtaagtgttagactccaaaacatacaaagatgaataagacaatatctacaatatctctgtcttgaaaaaacttagaaaccactgggaagacaaatctcatgaagaagcattc

SEQ ID NO: 26048 - DNA, 1676 bp, Homo sapiens
ctccatcttgtaaggatgcaaagaagccatgaaaataagtaatatcaactcctgaggataaaacgttacttgactagagttagctttttaattgtaatcatttataaacttctttgttccttacatataagcatagtcataaccatggtacccaaaattttctataagttattgtaactccttaaaggtcttgctacagttcttttatccagtacaaataattgggaaaatgtaaagctgaatgaaatctagtgagcctcatatcctcccttttagatattgattttaagtttgcttttcacagctgctaaaaagtaacaactgatttttagttccacaacctctctttcttcaatttagatggatcatacaataaagcaaaatctggctggttacagtggctcacacctataatcccagcactttgggaggctgaggtggagggtctcatgagcccaggagttcaagaccaacctgggcaatatagtgagactctttctatttaaacaaaaacaaaaacaaacaaacaaacaaacaaaaagctgggcatgatgcacacctttagtttcagctactaaggaggctgaggttggaggatcacttgagcctaggaggtcaacactgcagtgagctatgatcatgctactgccctccagcctgggcaacagagcaagaccctgtctccaaaaacataaataattaaatataaataaaaataaagcaaaatctgttgggaaacgagaaaaaggagaggaatttttcaggaataatcataaaaagaaatgatcatcagactgaaagtccagagcctgagaaatgaaaacatatttttaagcattggtgttgaccatgcagacaaacttttgttaattcagagcgatacaaaaggcactttgaatctataaaacttgaaaaagttaaaaattgtatgtcggataaagctttaagtcatctgtcactattaacctcagtgcagcaattctgactcctgtgcctggattccttttatgataattttgccacctacaggacagattaggtgctggtcgcctgaattattttgtgttctgaattattttgagctctaaaatggtaaagtacaaatactcattgttttactgtgcctttggccttttataaaaaggtatttataattcgttgataaaaaccaatatttgaagctgttgattaccaacaaaaaagtttcactctctttatagtgcttcaggatacaactttttcagggccttattagagaaaaactgattcacatgttattcttctaaagctaaattattaaaatgtaggttgaaagattggattgattgtgaatctacactaaagatatggttccaggcagacctccttagagacctccaggcagacctccttactgtcttcagtgatgtttaatttcattactgttactgggtgccaagtgtctttcatttggaagtgaacttactccagttattgaatgtttatcatatcataatttgcatttttccaacattgaaggtattttaaaaagtcactaagagattcattcttttattattcaactacaaaaaaatagtgtaatgatcagaatttaaaatgtgtgattctttttcttctgtaagtatgtattgctatgataaataaaaaatggcaggaccattgtttttattaaaata

SEQ ID NO: 26049 - DNA, 1652 bp, Homo sapiens
ctccatcttgtaaggatgcaaagaagccatgaaaataagtaatatcaactcctgaggataaaacgttacttgactagagttagctttttaattgtaatcatttataaacttctttgttccttacatataagcatagtcataaccatggtacccaaaattttctataagttattgtaactccttaaaggtcttgctacagttcttttatccagtacaaataattgggaaaatgtaaagctgaatgaaatctagtgagcctcatatcctcccttttagatattgattttaagtttgcttttcacagctgctaaaaagtaacaactgatttttagttccacaacctctctttcttcaatttagatggatcatacaataaagcaaaatctggctggttacagtggctcacacctataatcccagcactttgggaggctgaggtggagggtctcatgagcccaggagttcaagaccaacctgggcaatatagtgagactctttctatttaaacaaaaacaaaaacaaacaaacaaacaaacaaaaagctgggcatgatgcacacctttagtttcagctactaaggaggctgaggttggaggatcacttgagcctaggaggtcaacactgcagtgagctatgatcatgctactgccctccagcctgggcaacagagcaagaccctgtctccaaaaacataaataattaaatataaataaaaataaagcaaaatctgttgggaaacgagaaaaaggagaggaatttttcaggaataatcataaaaagaaatgatcatcagactgaaagtccagagcctgagaaatgaaaacatatttttaagcattggtgttgaccatgcagacaaacttttgttaattcagagcgatacaaaaggcactttgaatctataaaacttgaaaaagttaaaaattgtatgtcggataaagctttaagtcatctgtcactattaacctcagtgcagcaattctgactcctgtgcctggattccttttatgataattttgccacctacaggacagattaggtgctggtcgcctgaattattttgtgttctgaattattttgagctctaaaatggtaaagtacaaatactcattgttttactgtgcctttggccttttataaaaaggtatttataattcgttgataaaaaccaatatttgaagctgttgattaccaacaaaaaagtttcactctctttatagtgcttcaggatacaactttttcagggccttattagagaaaaactgattcacatgttattcttctaaagctaaattattaaaatgtaggttgaaagattggattgattgtgaatctacactaaagatatggttccaggcagacctccttactgtcttcagtgatgtttaatttcattactgttactgggtgccaagtgtctttcatttggaagtgaacttactccagttattgaatgtttatcatatcataatttgcatttttccaacattgaaggtattttaaaaagtcactaagagattcattcttttattattcaactacaaaaaaatagtgtaatgatcagaatttaaaatgtgtgattctttttcttctgtaagtatgtattgctatgataaataaaaaatggcaggaccattgtttttattaaaata

SEQ ID NO: 26050 - DNA, 764 bp, Homo sapiens
cccctgcaggacgattgcctgcaagacagggcctggagaaggccagggcacccaaggccacagaaatgcccagggatgagtcccggctggagatgccttggctgaactcactgtgtacttccagggcgcacagggcagtgctcgagctggtactacacatgaagatgtcccgctctccactgctcaaggagagagtgcctgacctgagctgggcccatcagatccagtacttacctggaataggaaaaagatggggagagtgaccaaagattacaaaaatctctgaagcttatccacttgagagagagtccctgaagatactggcctctcattcctgctatgtatgtccaatgtgactgaactctgaataaaatatacaagttataacaatgtagcaattgacccagcaaacgaggacacaaacgtgttggagggatttgagtttgatgtcatgcatataatgtgatcccactgtatgactacacaaatgttggcaaaagtgagctcagaggaaatggtaggcaagtacttcccagttttgaccagaagatggagaaaaaaagaattctcaaaaaatgtgtctacggagaaatagacaagcgatgcacgacagatacatgtgtcagtctggtccctgcagttatatttgtaataatacacattggagcaatttcatggccatcggttagagaatgtttgaggaatgatccattcatatcaagaagcacatttcaaagatcagcctgatggaaatgctggagacc

SEQ ID NO: 26051 - DNA, 724 bp, Homo sapiens
cccctgcaggacgattgcctgcaagacagggcctggagaaggccagggcacccaaggccacagaaatgcccagggatgagtcccggctggagatgccttggctgaactcactgtgtacttccagggcgcacagggcagtgctcgagctggtactacacatgaagatgtcccgctctccactgctcaaggagagagtgcctgacctgagctgggcccatcagatccagtacttacctggaataggaaaaagatggggagagtgaccaaagattacaaaaatctctgaagcttatccacttgagagagagtccctgaagatactggcctctcattcctgctatgtatgtccaatgtgactgaactctgaataaaatatacaagttataacaatgtagcaattgacccagcaaacgaggacacaaacgtgttggagggatttgagtttgatgtcatgcatataatgtgatcccactgtatgactacacaaatgttggcaaaagtgagctcagaggaaatggtaggcaagtacttcccagttttgaccagaagatggagaaaaaaagaattctcaaaaaatatgtgtcagtctggtccctgcagttatatttgtaataatacacattggagcaatttcatggccatcggttagagaatgtttgaggaatgatccattcatatcaagaagcacatttcaaagatcagcctgatggaaatgctggagacc

SEQ ID NO: 26052 - DNA, 760 bp, Homo sapiens
ccggctgcaggacacagcccagcaggagaagcttttccctccattctttcaaggaatctcgctctgtcacccaggctggagtgaagtggcccaatctcggcttaccacaacctctgcctcccaggttcaagcgattctcctgcctcagcctcccaagtagctgagattacagagagatatatgcccaggatggggctgaataaaaagctaataataatagccaccacctgtggagagcttctcttggaccacgcattctgctaagtccttctcttgtatgaggaccagttgtgcccagagaaccttctctgtctcctctaaccatgggataaaaggagatttccacaagagcggctcagggacgcagcccatctcttaagaaggaggctctgagagggacaagaccatggatgcagcacatggccacaaggcagtttcaagatgcccatgtcaggcagaggatggctcagtggtctctaacccacctaacatttcatgaactttactcctggtcccgctcccaaattagacactggagataatggatcactatactgcactgaagactcggaggggttgagccgctggagccacgcaaattcagacacctcttccgccccaggtcactctactcgcccacgctgcctgccacacccatccggttgtgcgggacactccccgcgtttcttcagcgattcttatcgggctccctccttgttcaataaaggtgaagggtgtggggttttctgtgcatacgctc

SEQ ID NO: 26053 - DNA, 475 bp, Homo sapiens
ctatctggtgtgtaacatgaggcaaacacacagtagtgtcagtgatgaagagcccctttaactgaggtaacccgagcattttctctgagaagctgctggtcatgattcaaagtgccacctcgggaggcagcctgcctgggtttattcagttcctctgtcctcaaatttccaccactccctcgctgctgctcactctttgaggagaaccttgcttcttatttcactgagaagaaggaattatcagaagagaactttcacatgctctcaccaccaaagccccttcccttcctacacctctacccacctcccttccctaagacactgtgtgaataagctgtccatgactatcctaccaccacgtacccaatcccgctcacctttaaagaactcagcaactacaacctccccctctagtagaccaatttttctctttctaatggatcattcctgtcagcatttaaacatgttattgata

SEQ ID NO: 26054 - DNA, 221 bp, Homo sapiens
gcagtggatgactgaaaatggtagagcttataaagcttatgaagtgcatattttttattaaagtaaacatatgggctgtgtgtggtggctacttgggaggctgaggcaggaggattgcttgagccaaggagttcgaagttaaggtgagctataattgtgccactgcattccagcctgggtaacagagtgaaaccttgtctctcaaaaaaaaaaaaaaaaaa

SEQ ID NO: 26055 - DNA, 363 bp, Homo sapiens
tctcaagagaatctatccatgtgtcttgcttttgttccttctctgcagaaagaaagaagctaagcagtaaagttgggttgcacaggaaatgatgatgcttcaatttcttaatagttaaaaagtgctaaatactacttgaaattattgtttacagattagtgacaagagctggggttaggatccggttggactctgacatcggatgccctcaaacatacagaacttccaaactcaagtccagccataagctattttgccaacatgtcagagtaatctgtatttttgtatgtgatttctacttttatagacttgttttaaaacaataaaacacatttttataaaaatgagtgcttaaactaagtt

SEQ ID NO: 26056 - DNA, 266 bp, Homo sapiens
ggccgccgttaacgaatccatatagtattgccttccgcttatttcctttattatagtgacagtaacaagagctggggttaggatccggttggactctgacatcggatgccctcaaacatacagaacttccaaactcaagtccagccataagctattttgccaacatgtcagagtaatctgtatttttgtatgtgatttctacttttatagacttgttttaaaacaataaaacacatttttataaaaatgagtgcttaaactaagtt

SEQ ID NO: 26057 - DNA, 265 bp, Homo sapiens
acaacacataaaagaaatgaataattttaaaagatcaaaatataatttcagatatcgacagcaacaagagctggggttaggatccggttggactctgacatcggatgccctcaaacatacagaacttccaaactcaagtccagccataagctattttgccaacatgtcagagtaatctgtatttttgtatgtgatttctacttttatagacttgttttaaaacaataaaacacatttttataaaaatgagtgcttaaactaagtt

SEQ ID NO: 26058 - DNA, 3473 bp, Homo sapiens
gaattccgggctgtagagcttgcccgcgcagtggggatggaacgttgctaggcttagcgggtctggctgctgggggcccgagcagcacgctcggagccgccgcgcgccaaagcgggaatctgggaggcgagcagctctgcagttaatgcacgtattttaaactcccgggcctgcggacgctatgcacaggaagcacctccaggagattccagacctgagtagcaacgttgccaccagcttcacgtggggatgggattccagcaagacttctgaactgctgtcaggcatgggggtctccgccctggagaaagaggagcccgacagtgagaacatcccccaggaactgctctcaaacctgggccacccggagagccccccacggaaacggctgaagagcaaagggagtgacaaagactttgtgattgtccgcaggcctaagctaaatcgagagaactttccaggtgtttcatgggactcccttccggatgagctgctcttgggaatcttttcctgtctgtgcctccctgagctgctaaaggtctctggtgtttgtaagaggtggtatcgcctagcgtctgatgagtctctatggcagaccttagacctcacaggtaaaaatctgcacccggatgtgactggtcggttgctgtctcaaggggtgattgccttccgctgcccacgatcatttatggaccaaccattggctgaacatttcagcccttttcgtgtacagcacatggacctatcgaactcagttatagaagtgtccaccctccacggcatactgtctcagtgttccaagttgcagaatctaagcctggaaggcctgcggctttcggatcccattgtcaatactctcgcaaaaaactcaaatttagtgcgacttaacctttctgggtgttctggattctctgaatttgccctgcagactttgctaagcagctgttccagactggatgagctgaacctctcctggtgttttgatttcactgaaaagcatgtacaggtggctgttgcgcatgtgtcagagaccatcacccagctgaatcttagcggctacagaaagaatctccagaaatcagatctctctactttagttagaagatgccccaatcttgtccatctagacttaagtgatagtgtcatgctaaagaatgactgctttcaggaatttttccagctcaactacctccaacacctatcactcagtcggtgctatgatataatacctgaaactttacttgaacttggagaaattcccacactaaaaacactacaagtttttggaatcgtgccagatggtacccttcaactgttaaaggaagcccttcctcatctacagattaattgctcccatttcaccaccattgccaggccaactattggcaacaaaaagaaccaggagatatggggcatcaaatgccgactgacactgcaaaagcccagttgtctatgaagtatttattgcaggatggtgtctcttctttagaacagggaaaataggcaggaagcccaattgctggagtacttagctagttttattcttggttttccctttgccttcattctgcaagtatactagggagccatttgagagggaaaactatgaaatcttgctttttgaaatgattctaaaagcttctatcactgctttgctcttaagagccaaagttgtaggccttttgaaattttaggagagtgagcctataatttcaagataccttaaagagcaaaatttgagccacctcttccaagtgcccttcttactaagtctattcagaatcaagcttaaaaattaccaccagcaaacaatcttcatagcccatataacttttatctatttaattttatagtattgctttataagacagcttagaagaacaataagctattgtattatgagctgaacaaaaagagaatcataggatagtagcgtctgaggccatcttttctaggaataggaaagagaaaaatgtatttgaattttgcctttagatttgaaattaggttaatagaaataagtaaccccatgtaattcaccttaaaacttaacaaaagaccaaacattacaaaacccagaggtatagaatcaatataggatttgaaggcccagcagacagttttctatgacaggttaatctgaagtatcctgtaatgttcattaagttactgtgtttccagaatctaaattagatgagaaatataattgtggttttctaacttgataatcaaattatgttaacatgggtcctttagcttttaaaatgacttgctttgttttagaaaggtggtattaatccactctctattcttgaaaatttggatgggagaattctgaagttgcctgctgttttcctttagcgctgaggttcttaaggttacttttatattactctggaatcaagtattttaaattgtattttttttttaaatgatctctcagcaataattgtttgaaactatccatatataaggttatcagacctacagttccctaagaggaactgcatgttctcttcaatcagaaatatacagtagaagcaggtatatcttccatgcagtttcagtagtaagcactacttatacctacataagagttaaaatccagatgtgggaccttttgataccatcagtgatatatatttttttaaactggtacagagaagtgaaaagattaaattctacttctatttttcttttttttttttggaaacggagtctcgctctgtcaccaaggccggagtgcagtggtgcgatctcggctcactgcaagctccgcctcccaggttcacgtcattctcctgcctcagcctcccgactagctgggactacaggcgcccaccaccacgcccggctaattttttggtatttttagtagagacggggtttcaccatgttagccaggatggtctcaatctcctgacctcatgatccgcccgtcttggcctcccaaagtgctgggattacaggcatgagcaactgcgcccagccaaattctacttcttaaaaatcacaaaaactagtttaaattgatgacttgttcgtatgttcaaaatgtaacaacaaaaaaagctaacaccagtcatttatattaactttttttttttaaatcaaaaattgttaatgttagaaacatactatgaagtgcctttatctgcttagacctaaggaagattttaaagttgggttgcacaggaaatgatgatgcttcaatttcttaatagttaaaaagtgctaaatactacttgaaattattgtttacagattagtgacaagagctggggttaggatccggttggactctgacatcggatgccctcaaacatacagaacttccaaactcaagtccagccataagctattttgccaacatgtcagagtaatctgtatttttgtatgtgatttctacttttatagacttgttttaaaacaataaaacacatttttataaaaatgagtgcttaaactaagtt

SEQ ID NO: 26059 - DNA, 995 bp, Homo sapiens
gaattccgggctgtagagcttgcccgcgcagtggggatggaacgttgctaggcttagcgggtctggctgctgggggcccgagcagcacgctcggagccgccgcgcgccaaagcgggaatctgggaggcgagcagctctgcagttaatgcacgtattttaaactcccgggcctgcggacgctatgcacaggaagcacctccaggagattccagacctgagtagcaacgttgccaccagcttcacgtggggatgggattccagcaagacttctgaactgctgtcaggcatgggggtctccgccctgggaggaaaaacagggaagggggcaagggcccccccccggggaaccccaagggattggggcaagggaaaaaccaaattttcccccccaggggaaacttggctgctctcaaacctgggccacccggagagccccccacggaaacggctgaagagcaaagggagtgacaaagactttgtgattgtccgcaggcctaagctaaatcgagagaactttccaggtgtttcatgggactcccttccggatgagctgctcttgggaatcttttcctgtctgtgcctccctgagctgctaaaggtctctggtgtttgtaagaggtggtatcgcctagcatctctctactttagttagaagatgccccaatcttgtccatctagacttaagtgatagtgtcatgctaaagaatgactgctttcaggaatttttccagctcaactacctccaacacctatcactcagtcggtgctatgatataatacctgaaactttactacaagagctggggttaggatccggttggactctgacatcggatgccctcaaacatacagaacttccaaactcaagtccagccataagctattttgccaacatgtcagagtaatctgtatttttgtatgtgatttctacttttatagacttgttttaaaacaataaaacacatttttataaaaatgagtgcttaaactaagtt

SEQ ID NO: 26060 - DNA, 1444 bp, Homo sapiens
gaattccgggctgtagagcttgcccgcgcagtggggatggaacgttgctaggcttagcgggtctggctgctgggggcccgagcagcacgctcggagccgccgcgcgccaaagcgggaatctgggaggcgagcagctctgcagttaatgcacgtattttaaactcccgggcctgcggacgctatgcacaggaagcacctccaggagattccagacctgagtagcaacgttgccaccagcttcacgtggggatgggattccagcaagacttctgaactgctgtcaggcatgggggtctccgccctggagaaagaggagcccgacagtgagaacatcccccaggaactgctctcaaacctgggccacccggagagccccccacggaaacggctgaagagcaaagggagtgacaaagactttgtgattgtccgcaggcctaagctaaatcgagagaactttccaggtgtttcatgggactcccttccggatgagctgctcttgggaatcttttcctgtctgtgcctccctgagctgctaaaggtctctggtgtttgtaagaggtggtatcgcctagcgtctgatgagtctctatggcagaccttagacctcacaggtaaaaatctgcacccggatgtgactggtcggttgctgtctcaaggggtgattgccttccgctgcccacgatcatttatggaccaaccattggctgaacatttcagcccttttcgtgtacagcacatggacctatcgaactcagttatagaagtgtccaccctccacggcatactgtctcagtgttccaagttgcagaatctaagcctggaaggcctgcggctttcggatcccattgtcaatactctcgcaaaaaactcaaatttagtgcgacttaacctttctgggtgttctggattctctgaatttgccctgcagactttgctaagcagctgttccagactggatgagctgaacctctcctggtgttttgatttcactgaaaagcatgtacaggtggctgttgcgcatgtgtcagagaccatcacccagctgaatcttagcggctacagaaagaatctccagaaatcagatctctctactttagttagaagatgccccaatcttgtccatctagacttaagtgatagtgtcatgctaaagaatgactgctttcaggaatttttccagctcaactacctccaacacctatcactcagtcggtgctatgatataatacctgaaactttactacaagagctggggttaggatccggttggactctgacatcggatgccctcaaacatacagaacttccaaactcaagtccagccataagctattttgccaacatgtcagagtaatctgtatttttgtatgtgatttctacttttatagacttgttttaaaacaataaaacacatttttataaaaatgagtgcttaaactaagtt

SEQ ID NO: 26061 - DNA, 3533 bp, Homo sapiens
gaattccgggctgtagagcttgcccgcgcagtggggatggaacgttgctaggcttagcgggtctggctgctgggggcccgagcagcacgctcggagccgccgcgcgccaaagcgggaatctgggaggcgagcagctctgcagttaatgcacgtattttaaactcccgggcctgcggacgctatgcacaggaagcacctccaggagattccagacctgagtagcaacgttgccaccagcttcacgtggggatgggattccagcaagacttctgaactgctgtcaggcatgggggtctccgccctgggaggaaaaacagggaagggggcaagggcccccccccggggaaccccaagggattggggcaagggaaaaaccaaattttcccccccaggggaaacttggctgctctcaaacctgggccacccggagagccccccacggaaacggctgaagagcaaagggagtgacaaagactttgtgattgtccgcaggcctaagctaaatcgagagaactttccaggtgtttcatgggactcccttccggatgagctgctcttgggaatcttttcctgtctgtgcctccctgagctgctaaaggtctctggtgtttgtaagaggtggtatcgcctagcgtctgatgagtctctatggcagaccttagacctcacaggtaaaaatctgcacccggatgtgactggtcggttgctgtctcaaggggtgattgccttccgctgcccacgatcatttatggaccaaccattggctgaacatttcagcccttttcgtgtacagcacatggacctatcgaactcagttatagaagtgtccaccctccacggcatactgtctcagtgttccaagttgcagaatctaagcctggaaggcctgcggctttcggatcccattgtcaatactctcgcaaaaaactcaaatttagtgcgacttaacctttctgggtgttctggattctctgaatttgccctgcagactttgctaagcagctgttccagactggatgagctgaacctctcctggtgttttgatttcactgaaaagcatgtacaggtggctgttgcgcatgtgtcagagaccatcacccagctgaatcttagcggctacagaaagaatctccagaaatcagatctctctactttagttagaagatgccccaatcttgtccatctagacttaagtgatagtgtcatgctaaagaatgactgctttcaggaatttttccagctcaactacctccaacacctatcactcagtcggtgctatgatataatacctgaaactttacttgaacttggagaaattcccacactaaaaacactacaagtttttggaatcgtgccagatggtacccttcaactgttaaaggaagcccttcctcatctacagattaattgctcccatttcaccaccattgccaggccaactattggcaacaaaaagaaccaggagatatggggcatcaaatgccgactgacactgcaaaagcccagttgtctatgaagtatttattgcaggatggtgtctcttctttagaacagggaaaataggcaggaagcccaattgctggagtacttagctagttttattcttggttttccctttgccttcattctgcaagtatactagggagccatttgagagggaaaactatgaaatcttgctttttgaaatgattctaaaagcttctatcactgctttgctcttaagagccaaagttgtaggccttttgaaattttaggagagtgagcctataatttcaagataccttaaagagcaaaatttgagccacctcttccaagtgcccttcttactaagtctattcagaatcaagcttaaaaattaccaccagcaaacaatcttcatagcccatataacttttatctatttaattttatagtattgctttataagacagcttagaagaacaataagctattgtattatgagctgaacaaaaagagaatcataggatagtagcgtctgaggccatcttttctaggaataggaaagagaaaaatgtatttgaattttgcctttagatttgaaattaggttaatagaaataagtaaccccatgtaattcaccttaaaacttaacaaaagaccaaacattacaaaacccagaggtatagaatcaatataggatttgaaggcccagcagacagttttctatgacaggttaatctgaagtatcctgtaatgttcattaagttactgtgtttccagaatctaaattagatgagaaatataattgtggttttctaacttgataatcaaattatgttaacatgggtcctttagcttttaaaatgacttgctttgttttagaaaggtggtattaatccactctctattcttgaaaatttggatgggagaattctgaagttgcctgctgttttcctttagcgctgaggttcttaaggttacttttatattactctggaatcaagtattttaaattgtattttttttttaaatgatctctcagcaataattgtttgaaactatccatatataaggttatcagacctacagttccctaagaggaactgcatgttctcttcaatcagaaatatacagtagaagcaggtatatcttccatgcagtttcagtagtaagcactacttatacctacataagagttaaaatccagatgtgggaccttttgataccatcagtgatatatatttttttaaactggtacagagaagtgaaaagattaaattctacttctatttttcttttttttttttggaaacggagtctcgctctgtcaccaaggccggagtgcagtggtgcgatctcggctcactgcaagctccgcctcccaggttcacgtcattctcctgcctcagcctcccgactagctgggactacaggcgcccaccaccacgcccggctaattttttggtatttttagtagagacggggtttcaccatgttagccaggatggtctcaatctcctgacctcatgatccgcccgtcttggcctcccaaagtgctgggattacaggcatgagcaactgcgcccagccaaattctacttcttaaaaatcacaaaaactagtttaaattgatgacttgttcgtatgttcaaaatgtaacaacaaaaaaagctaacaccagtcatttatattaactttttttttttaaatcaaaaattgttaatgttagaaacatactatgaagtgcctttatctgcttagacctaaggaagattttaaagttgggttgcacaggaaatgatgatgcttcaatttcttaatagttaaaaagtgctaaatactacttgaaattattgtttacagattagtgacaagagctggggttaggatccggttggactctgacatcggatgccctcaaacatacagaacttccaaactcaagtccagccataagctattttgccaacatgtcagagtaatctgtatttttgtatgtgatttctacttttatagacttgttttaaaacaataaaacacatttttataaaaatgagtgcttaaactaagtt
